United States Patent Application Publication US 2020/0109395 A1 - sequence listing, part 18

SEQ ID NO: 72274 - DNA, 2091 bp, Gemella morbillorum M424
atgattttaagaaagatgaaggttaaaaactttaggttgctaaaagattttgaattagaatttaaagatgaattgtcattagttataggtaaaaataattgtggaaaaacatcagctcttattattttggacaagatgttaaattcatctaaagtaatgtgggaagatataaatttggaatgtcagaaagaactttatgaaaaaataattgcttttgatatatctgagcaagagaaagttacatcattagaaactgttaatctgcaattatttattgagtattatgataatgattcatatgcaaatattcaaaaatttatgatggatttaaacccggaaaataacattatagtattagaatttatttcgttaatagctgtaaaaaaaatcatagaattaaaaaacattattagtgaaaaaaatattgaagattttaaatcattttccaaatttatgagtaagaattttgcaaacttctttgaaacgaaaaaatattcaagagggtttgatgttgaagcaaacaaaataacgcaagatagatcagaagaaattgataataaagatattcaaaaagtcattaaagtggtaggaataagagctgatcgagcggtttctaatgatgatcgtaatcatgttttatcaggtttaactggtaaatatttcagttcttataaagctgcaaaagatgaaagtgagtcggtatttacaagacttgaagaaaaattggaggaagccgataaagaattatataagatttacaatggagaaaaaagtgaaggtgaagaacccattgatggtatttttagtgatgttatagatgttattaaaacttatggtggtgcagaaaatggaattgatatagcaatagagtcatctatttcagagaaaaatttattgtcagataatacaaacttaagttatagacaaggggtagattgttcgcttccagaaacatataatgggttggggtatttgaatttaattggtattttatttgagattgaaaccaaaatacaggaattgtttgaacaaccagcagatataaatctcttatatattgaagaacctgaagcacatacacaccctcagttacagtatatatttataaggaatattaaatctcatatcaaagcacatagaaataagttgttgaaagaaaagaataagcagttacagatcttaataacttcgcattcatcacatatagtttctgaatgtaactttgatgacattatatatttgaagaaaaacgggaatacggttatagctaagagctttaattctttaaaagaagagtatggtggagatgaacagaaaggatttaagtttgtaaaacaatatctgacaattaatagaagtgaacttttctttgctgataaagctatttgtatagaaggagataccgaacgaattttaatgccaatgatgatgcataagattgatagtaaagaaaagccaaaagcagatcttataccactattatcacagaatatttctataatagaagttggagcgcattctcatatatttatgcctttattttcctttttaggaacaaaagttttgtttattacggatattgactctgtaaaagctgaaaagaaaatagataaaaatggaaaagaaagaactgtatatacgagttgtcaccccgatgagggaacacatacaagtaacgcatcaataaaagaattttttaaagataccggaattgatatattgaataatcaatttaaggaacttgtagggaaaaatgctgaggataaaattaaagataatatgagaatagcctatcaaataccggaatctgatggtgagtaccaagcaagtagttttgaagatgcatttatagcattaaataaagactttatattaaaaaacaaagaagggctttgtgaatatggagctttaaaagatttttcgaatgatgaaatagaaaatggtgattattataattttgctttgaataatgtgaaaaagaaatcgggatttgcatcaagcttattgtattttgatgatgagaatggcgaagaagatgaaaaatggacggttccacattatattgaggagggcttattatggatacgctaa

SEQ ID NO: 72275 - DNA, 1908 bp, Gemella morbillorum M424
atggatacgctaacattggaaaaagaagtattagaagctcttcaatgtataaaaaatggtgaaaattttattttagaaggtggagcaggaagtggaaaaacatactccttaatttccttaataaatgcactcacagaggaattaccggatattaagatagtatgtattacatatacaaataatgcggttgcagaaattttatcaagaatagaaaatgagaatatttgggtttcaacaatccatgagtttatatgggatcttattagaaaatatcagaatgaaataaaggatattttagtagaacttattaatgatgaaggtgaaaagaactttaaaaagccaaagggttttgatgatgatttaatttctaaagattacttcaaaaatctttatgtggattatgacgagtattattccgtaacgccaaatgttgaaaataaagttaaaatcagccatgatcacattttgattgttgcagaaaaaatgtttgagaaatacaaaaaaatagcggacattttaaaggatattgcagattgcatttttgttgatgaatatcaagatacgagtcctttagttgctgatattttattaaaacatcttgagcaaagtggtaagaaaaatgtaattggtttttttggggattcaatgcagtctatatatgacgacggagttggtaatttaaatcaatatagtttaactaaaatagtaaagacacaaaaccgaagaaatccaagagtcgtaatcgaagtagctaataaatttagagatgatgatattgagcaagtgccatcagaagatataaatgcacctaatatggagaatggcactattatagaaggtagtattaaatttttatatggaaatgaaacagatgagtttataagtgtaaaggagaagaatatttttgaatcatgggatttttctgatggaaaacaaacaaaagagttaaggctaacacataaatataatgctgaaatggtgggatttaaagacttatatgatctatataatgctgatttaataattacgcttataagcaagataaagggaaaaattgataaggaaaatttagacagtgataagactttgggagaattggcattagaggtaaaacctacatataagaaagtagagttgctggatcaaattaacggaaatgaactttatcagccaatatacagtgttttagaaggtatgtcatgggaagaagcttacgaaaaatgtagagttactaaggaatcacttatgtcatataaattaaatggggtgagtggtagatatgaagctaattcttatagagataggattttacgcagattagatatattagaggagattattgaattatatgaggctaataaatttaatgattttctacgaataacaaaattttctattcataataggaatgataagatttgccttaagcaagcaattgattatcttgtaagtgaagataatcaaacgatagaagatgttttaaaatttgcagaagtaaaagggttactaaaagaagatgaattattcaatgattatattttaagtaaagggttttatttatgggagagaataaaaaagataacatttaatcaatatagaaaaagtattttatatttaaaagaattttcaccaatttgtactcaacatagtgttaagggtagtgaatatgacaatgtacttcttgtattagagtctgattggaataaatacgattttaatacattatttggaaagggatcttcaaattctaacgttcagctaagaacgaaaaaattattttatgtatgtataacgagagcaaaaaagaatttaatagtatatatgcctactaatgattctgacatattggagaaagcaaaagagttttttggagaagtaaatgttatggatatttcttcgattgaataa

SEQ ID NO: 72276 - DNA, 2040 bp, Streptococcus australis ATCC 700641
atggaaattaaaaaaatctatattcaatattatcgtttattaaacgatttttctttagagttgaaaaatgatttatccttaattgtgggtaaaaacaattgtggcaagacttcggttttatctgtgttagaaaaaatattcaataaaaattccaatcgcaatttggtatgggaagatattaatttaaatcataggagggaaatctttgagaatataaagagagtctctgatattcctgattcagaattatcgtctattttagggattaatcttcaaatttggattcaatactcagaatcagattcttatcaaaatatccaaggatttatgatggatttaaatcccgaaaataattttattattcttgaattttcgtatataattcctactcaaaagcttcgcgagataagtagtttgacttgtgattttgcagatgatttttcaaaatttgaatcatttatgaagaaaaatctgaataaatttttcgaaatacagatttattcacgtggatataatcctattactcaagaaatgacagaagaaaagtctgatttacatgaaatgaaagatgttcataaaattattaaagtaagagggattagtgctagtcgagaagtatctaataaagaaaataaccattcattatctaagacatcaaatcgattttataaattaaataatggcgaagaaattaacagtaaagcaaataatttactgcaatctgctattttaaaggcagatgaaactttaaccagagcatatagtggtgatgatagcgtagaaggaatttttacttcagtctttgaacgcgtcaaaagatttggtggaaatgatagtgaagcagaattagcaattcattcatcactatctgagaaagatattttaagcaataatacgacattgtattataagcatgacgatagtctgttacctgaaacatataatggtttgggatatttaaatttatatggaattatttttgaaattgaaactttaatggcagatataaaaaacgaacctgctgatattaacctaatatatattgaagaaccagaatcacatacacatccacaattacagtatatttttatcaagaatattaaagatttgctaaaggaacacaatgatgaactaaaagaaagtggagattttagttgtattcaaactttaattacaactcattcctctcatatagtttctgattgtaactttgatgatctaatttattttaaacgtgataacggtacagcagtatcaaaggcttttaattcattgaaagaagaatatggtgatgaacaactaggatataaatttgtaaagcagtaccttactctcaatagtagtgaattattttttgctgataaagtcatttgtgttgaaggtgatacagaaaggattttaattcctacgatgatgcaaaaggtagatacaaccaatccaataaatcaagcttctaatacaatgccattgctttctcaaaatatttcaatcattgaaacaggtgcccattcacaagtgtttaggaagttatttgattttttaggaataaaagtattgataattacggatattgatccagcaaataaaaatgaaaataatcgcttaacttcttgctcagcagtagatgctacctctacgacaaatgcttcaattaaaaatttttttgatatttctggagatgaagttttttcaatagtagctcaaaagagtttggcagaaaaaataacatcagatggtagaattcgtattgcatatcaaattcccgaagatgaaaatggttatcagcctgctagttttgaggatgcttttatcagtttaaataaacaattcattattgatcaaaaagctggttttattcaatttgaagctttaaaagactttgatgatagtgaaatagaagatttctataaatttgctagggataaagtaaacaaaaaatctgcatttgcatcaagtttattatattttgaaggtgaagaaaatacttggaaagtacctaaatatatttcggagggattattatggttgagaaaacagtag

SEQ ID NO: 72277 - DNA, 1923 bp, Streptococcus australis ATCC 700641
atggttgagaaaacagtagaaccagaggtagaaaaagtatttgaagtaataaaacaaggtcaaaattttatccttgagggtggtgctgggagtgggaaaacttattcattaatttccattattgaaaaaatatctatggaagaaccaaaaaaatcgattgtatgcattacttatactaacaatgctgttgcagaaattagatctagaatcattaatgataatttacgggtttcaactattcacgattttatatggcatgtcattaaaaatttccaaaaagagattaaagaatgtcttgttgagttaataaatgatgatgaacaaattctattcgttgctccaaaggaagtattaggtgaggaacttatttcgcttgattactttgatagtgttcgtgttgaatatactgaatggtattctatgagcataactgagcaaaataaagttcaaataagtcatgaccatgttcttatagttgctgaaaaaatgttttctaaatataagaagttgagtgatattttaaaggatactgcaaactatatttttgttgacgagtatcaagatacgagtcccttagttgtaaaaattttattagagcatctcagaaagagtactagagataatattgtaggtttttttggagattcaatgcaggctatctatgactcaggagtgggaaacatagattcctatggtcttgaaaaaatacaaaaaaatcaaaatagacgtaatccacgaaaagttattaatttagcaaataaatttagaagcgatggattagttcagattccttctagtgatgtagcggctccaaacatgaataatggtaatgtaattgaaggaacggtgaaattcatttatggtgatggtattacccaccttgaagatcttagaaatagcgaactatttaaagaattagagtttgatataccacagaaaacaaaggaattgcgattaacacacaaacttaatgcagaaacggctgggttttctaaactatttgaattgtatagttctgatttgcttgtgaaattaattacagatatgaagaaaaaatttaatgcaagtgagttagttgataaaggaaaaacttttgaagaattagtagaagaagctcaaattgttgttagaaagggtggtccattaataattgatattgtcaaatctattccagaacttttagccatttacgaagaaattaagacattttcatttgaagaagtgattagtaagagtaaagttaataaagattctttattggcctataaatttaatggtttaagtagtagatatgaggcgggtacagatagagataggattcttcaaagattagatctaatctttgaactaatagaactatataaaataggtaagcataacgaatttttgcgtattacttgctttaaaataacttcgtccgctgataaaattaatctatctaaaattatgaaagaaatctctgataatgatattacaattggaaaagtcataaaacttgcagagagaactggattaatttcaaaggacgacttatttactaattttatagaaaataagggctattatttatggttacgccttgagaaattaccatttcaagaatatgtaaatagtattgcttatcttagagaatatgtatctgtcataactcagcataaggttaaaggcagtgaatatgagaatgtcttagttttgttagataatggaagatggaatcaatataattttaattctatatttggtaaaggttcatctaatgagaaggttcaaaatagaactaagaggttattctatgttgcaattactagagcgatgaaaaatttaattgtttacatgccgagtaatgatcgtcagattgttgaaaaagcaaaagattattttgaggagtgtgatattgttgatgttctgtcattagttgattag

SEQ ID NO: 72278 - DNA, 1920 bp, Pseudomonas savastanoi pv. glycinea str. B076; identical to SEQ ID NO: 71928

SEQ ID NO: 72279 - DNA, 1683 bp, Pseudomonas savastanoi pv. glycinea str. B076; identical to SEQ ID NO: 71929

SEQ ID NO: 72280 - DNA, 989 bp, Pseudomonas savastanoi pv. glycinea str. B076
tttctccctatttcttagcgcgcatcattcgtcaggtccgatctttaaccgaccaaagccgcgcgcaggccatcatcaccagccactcaccagcagtgctcagtcgtgtgaacccgcgtgaggtgcgttactgccgatgtgagcctaagacacgggtctcgactgtcaaaaagattaggtttccagtcaacgaggtagatgcgagcaaatttgttcggggagccatgctggcgtatccggagctctatttcgctcgatttgtactgcttgttgagggagattctgaaaggatcgttctgccaattctggccgaagcgctcgatttgctgattgatccggccttcgttgccatcgtccccttgggagggcaccatgtgcagtatttctggcgtttgctaaaacacctgggtatccctcatgccaccttgctcgatctagaccttggccgtgatggcggagggtttggtcggattaaaaccgccattcaaaagctaattgagtttgacgtgccaaaaaccgcagtacttgagattgataaaggcattttgagtgatacagatcttgaaaaaatgcacgagtggtcaactactggtgatcacgcaaacctccaggcatggattagcaacaacttgagaccgcatggtgtgtttttctctgcgcctttggacctcgacctagccatgcttcaggcattccctgacgcgtatgcgggaatcattccaaaaggaggcggaccgcgcatggctgaggaaaaggccgccgatgctgtactaggcaccgcaggtccgggactcggcgcttacactggtccgttcgaggtgtataaagcgctgttaccggcttaccgataccactttctcaccaatagtaagccggccacccatttggcagcactatcgcggttaaagcagaaggacctacgtgaaaaaatgccggcagttctagctgaggtgctcaagcacatagaagcttcattgaggcgcgactag

SEQ ID NO: 72281 - DNA, 1629 bp, Pseudomonas savastanoi pv. glycinea str. B076
atggccgtttcgtcacttcgagttcgaccagaagattggacgccgattggggtaaaatctcttgaagccaatgctcttaaagtcgtcagagcgggcataaatcaatccgtcatagctggcccaggggcaggtaaaaccgagctactggcacagcgtgctgcctttttactccagacggaggccgcaccaacgccccggcggatcctcgcgattagtttcaaacgcgacgcagcctccaatctagctgctcgcgtccgtaaacgttgccatagcagtcacgccagccgattcgactctatgacttttgacgcatttgcaaaagggcttctggaccgcttcggccaagcgttacccgaattctggcggccacgcccaggttacgagataactacatactacgagagagattatagaaattttctagatctaattgcgggatctcctccaggggatataggtacgaaagcctctctgcgcgcgattggggcgaagtcgttcgagcgaaagcacctgctgggagcccccctacccgttgcggcttggcctaagcccgacgtcgctcaatgggcgatggcgcgtttttggcactattcactacacgaaggcaagaagagtgtattgacgttccctatgatcggccgactagtagagctcctacttcgaatcaaccctatggtgcgggacgcactgcgactcacgtattcgcacttattcatggatgaatttcaagacacaactcaggttcaatacgatcttgtgcatacaattttctgtggcactgacacagtggttacagctgtaggtgacaacaagcagcagatcatgcgctgggcattggccatggatgatcccttctccgagtttgacgcagattttgggggacttcgaacgacactcttcaacaactatcgatcatcccctgacttggttcgtatccagcacgtgctagctcaggcattagattcaggtgcgatggagccgatatcccaaaccgaaggtacgattgatggggagagctgcgtaatcctcgactttccaagcccaaaaactgaagcgcgacatctggctaaaactatttcagcggccattgctgacaagaaactgctccctcgcgattttgtcgtactcgttcggcagaaggccggggactacgcagatgtattgagaccagcttttgaagctgaaggcctttcactaagaaatgaggctggaactgctggacaaatcatgttgcaggagttgatgaccgaggatctgtctaagcacttagtttcgcttctccgtctcgcaatgaacccgcgcgctggacgccactggtctaactgccagacatggctcgctttattgcgcggcgtggcagccgatgaacctggcgttcagcaaaaactagcgattgacttagacgcgttcgcaagagccctcagcgcgaactaccccacccctccaggcgatgaagctacatcaaggtcattggttaccgaggtgctgaacttcttaggccgtgagcgtcttagcagctcctatccgagctatgcacacggggactggctagacacggttatagattctgcattgaaacatttattagattgctctttaaacagtatcgactggtgctccctgccatga

SEQ ID NO: 72282 - DNA, 1986 bp, Pseudomonas savastanoi pv. glycinea str. race 4
gtgcgtattgagtctgtaagcttatctggattccgctgctttggcccgaatcccatcaccgtagatgtttcggcagaaattacgaccattgtaggcccgaacgcagcgggaaaaaccgcactcttgcacgccatgctgaagttgtttggggtgactcgagcacagcgcacaattctaaggtcagatttccatttagggcctgatgatgaccctgagaatcgtgattccaagtacctcttcattgaggtttcgatcgcttttccagaattaaaaaatggcaccgcaaccgcagaaacgatcgcaccgtcgtttaagcatatgctgattgatcgcgcagaaaagccgcctatatgtcgtatgcgcctagaagcgcagtgggatgacgacgggacggttgagggcgaggtctcacaagagctcttctgggtcgatacgctcgatgaacaaccggaaaatgacaaacgccaccccgtcgcggtggcagaccgtggtctgatccagctttactacacgccggccagtcgtgatgcggccgcgcagaccagagcgactaccggtgcattagctgctcgtttgttacgtgcgattgaatggtcatccgatacggaggatgcagttcaagaaaccacagaaagcctaacggctgctttcgaagatgaatctgcaatcgccgctataactaaagcgcttcaaactcgatggtctgatcttcacgatgaagttgttgatactaatcctaggcttagcctagtgagccgtcgctttgaggacgtcgtcaacaagatcgctgtagtgtttgaacaaggagccgatgggcgtgagcgcgggattgaggccctcagtgacggtcagcaatcactcttctatttcgcgctggcagcagctgtatttgacttggagcgagaggtcgtcgctggttcagttgagggcttccgtgacaatgcattgcgtattcccgcactctctattttcgcattggaggagcctgaaaaccacctttctccctatttcttagcgcgcatcattcgtcaggtccgatctttaaccgaccaaagccgcgcgcaggccatcatcaccagccactcaccagcagtgctcagtcgtgtgaacccgcgtgaggtgcgttactgccgatgtgagcctaagacacgggtctcgactgtcaaaaagattaggtttccagtcaacgaggtagatgcgagcaaatttgttcggggagccatgctggcgtatccggagctctatttcgctcgatttgtactgcttgttgagggagattctgaaaggatcgttctgccaattctggccgaagcgctcgatttgctgattgatccggccttcgttgccatcgtccccttgggagggcaccatgtgcagtatttctggcgtttgctaaaacacctgggtatccctcatgccaccttgctcgatctagaccttggccgtgatggcggagggtttggtcggattaaaaccgccattcaaaagctaattgagtttgacgtgccaaaaaccgcagtacttgagattgataaaggcattttgagtgatacagatcttgaaaaaatgcacgagtggtcaactactggtgatcacgcaaacctccaggcatggattagcaacaacttgagaccgcatggtgtgtttttctctgcgcctttggacctcgacctagccatgcttcaggcattccctgacgcgtatgcgggaatcattccaaaaggaggcggaccgcgcatggctgaggaaaaggccgccgatgctgtactaggcaccgcaggtccgggactcggcgcttacactggtccgttcgaggtgtataaagcgctgttaccggcttaccgataccactttctcaccaatagtaagccggccacccatttggcagcactatcgcggttaaagcagaaggacctacgtgaaaaaatgccggcagttctagctgaggtgctcaagcacatagaagcttcattgaggcgcgactag

SEQ ID NO: 72283 - DNA, 1671 bp, Pseudomonas savastanoi pv. glycinea str. race 4
atggccgtttcgtcacttcgagttcgaccagaagattggacgccgattggggtaaaatctcttgaagccaatgctcttaaagtcgtcagagcgggcataaatcaatccgtcatagctggcccaggggcaggtaaaaccgagctactggcacagcgtgctgcctttttactccagacggaggccgcaccaacgccccggcggatcctcgcgattagtttcaaacgcgacgcagcctccaatctagctgctcgcgtccgtaaacgttgccatagcagtcacgccagccgattcgactctatgacttttgacgcatttgcaaaagggcttctggaccgcttcggccaagcgttacccgaattctggcggccacgcccaggttacgagataactacatactacgagagagattatagaaattttctagatctaattgcgggatctcctccaggggatataggtacgaaagcctctctgcgcgcgattggggcgaagtcgttcgagcgaaagcacctgctgggagcccccctacccgttgcggcttggcctaagcccgacgtcgctcaatgggcgatggcgcgtttttggcactattcactacacgaaggcaagaagagtgtattgacgttccctatgatcggccgactagtagagctcctacttcgaatcaaccctatggtgcgggacgcactgcgactcacgtattcgcacttattcatggatgaatttcaagacacaactcaggttcaatacgatcttgtgcatacaattttctgtggcactgacacagtggttacagctgtaggtgacaacaagcagcagatcatgcgctgggcattggccatggatgatcccttctccgagtttgacgcagattttgggggacttcgaacgacactcttcaacaactatcgatcatcccctgacttggttcgtatccagcacgtgctagctcaggcattagattcaggtgcgatggagccgatatcccaaaccgaaggtacgattgatggggagagctgcgtaatcctcgactttccaagcccaaaaactgaagcgcgacatctggctaaaactatttcagcggccattgctgacaagaaactgctccctcgcgattttgtcgtactcgttcggcagaaggccggggactacgcagatgtattgagaccagcttttgaagctgaaggcctttcactaagaaatgaggctggaactgctggacaaatcatgttgcaggagttgatgaccgaggatctgtctaagcacttagtttcgcttctccgtctcgcaatgaacccgcgcgctggacgccactggtctaactgccagacatggctcgctttattgcgcggcgtggcagccgatgaacctggcgttcagcaaaaactagcgattgacttagacgcgttcgcaagagccctcagcgcgaactaccccacccctccaggcgatgaagctacatcaaggtcattggttaccgaggtgctgaacttcttaggccgtgagcgtcttagcagcttctatccgagctatgcacacggggactggctagacacggttatagattctgcattgaaacatttattagattgctctttaaacagtatcgactggtgctccaccctaggagggtgtagacaaaataaattaaactttcactcccttgtctga

SEQ ID NO: 72284 - DNA, 1920 bp, Pseudomonas savastanoi pv. glycinea str. race 4; identical to SEQ ID NO: 71928

SEQ ID NO: 72285 - DNA, 1683 bp, Pseudomonas savastanoi pv. glycinea str. race 4; identical to SEQ ID NO: 71929

SEQ ID NO: 72286 - DNA, 2238 bp, Pseudomonas savastanoi pv. glycinea str. race 4
atgcgtataacaaagatcaagatgcagaactttaggttgttgaaagatatatcagttgacttggaaagtggcctgtcagtaattattggaaaaaataataccggtaaaacgtcgtttcttctatgtttggagaaatttataggtggcacagcgacccgcaacacatttacctttgaggatctgaatagtgacgtaaaagataatctgttgaaaatagtctcaggtactgcgctgaatgaaagcagcattggtatcgttctgaaagttttcatcgagtatgacgacgatgacgacctcgagaatataggagacaaggttattatggatttagatcccgataataaggttgtcgttctcgcattcgaatataaggcgactacggatgatattgctacgctggtggaagattttaaagagctgacagcaaaaaaaaatgcagaaaaaaaatcgttgccctcgcttttcgagtacttgagggataagcacaataaatatttcaccatctcgcgtcgtagtttgtactttgatatgcaaacaaaaaaagaggatgatgagcatttcgtagacttagacctcgaaaatattaatttatctaaaatcataaatttcaaatggattagtgctaggcgtaatgtgtctaacaaggatgcggacaactctctatcacaactatcagctaagatttataaaaagctcgaagctagcaaccctgatgagtctgtggtggaagagttcaaagatacgttgactaatactgatgccaagctgaatatcgtttaccagaaaatatttgaaggggttataaatgatgtgaaaaaatttggggggttaagtcaaaatgattctgttataaaaattgtgtcatcgctgcagcatcgtgatttgttggaagagaataccacggtcatgtacggccttggtaataacgagcatgacctaccagaaaactataatggattgggatatctaaacctaatcagtatgatatttgaaattaaacttaagcttcatgactttcataaagatatcaacgaatctccatctgatataaatttgctcttcatcgaggagccggaagcgcatacacatccgcagcttcagaggatcttcattaaaaatattaagtctttgttaaagcctggtataaaaagagtcgatggtgtaaggcgagatctccagacgatactcagtacacactcttcatatatagtatctgaaagcgattttgaagatatcaagtatttcaaaaaaacggacaaaggcgtcacatccaaaaatctgaaagatctaaaagactactacgaagactcgcagcactatacatttcttaaacaatacttgaccattcaccgttccgagttgttttttgcagataaagcggtttttatagaaggtgacacggagcgtgttttgcttcctgcgatgatgtcgaaagttgatcaagaagatcttattaaggaattagaaacaggtgttgtagataatattccactgctctctcaaaatatttccatgattgaggttggagcttattcacatatttttgaaaagttcgttaattttataggtgtcaggtcacttattattaccgatatcgatgcctcggctatgatgcctgttatagataaagcaaccggccagcctaagctcaacaaaaaaaccgaagttcaattaaggcttcagaagtgtaaagttgaacatggcactcacactacaaacgcctcgctacggtttttttataagaaagaagatttggctttttaccaaaatctagattcaagtcagaaaaccttagagaaaatggacgatgcccagtggtccccttctatattaggaaagctactctgtgcctaccaagtacccgaaaagaatatggagggcgaggtctaccatgccacgagctttgaagacgcgttttttcatataaatagagtttttattaagagcttagctttcgacgaaggtgattttttcattggagataaaaaacttccgtcgttagttcaaatacacctaaaaagttttgcgagtggagatacagatgcattcgattgcgcggagaatgcgattacaagtaaaccgtcgtttgctatggagatattactaaacagcacaattaaaacggtatcagtattgaatgctaacacggcgaaattggagaatttctcgattgatttttctaattggaatacaccattgtacattaaggaggcattgcaatggctcaaacaaggctag

SEQ ID NO: 72287 - DNA, 1902 bp, Pseudomonas savastanoi pv. glycinea str. race 4
atggctcaaacaaggctagcactcgagcccgaggttcgaagcatatttgatcttgtcgatcaggggaaaaacttcttgctgagtggaggggcaggtagtgggaagacttattctctcgttcaatttatacggcaggtacttgctgaggatcccaagaaaacaatcgcatgcatcacctatacaaatgctgctgtagcagaaattcgaggacgtattagtgctcccaatctgcatgtgggtacaatccatgagttcctgtgggacattattcgtccatacaaggctgagctgattgatgcattgattttttcacttaaaagtgagtctctcactagtatcaaaaatccagatgataagtttgatccggaagttcttagaggtgcagaggtacagtacaaggagtatacaagggtcagagaggctatcgtttcgcatgacgaaatcttgaagctggctcatggtatgttaagcgcttatcctaagttatgcgacatcgccaaagatcgctataagttcatactggtggatgaataccaggatacgtctgaattggtggtagatatacttttagtgcactttcagaaaagtagcaaaacaagcattatagggttcttcggtgatgcgatgcagtctatatatgacgagggcgtgggagatctcaataagtatcgcaagctagggttggttgaagaggttaaaaaactacagaatagaagaaatcctaagttaatctatgagcttgcgaatagactgcgaaccgatggtataactcaagaggcatcaactgacgaaaatgcaccaaacatgtctgaaggaaaggttatatgtggaaacatgaagcttgtttttaccgccactgatctagataagctggacgaggttaaagactcgttagggtgggattttaaagatgttaaagaaaataaagagctcaatcttacccataatctaatcgcacctaaggctggatttgctgaactgatgctgatatacgacggtgataaaataattgcttatcgtaatcggataaaagatttcataaaagatggaaacatagaggaagacttctcagggtttacctttggggaggtgattgactatctagtagagagattcccaggtaaagtaaaagatgtcactcccacaaaagggatgaagccttttatcgatagccaccaagagctatatcaaatagctctggcgacaccttacgttacattccggcgtatgtatgttgccaaagaatcgctcatcgacgacaaaaaagatgacccttccgctaccagcaaagcgggaagcaaacgagatgcgctgataaagcacctttttaagattcaaaatattatcaatctttatgagactggacgttataatgagtttttaaagagaactgagtttaaaataaggtctgtcgaagataaaagactgctaaaaaagatcattgacgagattagtgcgatgtcagatcggtctattggggaggtaatagaccgtgcagatgaacttggggtctgtaagaaggatgataatctttcaatatttttctctagaagtagatatttgtatgagcgggttataagtgtaaagttcaacgagttccaaaatctttttagatatttggaagggtatacgcctttttctactcagcacaaaataaaaggagctcagttcgacaacgttttagttattctggataacggaaactggaataattataattttaaatacatattcgaaggtgctgggaacgagtcggttatcgaaagaacgcggaagctattttatgtctgctgcacccgatctaaacgtagcttagtggtctattaccgcaatccttctgaaaaagcgcttgcaaccgccagaaagtggtttggagacgaatgtgtacaatgtattgattaa

SEQ ID NO: 72288 - DNA, 2034 bp, Streptococcus infantis ATCC 700779
atgagaattaataaaattaatattcgaaattatcgtctattgaaggatttttctttagaattgaagagtgaattgtcgttaattgttgggaaaaataattgcggaaaaacctcagttttatctgtattggaaaaggtaattaataaaagatctagtttaacctgggaagatataaatttaaatcatagaaaagtaatttttgaaaatataaaaaaggtctcggacattcctgactcggaattagaacctactttaggaatcaaccttcaaatatggattcagtactcagaagaagattcttatcaaaacatccagccatttatgatggatctaaatcctgataataattttattatacttgaatttacgtatacaatccctattcaaaaacttcgtgacttaaattatcaagttagtgattttatagatgatttttcaaagtttgagttgttcatgaagaaaaatatgagtaaattttttgaaatgcaggtttactcgctgggatacaatccttctactcaaaaattaacagaagaaaaatctaatttacttgaaatgaaagatgttcataaaattattaaagtaagagggatcagtgctagtcgagaagtctctaataaagaaaataatcattcattgtctaagacgtcaaatcgattttataaattaaataatggtgaagatattgacaccaatgcaaataatttacttcaatctgcaattttaaaggcagatgagactttaacgaaagcctatagtggtgatgatagcaacgaaggtatatttactcaagtctttgaacgagtaaaaaaatttggtggaaatgatagtgaagcagagttggcaattcattcatcactgtctgagaaagatattttaagtaacaatacgacgctatactataagcatgatgatagtctattgccggaaacatataatggcttggggtatttaaatctatatggaattatttttgaaattgagactgtaatggcagatatagaaaaagatcctgcagatattaacctagtttatattgaagagccagaatcgcatacacatccacaattacagtatatttttatcaagaatatcaaagatttgttaaaagtacacgatgatgaactaaaaacacgcggagctactagtggtattcaaactttaattacgactcattcctctcacatagtttctgattgtaactttgatgatctaatttattttaaacgtgataacggcacagcagtatcaaaggcttttaattcattgaaagaagaatatggtgatgaacaattaggatataaatttgtaaagcagtaccttactctcaatagtagtgaattattttttgctgataaagtcatttgtgttgagggtgatacagaaagaattttaattcctacgatgatgcaaaaggtggatatatccaatccaataaatcgaacttctaacacaatgccattgctttctcaaaatatttcaatcattgaaacaggtgctcattcacaagtgtttaggaagttatttaattttttaggaataaaagtattgataattacagatattgacccagcgaataaaaatggaaataatcgcttgacttcttgttcagcagtagaggctacttctacgacaaatgcttcaattaaaagcttttttgatatttctggagatgaagttttttcaatagtagctcaaaagagttttgaagaaaaaataacatcagataatagaattcgtattgcctaccaaattcctgaagatgaaaatacttatcagcctgctagttttgaggatgcctttatcagtttaaataaacaattcattattaatcaaaaagatggtcttattaaatttgaagctttaaaaaacttcgatgatagtgaaatagaagatttctataaatttgctagggataaagtgaataaaaaatctgcattagcgtcaagtttattatactttgaagatgatggaaatacttggaaagtgcctaaatacatttcggaggggttgttatggttgagaagacaatag

SEQ ID NO: 72289 - DNA, 1923 bp, Streptococcus infantis ATCC 700779
atggttgagaagacaatagaaccggaagtagaaatggtatttgaagcaattaaagaagataaaaacttcattcttgaaggtggtgctggaagtggaaaaactttttcattaatttccataattgaaaaaatctcaagagatgaaccagacaaatccattgtatgtattacttatactaataatgctgttgccgaaattagagagcggataactaatgataaattaaaagtatcaacgattcatgaatttatctggagtatcattggacaatttcaaaatgaaataaaatactgtttaattgatctaataaatgatgatgagcagaaagaatttattagacctcttgattatccaagtgaaagtcaacttacagatacttattttgaaaacattcgtgtagattatgatgagcgttattcaatgagtataattgataatcgcgttcaaattagtcatgaccatattctattagttgctgaaaaaatgttttctacttatcctaagttatgcgacattttgatcgatatagctgattatatttttgtagatgaatatcaagatactagtccgttagttgtaaaaattttattggaatatatacagaatagaacaaagaaaaatattgtgggattttttggagattctatgcaagccatctatgactcaggagtaggagacttaagttcgtataatctaataaagatagcaaaagctcaaaatcgtcgcaatcctaaaaaagttattgatttagctaataaatttagagatgatggattggttcaaactccatccagcgatgatacagcacctaatatggataatgggagtatcattccaggaatagtgaaatttatctatgggaatgatattaatcaacttgaaattcttagaggtagtcaactttatagaaagttagaatttaatgcaccctcaaaaacaaaagaattgcgcctgacacataaacttaatgcagaaatggcaggtttttctaagttatttgagttatataatactgatttatttgtaaaattaattacaggtataaagaaaaaaatcaatgagaacaagatagttgataatggaaaatcatttaaagatttagtagaagaagctcaaatagttgttagaaggggagggcccttaatagtcgatgagattaaatccacttcagaactatcagctttttatgatgaaattaaaacgtgctcgtttgaagaagttagtagtaagagtaaaattaataaagaatcgctattatcttataaatttaatggattaagtagtagatatgaagcgggcacagatagggatagaattcttaaaaggttggatttagtctatgagctagtaaaactatataaaacaggtaagcataatgaatttttacgtattactaagtttaaaataacttcgtccaaagataaaattagtctatcaaatgttatgacagaaatctctgctgatgatatcacaattggaagagtaatagagcttgcagaggaatgtgaactaatttcaaaggatgacttatttactaattttattaaaaatagaggacattatttatggtcgcggcttaagataatgccgtttcaagaatatgtaaatagtattgattatctcagagaatatgtatctgttataacgcaacataaggtcaaaggcagtgaatatgagaatgtcttagttttattagataatgggaaatggaatcaatataattttgataccttgtttggaaaaggttcttctaatgagaacgttcaaaatagaactaagaggttattctatgttgcaattactagagcgatgaaaaatttaattgtttacatgccgagtaatgatcgtcagattattgaaaaagcaaaagattattttgaagagagtgatattgttgatgttctgtcattagttgatgagtaa

SEQ ID NO: 72290 - DNA, 2040 bp, Streptococcus parasanguinis ATCC 903
atggaaattaaaaaaatctatattcaacattatcgttcattaaacgatttttctttagagttaaaaaatgatttatccttaattgtgggtaaaaacaattgtggcaagacttcggttttatctgtgttagaaaaaatattcaataaaaattccaatcgcaatttggtatgggaagatattaatttaaatcataggagggaaatctttgagaatataaagagagtctctgatattcctgattcggaattatcgtctattttagggattaatcttcaaatttggattcaatactcagaattagattcttatcaaaatatccaaggatttatgatggatttaaatcccgaaaataattttattattcttgaattttcgtatataattcctactcaaaagcttcgcgagataagtagtttgacttgtgattttgcagatgatttttcaaaatttgaatcatttatgaagaaaaatctgaataaatttttcgaaatacagatttattcacgtggatataatcctattactcaagcaatgacagaagaaaagtctgatttacatgaaatgaaagatgttcataaaattattaaagtaagagggattagtgctagtcgagaagtatctaataaagaaaataaccattcattatctaagacatcaaatcgattttataaattaaataatggcgaagaaattaacagtaaagcaaataatttactgcaatctgctattttaaaggcagatgaaactttaaccagagcatatagtggtgatgatagcgtcgaaggaatttttacttcagtctttgaacgcgtcaaaagatttggtggaaatgatagtgaagcagaattagcaattcattcatcactatctgagaaagatattttaagcaataatacgacattgtattataagcatgacgatagtctattacctgaaacatataatggtttgggatatttaaatttatatggaattatttttgaaattgaaactttaatggcagatataaaaagcgaacctgctgatattaacctaatatatattgaagaaccagaatcacatacacatccacaattacagtatatttttatcaagaatattaaagatttgctaaaggaacacaatgatgaactaaaagaaagtggagattttagttgtattcaaactttaattacaactcattcctctcatatagtttctgattgtaactttgatgatctaatttattttaaacgtgataacggtacagcagtatcaaaggcttttaattcattgaaagaagaatatggtgatgaacaactaggatataaatttgtaaagcagtaccttactctcaatagtagtgaattattttttgctgataaagtcatttgtgttgaaggtgatacagaaaggattttaattcctacgatgatgcaaaaggtagatacaaccaatccaataaatcaagcttctaatacaatgccattgctttctcaaaatatttcaatcattgaaacaggtgcccattcacaagtgtttaggaagttatttgattttttaggaataaaagtattgataattacggatattgatccagcaaataaaaatgaaaataatcgcttaacttcttgctcagcagtagatgctacctctacgacaaatgcttcaattaaaaatttttttgatatttctggagatgaagttttttcaatagtagctcaaaagagtttggcagaaaaaataacatcagatggtagaattcgtattgcatatcaaattcccgaagatgaaaatggttatcagcctgctagttttgaggatgcttttatcagtttaaataaacaattcattattgatcaaaaagctggttttattcaatttgaagctttaaaagactttgatgatagtgaaatagaagatttctataaatttgctagggataaagtaaacaaaaaatctgcatttgcatcaagtttattatattttgaaggtgaagaaaatacttggaaagtacctaaatatatttcggagggattattatggttgagaaaacagtag

SEQ ID NO: 72291 - DNA, 1923 bp, Streptococcus parasanguinis ATCC 903
atggttgagaaaacagtagaaccagaggtagaaaaagtatttgaagtaataaaacaaggtcaaaattttatccttgagggtggtgctgggagtgggaaaacttattcattaatttccattattgaaaaaatatctatggaagaaccaaaaaaatcgattgtatgcattacttatactaacaatgctgttgcagagattagatctagaatcattaatgataatttacgggtttcaactattcacgattttatatggcatgtcattaaaaatttccaaaaagagattaaagaatgtcttgttgagttaataaatgatgatgaacaaattctattcgttgctccaaaggaagtattaggtgaggaacttatttcgcttgattactttgatagtgttcgtgttgaatatactgaatggtattctatgagcataactgagcaaaataaagttcaaataagtcatgaccatgttcttatagttgctgaaaaaatgttttctaaatataagaagttgagtgatattttaaaggatactgcaaactatatttttgttgacgagtatcaagatacgagtcccttagttgtaaaaattttattagagcatctcagaaagagtactagagataatattgtaggtttttttggagattcaatgcaggctatctatgactcaggagtgggaaacatagattcctatggtcttgaaaaaatacaaaaaaatcaaaatagacgtaatccacgaaaagttattaatttagcaaataaatttagaagcgatggattagttcagattccttctagtgatgtagcggctccaaacatgaataatggtaatgtaattgaaggaacggtgaaattcatttatggtgatggtattacccaccttgaagatcttagaaatagcgaactatttaaagaattagagtttgatataccacagaaaacaaaggaattgcgattaacacacaaacttaatgcagaaacggctgggttttctaaactatttgaattgtatagttctgatttgcttgtgaaattaattacagatatgaagaaaaaatttaatgcaagtgagttagttgataaaggaaaaacttttgaagaattagtagaagaagctcaaattgttgttagaaagggtggtccattaataattgatattgtcaaatctattccagaacttttagccatttacgaagaaattaagacattttcatttgaagaagtgattagtaagagtaaagttaataaagattctttattggcctataaatttaatggtttaagtagtagatatgaggcgggtacagatagagataggattcttcaaagattagatctaatctttgaactaatagaactatataaaataggtaagcataacgaatttttgcgtattacttgctttaaaataacttcgtccgctgataaaattaatctatctaaaattatggaagaaatctctgataatgatattacaattggaaaagtcataaaacttgcagagagaactggattaatttcaaaggacgacttatttactaattttatagaaaataagggctattatttatggttacgccttgagaaattaccatttcaagaatatgtaaatagtattgcttatcttagagaatatgtatctgtcataactcagcataaggttaaaggcagtgaatatgagaatgtcttagttttgttagataatggaagatggaatcaatataattttaattctatatttggtaaaggttcatctaatgagaaggttcaaaacagaactaagaaactattttatgttacaatcactagagcaatgaaaaacttaattgtttatatgccatgtaatgaccaacagattcttgaaaaagctaaagattattttgaacagagtgatattgttgatgttctgtcattagttgattag

SEQ ID NO: 72292 - DNA, 2046 bp, Streptococcus urinalis 2285-97
gtgtttctagaaaaagtagaatattgggattttcgaaaatataaatcaactgatgattctcccggattgactgttaaatttcaaagaggaatgaatttgatagttggtgagaacgatgctggaaaaacagcaattattgatggaatcaaattattattaggtactttgagcgatgactacgatagaattgtagatacagatttttacacaatggatggaaagatattcaatgaggagtttaaaatcattggattatttaaggggctttcagatgaagaagctgctaaatttttagagtggatttcatttgatgagggaaataatcctcaattgaaaattacattaaaagttgttaaaaagaaaaaccctaatggaaaagagtattttgatcgtaaaatatatggtggggacaaccattccgagacaatcatagatagcgaggcaaagcaactcttaaaagctatctatttgagaccattaagggatgctcagagggaattacgtccaggtccttattctagattatctaacattctttctgcccatcctcagattggcgaaggtggaaaacaagaacttttggatattgtgggtaaggcgaacggagaggtaaaagaatttttctctaaggatgaacataatgtggttcagttaattatggatcaattagcaactttttatgataaaaatgattttgaaaaaagtaagattgcatttaatgtttcagaggctaatatttattctatactatcgagactaagtttagatactgaaagtgttaatttagggttaggcaattccaatattttatatattgcagttgaattgcttttgatgcatgatgatagtgattatatcggtcctagaattgcattaatcgaagaaatagaagctcatttacacacacaagcccaaattcggttgattaagcatatggagaataattcttctacccaatttattctaactactcacagcaccaacttagcctcttctatcaatcctaagaacctaattttactatacaacaatcaagcattctcaatggcagaatcagaaactttgctaggaaaagaagattatgagtttttggaaaggtttttagatgcgaccaaaagcaatttattttttgccaaaggattgatatttgtagaaggtgatgctgaaaatttgctgcttcctgcatttgctgagctaataggatatccgttacatgaatatggtgtttctatagttaatataggaaatacagcatttgaacgctacatcaaattattttcaagaagaggagatgatagaattgaattacctgtttctattgtaactgatgtagatgtcagacctctggaatattacaatgataaaggtacgactggcgaagtatacgtaatagaaagtcaaaatgaatttcaacagattttaagcgaattgggattagaatctgatttaactgatgaagaccgtccctacggtacaatattctctacaagaaataaacttaaagatgaattcgagattagtgaaactttagatgaaaatgaattcaataaaaaagttgctaaagaattgactaaagattatattaatattcttataggagtaaaaaagaataatattatacaaaaatacaaggactataatgcgaattctaaaacatttgtcgcaccagcatggactttagaatatagtttagcgagaagtccgttagtaaaattactctggaaatcaattcatgaaacaagatacaagaacccttacagtcctgttaatcaaaataagtttgatgagataaataatcagcttaccactagtgatgatacaatcagttccgaactagcttatgatatctttaaacctttaaacgataagaaggtctctaaagcgattgttgctcaaaagttggcgattgaaattggaaagttagctagtgagaataaagagcaacttaaaacagaagtgctttccaatgactacactcaatatctagtgaaggcgattaaatatgctgctcaaatcaatgaagaagagggagggactgatgaatga

SEQ ID NO: 72293 - DNA, 1857 bp, Streptococcus urinalis 2285-97
atgaatgaattaatagcatcaattgagaaaagtttactcccgtctggatgtcatttttccgaggaacaaaaggatgtcattttacacaacgatacaatggacgttgtcgctggacctggaactggaaaaacaacagtactaactgcacgtgttaaaatattacttgaacaattgaaggattcaggacaaggaatttgtgtacttactcacactaatgttgctgtggatgaaataaaatcaagtttaagaaaactcgggattgaagacataaaaactcctcactttattggaactattcaagattttttcaatacattttttgctaagaaagcgtttcatttaattcttggcgataaaaaaatgcgagtacttgatgatgatatatttcgtgaaagatttaataagcagtttgttggatattatcaattcttagatgtttcagttctgaagtatttacccaatccagctggaaaaatagataaatggaattttagtcaagaggctaaaccagtgagagtagaatctaaggtgggtggacgaaataagcaatataataacgcatttaatacaagtatggagaatttatttaaatcaggtattattacaaataattgttgtctagaattgtcaaaatggtatattgaacagcataacgagatgtttagaaatataatttcaaaaagatttgattatttattgttggacgaagtgcaagatactagtcaatttcaatttgaattaattcaatcgttatttgataaaacttctgtaatcattcaaaagtttggtgatccatatcaagcaatatataatatttggggtggggatacggaattagcttgggaaattgatgactctatggagaagcgtatttcaaaaacatcgcgattcggcgagtctattgtaaatatagtgaaaaatgtttgtgtgaagaagtatgatgatttggaatcagattctaagaataattccttccctccatattttattgtctatgataatggcgatgatttaattaataaatattgttcactgattgatagattagaaaaaggaaatgaaacttttaagaactcatcaaagtctaaagttattgtctcagcacagcacaaggacttggaaaatacttttggtgaaagataccaacgtgttgttgtaaaggatctaaattacaggagtgatttagacttatttttggatatatgcttaaaagaattatcaagaaattttgaaaataactttgaagatagattgaaagaagatggttttagaataaagatatttaaaattattaaaaatctgagaaatgaagatgatgagaaaataatcgatggattgagtgcacttcttgatgaactcatagatgatgagggattattgcaaaataaaaataccttatgtaatgagattaaagataagttgcaaaataatttttctaaaaacatacaaattcaaactaatgtgtcggtagataatgcaggtaaagacataagattggggactatccattcggtaaaaggggaaactcacaaagcaactttactgatgttgaattcaaaatttactaatgggtatgcggatacctcacctagctactctatacttcaattgcttgaaaaatatttgagtaataattatgtagaactaccggaagataaaaatgatgaggagaaggaaacggaaaaagctcttaaacttgcatatgtggcactcagtagaccgactcatctagtttgtataggtattccggctcaattaattgaaagagacagtgattttttgagtaatctgcagaaagctggatggatagaatttcctacaatcaatgatacaacaattgtaaataacttgatgtaa

SEQ ID NO: 72294 - DNA, 2070 bp, Streptococcus dysgalactiae subsp. dysgalactiae ATCC 27957
atgaagttaacaaaagtaattattaataattttagatcattcggtgaaagtcaaattattgaattaaacaatcaaacggtactgattgggaataatagttcgggaaaaacaactgtattacaagcattgagtaagctgttttcggacaaacaaaatgatagaataattcggaaaagtgattttcatttaccaaagggattaagacctggagaaaatagtaggaccctttttatagaaactatttttgagtttgatgaactggatggaactgcttacagtccagccattccatcatttttcgaacactttacagtttctcaaggtgatgcaaaaccttttctacgaatcagattagaatcttcctgggaagatgatggaacagttgaaggaagtattgatactcaaatttattatatttcatctcccgaagatattattaaagatgaagataagcaccgtgctcctagaaaggatttggataaaattagggtactctatgtacccgcttcaagaacgcctgagaaggagttgggaaatgcttcaggtagtatgttaagtaggctggtaaatagtataaattggaccgacgatgagataaaagaaattacaaacaaaattgatgagttgaataatacttttttatctgaaagcggagcattaacccaaatcaaccaagaaatccagaaatcgtggaaactatatcatgaagacaaccgtttttctcaggcagagttgactattaattcttctgagatggtgggagcccttagacaaattgctttaaaattttcaccgacaaccacagaagaagcgtttacagtttcagatttaggagatgggctgagatctattttttatttttcacttgttgattcaatacttgatattgagttagaaattaccaaagaccgtgaagaaaatcctgataatccaagatttaagttgattccactagtactaactatcttagcaatagaagaaccagaaactcatattgctccacatcacattggaaaactgataaaaaggtttaagcaattaggcaataatgacaactctcaagtaattttaacgtcacattctccagctattgtaaaaagaattgacccagaagatttgaggtatttaagaatagaaaataatgacagagttcttcaaaccattgtttctgatatacagctacctcaagctatagatgcatcttataaatatattaagggagcaattcaagcttatcctgaactatattttgcgaagttagtagttctaggtgaaggcgacagtgaggaactgctattaccaaagttttttgatttacttgggaaagaggtagatagctctcagatttcaattgtccctttagggggcagacatgtcaactatttttggaaattattgaatgctctcagaattccttatattaccttgttggattttgataatgagagatacggaggcggttggggaaggataaaatatatttctcaacatctgtatgagctgaacacagagtttcaagaatggttcaatactcagggacttgattttaatgaaattggggcacgagagtgtgaatcgatggaagataaacgtctgattaattggtttaataagctcgaagaatttaatgtctatttttcgtcgcctcttgatattgatttcttgatgctacaacattataaggaacattatctggatatgttatcttcgaaagaaggaccagtcgtttcatatgctgattcaggtgggaataataaaaaagtaaaattaactgatttggattgtattgataaattgcagttagaaggtctcgaaaaacgtatagaagaagcaaagatagctactttaaaggataagagtggaccgggggatagttttactagggaagagaaagaattaatgatttggtatcaatatttctttttaggtagaggaaagccaacaactcatatgcaatttttatcatctattagtgatgatgaattaacaagaaatctaccccctgtatttgaaaaaatagttaaccgtgctgaagaattacttggagatattgaacatggtaaagagtga

SEQ ID NO: 72295 - DNA, 1818 bp, Streptococcus dysgalactiae subsp. dysgalactiae ATCC 27957
atggtaaagagtgaggagtggtttcctaaaggagatatcattttagaagagactgcattaggagccgtcaaagatgtgactaactgtttagtcattgctggaccaggtgcggggaaaactgaattactagctcaaaagttagactatctattctctacaaataaatgcgtttctccgaaaaaaattctagcattaagtttcaaaacggatgctgcatcaaatttgaaagaaagagttaagaaacgttatggtgatgaatatgcttctcgttttacctcattaacctattcggcttttgaaaagagaattttagaccaatttagagatgttctacctgaggatatacgaccatcaagagattatttgattgaagattgggatactataaaagaactactctctatgaatggaattaatgttaatggatggagaatgtcagatataagaaattttgtcgaaaatattatacttaatgacggaaatactcacaaattaaaaaaggatttactaaaaggaacacaagataataagccggtcctcttgtataggcaaataacaaagttgagtactcaaataatagctactaacgaatacatccgtaaagcacttcaaatgacatacgattttgtatttctagatgaatttcaggatactacatatgcccagtataatttattaaaaacttgttttttaggttcgtcttgtaaattaacagcagttggagataataagcaagccattatgagatgggcaggtgcaaagcctgatatttttccagactatattcgagactttaattcaaatgaatatcaatttttgatgaatcaccgctctgtacctaaacttgtagaatttcaaaaagaggttcatcagatattaaatagtaatcacagttctattcagacaaataattatccagaatttcaagagggtgaaataacattatttgaatttgaaaatgaaagtttagaagctgagttaattgcaaatgatatagaatcaaaaattcaaggaggtatacgaccatcagaaatttgtatcctagcaaaacagaaggttgatgattatagttcaaaattgataactacattaagcagtaaagggattaaagcaagaattgaaaatgaatatcaagagcttttaaaagaccttacttgtaacctattattagatttaatatcatgcagtcaaggaaaacgagatcctttaatttgggaaaatattagtaatttttatggaaatatcaatggaatagatgagtttactgatgaattaattttagcaaaatcctataaggagattgacaatatagttagtgatattacttacctaatttcaaattttattcccaatgaagaaagtatgctaaatttaattgagtgtattattgaaaaaatagatgaaaaaagaattatttccaacttttcaacatacaatggaaaaagtgacctatatatcattgtcaagaacttttcaaagttattgtacaaagaatattctcaaacacaaggtgaatggctagatatagtatctagtttcaagggtgaaaactcaattccaattatgactatccataagagtaaaggattagaatatgaggcagtctattttctaggcttggaggattctgcattctggaattttaataatcaacctgaagaagataagagtgccttctttgtcgcactttcaagagcaaaaagtgacctaatctttacatactgtagattgagaaataataggtcgcaaaacaaaagaaatattaatgaaatatattcattactgattcaatctagtttagttgatgttgttaattga

SEQ ID NO: 72296 - DNA, 1962 bp, Escherichia coli E128010; identical to SEQ ID NO: 72254

SEQ ID NO: 72297 - DNA, 1866 bp, Escherichia coli E128010; identical to SEQ ID NO: 72255

SEQ ID NO: 72298 - DNA, 1947 bp, Staphylococcus aureus O11
atgatcgaaattgcagatttaacagcgctcattggtgctaatagttctggtaaaacaagtttaatcatggctttattaagattgtttggacaaaaaaatacagatagaactttaataaaaacagactttcatattccagagagcgctgatatatctaaaattaatgaaatagatcttatgatagaagcgaaggtaatatttccagaattaaaattagagtcacctgctaatataaaaactgttccagaattcattaaacatttaattattgaagaaacagatgctgatccttatttacgaattagattaaaggggaagtggatacaaggttcaactcctgaaggtaatatagaacaagaattagtttatgtaaaaattccctatggtcgtgaagaaaaagaagaagatttaactagagtaccaattcatcatcaaaaattaattcaaatgatgtatatacctgcaatgagagatccagcaaagcaattaaaaaatgcttctggtactttattatggcgtatatttgatggtattgactggccagaaaatttaaatgactatataaaatctttaacgtctcctattgaaacgttatttaaagagattcctagcataaaagatattcagggaattttaaataatcaatggaataaatatcataaagataaaagatattctaatagtcaatttaaatttaatggtaatagtttgcaggaatttttgaaaaatgcggaaattttatttaatcctactattgatggaaattccgtaaaagtggatagtttaggtgatggtttaaaatctttattttatataactttagtatcaactctacttgaaatagaaaataaacaagaaaaagatgataaacctttgttaaacatcctagctattgaggaacctgaaaaccatatttcacagcatttgttaggaagaatagttagaaacttaaaagaaatatccaagaaagataatgctcaagttattttatcatcacacaattcatctataattggaaaagtagatccagagtatattagacatttacaaatacagaactcagaatcaattgtaaataatattaccctccctgaaaaaaatgatgatgctcatacctatatcaaagaagctgtaaaagcatatccagatttatatttttcgaaattagtgattttaggtgaaggagatagtgaagaaatagtattacccaaactactgagcgcagacaatatatatttagatgatttcaatatttcagtagttcctttaggaggaagatatgtaaatcatatgtggaagcttttaaatgatttatcaataccacacgttactttattagatttagatagagaacgaggtggaggcgattggggaagaattaagtatgtgttaaaacaacttgatgagaataatagatgttcagaacaacttcgtacagttctattaattccaagtaacacatatcatacttatagtatggaagagatagaagactttcataatagaaaaagtaatagattaaattcacttaatacttggatagaaaaattagaaaaagaagatgttttcttttcatatcctctcgatcttgatttcactatgttaatgagttttcaagaagaatatcagaacactatggaaagagggcctcaaattccaaaagattcaaattcgacagaatatgatgaaaaattaaaaaaatctatacaagcaactttaaaaaatgagaaagctattgcaaagacatattcggaagatgaaaaaaagctgatgatttggtataactctttatttttaggtagagggaaaccaagtacgcatatagcggctctaaaagatattgatgagaatgaaataatagaaaatgctcctaaagaactcttgcgacttatacaacgtgtaaaagaaaaagttgggttagtaggaggaagtaacatagatgaataa

SEQ ID NO: 72299 - DNA, 1926 bp, Staphylococcus aureus O11
atgaataataggatattagaggatgaatggaagccttcagacgatgtaacactagaagattcagccttacatgctataagagcttcaagtcatgtagcgattgccgctggaccaggtgctggtaaaacagaattgttagcacataaagctggataccttatcgaaactggaatgtgtccatatcccaaaaaaatattagctattagctttaaaacggatgctgctagaaatctgcaagaacgtgttgaattgagatacggtaaaggtgtagaaaaaaggtttgaatcgaaaacctttgatgcctttgctaagggaatattggatcaatttatacacgcattacctaaagagtatcagccccaaaaaaattatgagattattttaaacgaaaaatcactaaacgatattataaatgcttatattacagagccttactcttattattctaattggcaatatgaatatcatattaatagtgtgttgagaaccatgaaagaaacaaagttaccaatagttagttttgaagatgatttatactcttggataaacgaaagactgtggatggctttattgaatggtaagggaaatttaaaaagttcactaactttttcaatgatatcaattttagttgagtatttattaaaagaaaatccattactagttaaggcattacaagcgacatatagtcatgtttttttggatgaatttcaagatacaacacacattcaatacaaccttctgaaaacaatttttttgaaatcaaatactgttattactgctgttggagataataaacagcgtattatgggctgggctggagctttacagaatgcatttggaatatttaaaactgattttaatgcaactcagtatacacttttgaataatttcagatctgctcctaatttagtttatatacaaaatatcttttctaaaactcttaatgatgcctccatagaagttctcccagctggagagtggaacaaaaatgaaggggtttgtgaaatatggaattttaaaaatcataatatcgaagcaatcctattagcgtcttatataagtaaatggatgaaagtagaaaatctaaagcctagagatttttgtatcatcgttaaacaacacgaacatatctatgcagctgaaataatgaaggaactttccaaaattaatataaaaagtagaatagaaaaagattatcaagacctattatctgaggaattagttttgcttattattaggtttttaaaattaagttatgaagaaaaatcccctgaattatggctaaatgtcattgatgaaatcatagatatgaagtacagtgatgctgattctgaaagtataaactatttaatcatagaaaaagaattggtaaaaatgttagatgaggttagaaaactctattcaaatattaatgatacaaacttcaatacacaattcgcagaaatattacaagaaattgtagtttttttaggagaagatatcataaaagctacttatccgaaatataaccaagctaattatttcaatgaagtaatgcaaaaaatgatagataaactacaatatcaaaattgtatttcaatgagggggctagtacaagagttttgtggagaatatagtatacctattatgacaattcataaaagcaagggactagaatatcatactgtgttttttattggagttgaagatgatgcgttttggagtttttctactcaaaaagaggcagataaaaatgcattttttgtagcgttatctagagcgaaacaaaaaataatatttactataagtgaaaaaagaaacattttaaagtttggtgaggagaaaaatatattgcaagagactaaaaatatttctgagctgatacaaacattaatggatgcaggtgttcctttaattgaaaagagtggtttggataatatattatag

SEQ ID NO: 72300 - DNA, 1947 bp, Staphylococcus aureus O46
atgatcgaaattgcagatttaacagcgctcattggtgctaatagttctggtaaaacaagtttaatcatggctttattaagattgtttggacaaaaaaatacagatagaactttaataaaaacagactttcatattccagagagcgctgatatatctaaaattaatgaaatagatcttatgatagaagagaaggtaatatttccagaattaaaattagagtcacctgctaatataaaaactgttccagaattcattaaacatttaattattgaagaaacagatgctgatccttatttacgaattagattaaaggggaagtggatacaaggttcaactcctgaaggtaatatagaacaagaattagtttatgtaaaaattccctatggtcgtgaagaaaaagaagaagatttaactagagtaccaattcatcatcaaaaattaattcaaatgatgtatatacctgcaatgagagatccagcaaagcaattaaaaaatgcttctggtactttattatggcgtatatttgatggtattgactggccagaaaatttaaatgactatataaaatctttaacgtctcctattgaaacgttatttaaagagattcctagcataaaagatattcagggaattttaaataatcaatggaataaatatcataaagataaaagatattctaatagtcaatttaaatttaatggtaatagtttgcaggaatttttgaaaaatgcggaaattttatttaatcctactattgatggaaattccgtaaaagtggatagtttaggtgatggtttaaaatctttattttatataactttagtatcaactctacttgaaatagaaaataaacaagaaaaagatgataaacctttgttaaacatcctagctattgaggaacctgaaaaccatatttcacagcatttgttaggaagaatagttagaaacttaaaagaaatatccaagaaagataatgctcaagttattttatcatcacacaattcatctataattggaaaagtagatccagagtatattagacatttacaaatacagaactcagaatcaattgtaaataatattaccctccctgaaaaaaatgatgatgctcatacctatatcaaagaagctgtaaaagcatatccagatttatatttttcgaaattagtgattttaggtgaaggagatagtgaagaaatagtattacccaaactactgagcgcagacaatatatatttagatgatttcaatatttcagtagttcctttaggaggaagatatgtaaatcatatgtggaagcttttaaatgatttatcaataccacacgttactttattagatttagatagagaacgaggtggaggcgattggggaagaattaagtatgtgttaaaacaacttgatgagaataatagatgttcagaacaacttcgtacagttctattaattccaagtaacacatatcatacttatagtatggaagagatagaagactttcataatagaaaaagtaatagattaaattcacttaatacttggatagaaaaattagaaaaagaagatgttttcttttcatatcctctcgatcttgatttcactatgttaatgagttttcaagaagaatatcagaacactatggaaagagggcctcaaattccaaaagattcaaattcgacagaatatgatgaaaaattaaaaaaatctatacaagcaactttaaaaaatgagaaagctattgcaaagacatattcggaagatgaaaaaaagctgatgatttggtataactctttatttttaggtagagggaaaccaagtacgcatatagcggctctaaaagatattgatgagaatgaaataatagaaaatgctcctaaagaactcttgcgacttatacaacgtgtaaaagaaaaagttgggttagtaggaggaagtaacatagatgaataa

SEQ ID NO: 72301 - DNA, 1122 bp, Staphylococcus aureus O46
atgggctgggctggagctttacagaatgcatttggaatatttaaaactgattttaatgcaactcagtatacacttttgaataatttcagatctgctcctaatttagtttatatacaaaatatcttttctaaaactcttaatgatgcctccatagaagttctcccagctggagagtggaacaaaaatgaaggggtttgtgaaatatggaattttaaaaatcataatatcgaagcaatcctattagcgtcttatataagtaaatggatgaaagtagaaaatctaaagcctagagatttttgtatcatcgttaaacaacacgaacatatctatgcagctgaaataatgaaggaactttccaaaattaatataaaaagtagaatagaaaaagattatcaagacctattatctgaggaattagttttgcttattattaggtttttaaaattaagttatgaagaaaaatcccctgaattatggctaaatgtcattgatgaaatcatagatatgaagtacagtgatgctgattctgaaagtataaactatttaatcatagaaaaagaattggtaaaaatgttagatgaggttagaaaactctattcaaatattaatgatacaaacttcaatacacaattcgcagaaatattacaagaaattgtagtttttttaggagaagatatcataaaagctacttatccgaaatataaccaagctaattatttcaatgaagtaatgcaaaaaatgatagataaactacaatatcaaaattgtatttcaatgaggtggctagtacaagagttttgtggagaatatagtatacctattatgacaattcataaaagcaagggactagaatatcatactgtgttttttattggagttgaagatgatgcgttttggagtttttctactcaaaaagaggcagataaaaatgcattttttgtagcgttatctagagcgaaacaaaaaataatatttactataagtgaaaaaagaaacattttaaagtttggtgaggagaaaaatatattgcaagagactaaaaatatttctgagctgatacaaacattaatggatgcaggtgttcctttaattgaaaagagtggtttggataatatattatag

SEQ ID NO: 72302 - DNA, 2190 bp, Staphylococcus pseudintermedius ED99
atgtttatatctactcttcaaattcgaaattttagaaattatgaatccgaaatctttcgattcgataatgagacaaatactattataggtgagaatgattcagggaaaaccaatgctcttactgcattgagaatcttattagatgatagttattactatagtagtaaaacactaaaagaatcagatttttttcatggaattcaaaatgggtggcaagggcattggattattatctctgcgacatttgaaggaatcagcgaagaagaatttgacaatgagatttgtgcttccatttctttaaattctgaaagtcaaacaatcttagaagaattgatttcaaatgcagataaaggtgtaggtagtatttctctatttattagacctaacaaagctattagaaagcaattatttgatatttccactgaattagactctcatcaatttaacgaatttagaaattctattcgtctatccgactatgaattttactacacatctaaatcaaatctaaatttctgtatcaatgaaaattatgataaattggtaggaagactcaatgacaatatagctagtaatcctgaagaagacgatgaagctctgttgggctcaagaattgacatgtcagatattttcaagcatatttcggttgtttatgttgacgctcttcgagatgttcttagagaaatgaaaaacaatcgaaacccagtcaaaagaatcatggaaacaattgaatcaaaaatatcatcagataatgttgagtcattaaaaacaattatacagcaattaaatgagactattaccagtgttcctgaaattaggaaaattggcgaaaatattaatcggcaactaaatagcataattggttcagtgtattctcctaatcttcttctttcctcaactatgtcagatgatatgggttctttagcaaaatttctttcaatgaagccagaacaaaatatcgacttagacttactagggttaggacatctaaatatgatttatttagctttgaaaatagtcgaatttgaagcttgtcgttcaagagaactacttaatattatgttgattgaagaaccagaagctcatattcatcatcatattcaaaaaactctgttcgaaggattaaatcttcaaaaaaactatactcagattctcatgaccacacattctgtacatttagctgaagtgtctgaaatatctcggatgaatgtattaaaatcgtttaatggcaaatctatcgttatgaatccagcaaataatctgaactcatttgctaaagaaaagttaaaaaagaacaatctaaatctaataaacgcagtagagagatatttagatgttaaaagaaatggattgcttttttctaaaggtgttatcttagttgaaggagatgctgaagaaatacttattcctcaaatagtaaaaaaattatttggtataaacttagacgaacttggaataggtttgattaatgttggtagtacttcgtttgaatatatcgctagcttgtttgacgatgatagaatacagagaaagtgtgctattgtaactgatttagatgaacaggcaatcccatcagaacatcgattgtataaaagcactgcacaagagaaaggtcaagcaagaaaagaaaaattatcctccctttttaatgaaaacaattgggttaattgtttttatgctaatacaacatttgaaattgagtttttagatgtgaataaagaaaatattctaacttatgtcagtccaattatagatgacgcattcaaagataaaaaaacaataactgcttataaagaagaaatacaaagtgaacaatatttagaaagaaatttagcgatgttaaaactagccaatcatgttggtaaggggtggtttgcaattgagttaggtgaaaaaattgactttttaatcaaaattcctaagtatattcttaatgctattgcttttgcatgtcaggaaatagtagatctctcaatttataaaaaaattctactccatacaatcgacttgtacgaggaaactacagaattgtcagctttatcagctagtttaaaaacaagtgatacagctgatttgaatatagcaataatttctttattagagtactttggtaaagatgaggatgttgtgtatctaatcaatcagatagaaaattacacaaaaatactttatgctgaggtttcaaaatga

SEQ ID NO: 72303 - DNA, 1794 bp, Staphylococcus pseudintermedius ED99; identical to SEQ ID NO: 71697

SEQ ID NO: 72304 - DNA, 2310 bp, Pseudomonas sp. TJI-51
atgccagaagcggttgtcgccacgccggtagctggaagcatcacccttcgactcctagagctttgtcagttccggcggcttggcaaggtccagctagatatcgataagaaaactactattcttgtcggagccaacaatagcggcaaaacatcggttcttgcagcgctacgccacttcctttcagatggctctcgcttcggcgctttcgatatcagtctgtcgcagtggccgaagttgcgagcgcttggtaaagcttgggaattgctgaaggaaaacccgtcgacagtgattggatccgaagagcaatggatcgagcagcttggagtcattcactcggctatgccgacgttggacctatggttcgatgcggaggctggcatgttccactatgtcgccccgtttctctcaaaattcagctggaaaggaggggccgttggggtacggttgcgtctggagcccgctgcaagcgttgacgagttgaagcagctggcttgggcataccacaccgcgcgactgccggtgaaggatatgggggcggattcgcttgcctggcccattgacctcctcgacttttggttgcgcgagccacaaaggttgggtcaagtccgagcatacaaattagatgcagacaaaaatccactggacgggctcgagacctatgccgctcagactctgccggcagacgccagtccaattgagcgcaaaaatctacagaaattgatacatgttgacttcgtagcagcgcagcggggtcttggaggtgaggaagctgattctcgatctgcttctggcccccatcgtgtcggcatgttctccaatcaacttctcaagtttgctcgacaacacctaaatattgctacaacaggtcatgggcatcgcgcagaccttattaaggcggtcgcggaggcacagcaggaactggacaagaaaattcacgaggcgatcgctccgtcggtggaagaggtcagagaactcggatacccagggctgcacgatccccaagaaattcgcttccgcacgcgcatacagacagctgatttgctcgaccatggtactgcagtccaatacagcatgcagaaggactcactagaagagcttcttcccgagtactccataggccttggataccaaaatctccaatcgctcagctatcaactggtttctttcaaagcggctcgactcaagcctgaaaaaggtgccccggtacccgttcatctagtattggttgaggagcctgaggcgcatcttcatgttcaagtgcagcgtatcttcccagataaggctcacaagctgatcagcccgaacgaaaaagaagcgtcaggacttaaaagccagttaattatcagtactcactccagccatctcgcgcacgcagagagttttgatcgattacgatacgtccgtcgcatagcaaagagcgcagaaaatcccatgccgaccactgaggtggttaatcttgggaaaattttcggtgatgaccaaaagacccgtcaattcgcagagcggtatttccgcgttcagcatactgaccttttgtttgccaatgctgcaatcttcgttgaaggcgttgctgagcgcatgctggtcccgcttttcatcgaacgagattttgaagttctcaacagccgctatctgtcgttcctagacatcggcggtagtcacgctcatcggcttaagcctctcgtggaaaagcttcgcattcccacggtcatcatcaccgacgtcgaccccgttgaggagaaagctgggaagccgacgaaggatggtgagccgaccaccactctagttgcagtggctaatactggccaagccgggctgcaatgcgggaacccgacgctgcgcggttggcatccgaaactgcagcagctcgaagatttcaaaaacccagtagaggtacaacttgtttggagcgaagtctctgaatgtttagtgcgcttcgcctggcaactgcccgtggctgaagcgggcgaccattggcctagcacctttgaagactcacttattctcaagaacattccttggttcaaaggtcttatggatgagaaggtcgacggctatggcaacaaaattaagccgcccaaaggcgcactcggctccgtagctcgacgcgttgccgaccatgaaaatatttcggatttggtcgcatctctacacaaactcatgcacggctcattcaataaaggagacttcgctgcaagcatctttgagatgattgcggcggccgaaccaattgcttgccctaagtacattgcggatgccttagaatggcttcaaaaacaattggatcccaacccggagttggtgccatga

SEQ ID NO: 72305 - DNA, 1947 bp, Pseudomonas sp. TJI-51
atgactgcggttccgacccttggcaacgatcgcgatgccggcgtagttgatgaaatctgtggctaccttacggaagaaccgccgcgcagctatttcctttttgcgggtgccggttccggtaaaactcgtactctggttgaagttcttcggcgacttaccggcgtcatcgaacacgataaaggcaataagttagcacggcgtctgcgaatgtacgggcgctcgattagggtggtgacatataccaagaatgccgtctcggtcatcaacggacgcctcggcgacaacgacttagtctgcgtatcgacgatccactcattttgttgggagctcatcagcggcttcaacgatgatattcgagaagcacttgttgccgttaaagaagctcaacttgcgaaagaaactgccgaggcgcaagccaagccgagaggcattacgccagctaaacagcgagatcttgacgaaatcaaggatgatatcgaggcctttagagcgaccgaagtgttcatctaccatcctgatcgcaacacgtacggccccggcgcacttgcgcacaactatgtcctcgacgcgacagcgtggctgctccgaaataaacttacgctccaaaccattctcaaggaccgccaccccataattcttattgatgagtcgcaggacacaatgaaaggcatgctggacgctttgatggggcttgcagagcaggaagggagcgacttgactcttgggctgctcggtgatcaccggcaacgcatttatgcgcacgggcacgccgatctttcaagtcttgtcccgcaaaactgggcaacgccagagctgcagatgaaccatcgcagccagcgccgaatcgtcactctcattaacagagtttgggaagctgagcttgatggccggacgcagcctataaacggtgtggagcagcatcctagaactgaaaaggccggaggagtggttcggatcttcgtgggggatacttcgcgttctccggagaacaaagtgatcggtgaacgttggtgctcagatcggatgcacggagccactggggacgccgcgtggtatcaaggccagtatcagttgctcgcgctggagcacaagctcgtcgccactcgtggctcatttctcgatgtgtatgaggctatggtcctgctagatcctgacgccgcagcgccttctggcagtggtgataacaaggggccttctgcagtgcaggttctcctaaacgagcttgctcagcttgaagcatgcgtagatattgacggtgccgtaaacgagttaaaggtcacagaggtatttcgtcggtatggacgcctcgacaacctaccggaggaatgtgtctcacgagcgagtcgcgtggaggagatgctgaatgccatcactgcatttgccaccgcctgcggcaattcaaactcaactattgcagaagtgctcgcaccagtcttgagcgcacacttatttgaagtcgatcatcgcctctcggaagcatatgcggacaagtcgccacctcttccggcaccgggccggggggaagaggaatccaaacaggccaggatgcggcgtgggtggtgtgcgctgttcgccgcaccttggagtcaactcagactttaccgaacttacctcgccgggaattcagttcttgcaacgcatcaggtggtgaaaggttctgagtttatgcacgtcatggttgttatggatgatgctcttgctggtggtttccttatttcctacgacaagatttttggtggtgtggagcttagcaagcgggacaaagagaacgcagagcagggcaaagaaacgactatcgaccgcaccttgcggttgttttacgtaacctgcagccgcgctcaggagtcgcttgccctggtgctctggtcgtccgacccagcagcggcacttgatagaatcaaggaaagcaactggtttaccatagacgaggtagagacaataccttag

SEQ ID NO: 72306 - DNA, 2178 bp, Syntrophobotulus glycolicus DSM 8271
atgtatttgagtggtttgcagttaataaattttcgcaatttcgaatcagcttgtttcatatttaacgaaggcccaaacacaattattggcgaaaacgattctggaaaatcaaatgctataactggcttaagatttttattagatgattcctttctttacaatactaagcgcttgaaagaaagtgatttttcatatgcccttaataattggaaaggtcattggataataatttctgctacttttagcaatataacaagtaccgaaaaagaaagtgacatatgcgctagtctaatagtagatgatgaagaaaatatcgcttctatgagttctctgattagcaccgacaatagagatcatggcgttgtcacgttgtttataaggccacaaagaggtattagaaaaaaactctttgatgcttctggagacgaggagatctttaatgagatacgcaattcaataagattagttgactatgaattctgttttacatcgaaatcaaaagcggacttttgtaatgataacatgtataaaagtatcgtaggagatattgattcatttgaagccactaatcctgaagatgatgatacaagtatccttggtcatcgcataactgtagctgatgtacaaaatcatatatcattggtttatattgacgctcttagagatgttcttagagagatgcatataccaagaaacccaatcagaagaataattgaaacgattgaagccggcattgatcccgctcatatcacaacggtaaaagataaaatcaaagaccttaatgatgcaataacgaatataggtgaaatcggcgtaataggtcaggggctaaataaaaagcttttggatattttaggtgtggtatactctccagaaatcagcttatcatctgaattatctgatgaaataaattcactatcaaaatttattgccatgaaaccaaagaacgaagatgatcttgatttattgggtctagggcatcttaacatgatttaccttgcacttaaaattgttgaatttgaaacatgccgttccagagagttactaaatattatggttatagaggagccagaagcgcatattcatgcacatatccaaaaaacgctatttaacaatttgagtgtaacaaataattatactcaagtattgatgacaacacattccgtacatttagctgaggcatctgaaatatccaggatgaacatattgaaaactctcaatcagacatcaattgcaatgcaacccatccgtcaacttgaccaatacggaaaagataatctgaataagaaaagcctatctctgaccaactgtattgaacggtatttggatgcaaaaagaaatgttttgctattttccaaaggtgttttattagttgaaggcgatgcggaggagatattgatacccaacatggctaaagccgcctatggaataagtcttgatgaaatcggggtaggattagttaatgttgggagcactgcctttgaatatgttgcaagtttatttgaccaattaagaatacagcgatattgcgctattctatctgatttggacaagcaagcagttgacccatcaagcacatactataagtcaaatgccgagaaaaaggggcaggaacgtaaagaaaaacttaatcgattatattcaagtaacttatgggttgatatgttttatgctgaccatacattcgaaatagaattcgttaattgcggtgacaattttaagtatgtatctgctgcaataaaaaaaatatatacgcaaaaagctgttattacaagccaccaggaagaaatcaacaatgaaaatagccggaacgaagaaatgcttatgctttcggaaaaagaaggcaagggatggttggctacaatagtatctggtgaattgaattataatattagaattcctgagtatattgtatatgctctagcatttgcttcccaagaaacaatgtcgttgcagatctatgctaaaatgctcaattatactcttgctttatatgatgatgaaaaagctaagcattatttggatttattacgtaattccagagataatgtatctctctcggaagctattaacgaaatacttgaagatacctatcttgaagaagatgtcgttttcgagtttattaagttttgtgaacaatttcagcagcgaataggtcttggtgatgacgatgaatga

SEQ ID NO: 72307 - DNA, 1788 bp, Syntrophobotulus glycolicus DSM 8271
atgacgatgaatgaagaccttgaattgttattagataaattaaacgaacaacaaaaaactattgttatgtcaaacgataatatacttgtcactgcctgccccggcagcgggaaaacaagggttttgacatataaacttgcttatacagctctgtcgaatccgcattccaatagaaaaataatcgcaataacatacacaaatagagccgcagatgagataaaggatcgattagaattattggatattgaccagtcagctatctgggctgggacaattcatcagttttgcttagaatacattatttatccatacgccatgtcattacctaggctatgtaaaggttttacaatcatagatgaatatgtgcatgatcaatatatccagcaaattttagacaagttcagcattaatattccttcatatcagaaaagtaagattataacaatgttaaacaatgatatggaaattattgaaacccaatttccacaggtagttaaaggctatcatgatctattaatacaaaataaagagattgattttgacctaatattaagcctttcctatcagattctcagaaaccacccgatcgcatcagtaaatatcgctggcataataagaagtgtttgtgttgacgaatatcaggatacaaacgaactacaatatcaaattatcgggattctgacaaaaactaataataggattaaggtaatgtttgtcggagatacagatcaagcaatttacacgagcctagggggtattgctaaaagcatcaaagaaatcgaagaaataacagccttgaggtttacaagagaaaccttaaacggatgttatcgttctacgcaaagagtcattgattattattcttattttcaaaaggaatcttataaaattattagtcttgctactcacgcagaattgaaagggattatttatttaaacacatctattcataaagacgatatctatgattgtattgcagaactcatccgacataaaatcgatcaaaacgttcttccagaagagatatgcgtaattgctccgcaatggtttttactctatcccttaagcagaaaattacgagagctcttaccagatatatcatttgatgctccagatatatctcccatcaaagcagacgatatgaatgtcttttataaactggcacgactaatattcacagagccaggaaaaaaggtccctcgccgaaagagaatagctactgagataattaaagttttatcagaagaatataatattttgcttaatgagcatattgactgtttttggatattgcaaaaaatcaatagtatacatccaaatgcaggtaatggcgttgactactacaaacatgttatagaagaacttttttcttcctgtggcatcaatagagaggataactcatcactgtattctctatatgataactttattggcaaaacagaagaaaggataaaaagacattccctttcagatgatctatctgctttttataagatgttcagagaaaaaaccggcgtggtaattactacttgccataaaatcaaaggtgaagaatacaatacggtaattgcttttggaattttttacggaatgatcccccattgggattcgattttcagcccggtaatttcagaagttaacgaagcgaaaaaaatgttatatgttatagcatccagagcgaaagaatcattgtatttatttgctgagcaggggcgaacaacaagtaatggggcggtgtatgcattaacggatattttgaaaacatactcatatgattacgatacttaa

SEQ ID NO: 72308 - DNA, 2142 bp, Pseudopedobacter saltans DSM 12145
atgtatatttctaaagtcagcttggtcaattatagaaattttgcaaatgcaagttttcaatttaacaaaggaataaataccataatcggagaaaacggttctggaaaaacaaatgtctttagggcaataaggctattattagaagatgcctccttgcaatatgcttataaactgaccgatggagattttaataggtctttggacaagggaaaatggagaggtcattggattattatcagtattgaatttgatgagcttaacgatgaagaggcaatacagtcattgttcattcacggtgttggagttgccgcagaagattatgtaaaaaaagctacttacaaccttttctttcgtcctaaagcggacatcagacaaaaactttccgaattagctgaaggagatgctgctggcttacaaaagatactcaatagcatcacaattcaggataattacgaaactttctttactggaaaaagtactgctgattttaatgaccctgatgtatataaggaaattgtaggcgattttgaaaatgtggttttcccatctacaattgatgcttccaaatttggctctaaaattccgcatcaattatctgtttccaaagaaatctctttcacattcatccaagccttaagagatgtagtaagtgactttcataacaatagaactaatcctttacttactctattgaaaaataaaagtggagaaatcaaagaggaagattaccaacctatcagcgatttggttgaacaattaaatgaaagcattgaagatttgcccgatgtacaaaatataaggtcagatataaaatcaaccattcaggatgccgtaggtcttacctattctccatcttcattatccattaaatcaagtgttcccaatgaagccgaaaaattgttacaatcattgaaactttttatcggagaaccaggcgaggaatatgagggcggtattcacgaattaagtttgggaggtgctaatctaatatttttaaccctgaaattacttgagtttaagtatagaaaatcaaaagatacatttgccaacttccttattattgaggaaccggaagcccatatacataaccatattcaaaagaccttatttgacaaattggattatggagatactcaaattatctattctactcattctacacaaatttccgaagtaagtaatgttgataatataaacatccttgcaaagaaattaaattttgcggaagtatatcaaccatcaactggtttaacatctgaaagcatcaatcaaatacagcgttatttggatgctgtaagaaccaacctgttatttgcaaaaggagtaatattagttgagggcgatgcagaagagattttaataccaataatggtcaaaaaagtatttggtgtaagtcttgacgaacttggaattagcctcatcaatatacgaagtacaggctttgagaatgtagcccaacttttccacgatagccgtataagaagaaaatgtgcaattctaacagatttagatgatgcgatttgtgatacaactattaatgacgatgatagcgaccgattaaaaaaatacaagagaaaagttgaggcatctaaacaaaaaggattagaacgtaaggctaaattagatgtctttgaagcagagaatgattggataaaggcattttatgctgactatacttttgaagttgattttataaccgaaggcaacgaggaggaagtaatagctataattgaccaagtatatacagaccaaccaacaagagtacaagctaaaactgatattgaagatgatggtgttgcggtttatggaaagcgagtgcttacaatggctaaacaggaaggtaaaggttggtttgctataatgttaggcaagcatatttcttttaagacggaaattccaaactacatagttgatgccattcttttcgccaaagaaacatactccaacaatattattgccgacatcattgaatataggatgaacaaacatttttatgatgatgatgctttggatttttcatcttgtagggagagcctaacgaagtatagagccgaagaagcaactttagatgaccttgcttttgacttggacttggtaataccagatgaccaactattaacattcatagataaattgaaatag

SEQ ID NO: 72309 - DNA, 1821 bp, Pseudopedobacter saltans DSM 12145
atgttcgtttgggaaaaaggaagtttgaatgatgagcaagaagttgcaatcttggagaaagatagtgtactcttgattgcctgtcctggtagtggaaaaacgagaacgcttacatacaaaatcgcttacgaattaagcaggctaaattccaataaagagttcgttattgcaattacatacacgaataacgctgctgatgaaattaaagaacgggttgaattattgggggttgatactacacaattatggattggtacaattcactcattctgtatggaatggatattaaagccttaccatctgtattctgaaaggttgaaaaacgggtttaaagtttgtaattcctttgatactgaaaagctcctaaccgaattatgcaaaaaatatagcaatccaaaagttactttttatgattttcaatattatgctaccataaatggtacatataagtttacatcaaaaaatagtaatcagaataagcatatcaaagctattcttcaagaatatttcggaatattaaaagagaatagtcaattggattttgagcagatacttttttatgcttatgaattattgaaatcaaagccaatcatttgtaccatcttatgcaaattatttccatttattttgattgatgaatatcaagatactaaagagatacaataccatataatatcaaaaatattaagtgcaaacaacgggtgttcaaaaacattaattgttggcgaccctaaccaatctatttatcattctttaggtggttatccgatgccaaaggatgatttggaaaaacttttggggtttaacttgatacagttgagtttagacaaaaattacaggtcatctgaaaccataataaattacttcgattattataaaacatttgctacccctattatagcattcggaaacgaaaaagattataatagtttaatcacatataacttatcggtttcgttagataatttgatagaagaaattgcaaaattgattttgtttaatgtccgtgaagccggaattagccctaatgaaatttgtattgcagcacctcaatgggttcagattgcaagtattacaaggaaggtaatgattagacttccggattttagttttgacggacccggtatggctccgttttcacgggacattgagaatttttggtttaaagttgcaagaattgttttgacagaaccatcgccctatatgtacgttcgtcgtttacgttggagtaaagaagttttgaacgaacttgatgctgcgggagtagatgtatcaaacttatcaaacaaagagtttttgaaaatctgcaattcaattgaagtgaatgaaaatgatggtttaacctacttacgttctttctttgaaagaatttgtgaaagcctgaaaatacaaattccgaatttcccgttacttgaagaacatcacacatcattttttgcaagttcaaaaaatagaatacaaaggcttattgacgagggaaatccatttattggagagattgaaaattttagaaaagttttcaggcaaagagatggtataaccgtttcaactattcacggcgtaaagggagaggaatatgatacagtaataggttttgctcttcttaatgattatgtcccacacttcaacgatacaaacggttacgaaaattctaaaaaattactttacgttttagcttcaagagcaagaaaaaatttacacttaatctctgaaacgtcaagagggataaattattacaatcctgaagggaaaagccctacacctcatttgctcgaatataattatgaatattcgattgttgctcttgacaattccgattga

SEQ ID NO: 72310 - DNA, 1776 bp, Escherichia coli TW10509
atgtcaattcttataaattctgttaggatttcaggttttagaggtataaaggaaattgaggttgagctaggacgtattgccgttttgttaggtacaaacaatgcggggaaaacatccttcctaaaatcgttgcaactagctttaggtgattaccaacgttactttagtgatgaagatcttcatatagatagttctgggttaaaagttaatgaagttatcgttgacttaaaaataatacctacggatgaacattataataaaacagaagagtttgacgaaaaatggattgatgttttcggtgataatattgcagtagatgcaaatggacatgagtttgtggctattcgtacaaaagttcagccagatgagataaaaggtgggtttaatacacaacgttattatttgaatgaatggggggagtttgagggatggaaagagattgttgtcaacgagagaagaaaggtaagaacaaaagttgatgcaatcccctatatttgtattgaggctcagagggatatacatcatgagcttaaagataaaagctcatatatagggaaggtcttatcatatattaaatatgaagatgaagatgttactgcacttgaagaaatgataagttcaataaatgaaaccgcagtgagtagaagtgagccgcttcaaagcttaaaaaattcacttcaagggttaaaccaatcatttctaggatcaagccacacagaaataactcctttccctaaaaaaatccgagatctatcaaagcaatttacagtacatttcggagatgaagaaaaccattcattttcaatggaatatcatggcactgggacgagaagttgggcttcaatgcttacagttcaatcgtttttaagctttatgcatgaacggcatgagctcgaaaataaggcgctacatccaattgttggagctgaagagccagaagcgcatctacatcccaatgcacaaagaaccttgtttaaacagttatcatcatctcagggacaaattatactgagtactcattcaccatacctgagcgcaatggctgagatagaagatataagatcattcataaagaaaggtgatggagtaacagtaaattgtttgaagaaaagaattgaacatgatgaaaaaaatgcattaaaaagggagataatgttaacccgtggtgagttgcttttctctcgagccttaattttatgtgagggtgttacagaagaacaattaataccatccatgtttgaattgtatttcggtaggacgatgtttagtgttggagttaactgtgtaagtgtcagtggtaaaaattacccaccattcattaaacttgcaagtaatttaggtatccctgtctgtattattagtgataatgatggtgatactcatggtgagataaaccgtcaggtagcacgtttagttcgtgaagatggcctcgtattgaatcctgattgtttctctttagagttcctcaaagaaacaaatgatattgaagctgagttatacaacgagttaaatattcgtgaagaaataattgaatcattagtgttaagtgaaaccaaagctagtcctaatgaacggtatcgagaagccaagaaaagagaaatagaggctttacaagatagtgctataattgaaaaaatgcgtgactcaaaagctagttatgcagggtatttaggagtgattctagcacagaatgcaaatggaaagagaattgaggagttacttccggaatctgttattattgcatttaataaagttaggggatggcttgagctatga

SEQ ID NO: 72311 - DNA, 1899 bp, Escherichia coli TW10509
atgattgataatttatcacaatctcaaattgaagttgttagagctcctatgggaggggctatacaagttcttgcatctgcagggtctggtaaaacaagagtgcttactgagagggttaggttcattcttaataactctgctagaggaagtgtggttgctttaacattcacaaataaagcagcagatgaaatgcttgaaaggttagatgatggctcagaaaatcgtgataggatttggattgctacaattcattctgttgcacaaagggtactcgaaagttatgggtatactattgggttaccaaaagaattacatatatttgaacgtgaccaagatcggatggaggttttcctacattccttaagagaacagggggttaatattgatgagtacttagatgttgaggacgttagagaaaagcgcaatcgtgaaaaagttataagtcaatatcttaatgtattctctattattaaaagagagcttttaactgaagatgaagtaaagataaaattcagctccaatccgcgtatttggaatatttatcaagattatcagtctgctttattggaaagtggtggtgtggattttgatgatatacttttatatgcacataaaatcctattaaatcaagaatcggtagcaagaatatatcaaaaaaaatacgttgctttatttgttgatgaagcacaagacttaaacagagctcagtacgaatttataaaggttctctgcggtgataaaataaaagatgtcatgatggttggtgatagtgaccagatgatctatggttttaatggttcatcatcagattattttattaaatcattcgtgaaagattttactcctaaaacttattgtttaaacgagaactatagatcttcgaaagcagtgattgaattagctaataaattaaaaccaaatagccaagttggtgttaatgctgctcttgatggctataaatcttttaatgctttaccagatgaagaatctgaagctatatgggtttgtgatagcattcaacatatactgaatttaaaaagacatccagaaattgagggcgatattgattgctctaaaattgttgttataggtagaaatagatttgtttttaaagctatggaaagtgagcttaaaaaaagaaatataccttatttcctaaagcgtagtgatagaaatgaatcgcctgtttctcttattgggaaaatagtcgatcttgctataagggttaaggttaatccaaaggattgggttgatgggaagagattgtataaattaatcggtttagaattaaatccagaatcagatgttacctacgatattagcaaagtctatgctgacataaaaaaatcatctaacctagataaagatttaattagcttggttttagcacatattgatcatatgtctgtagacacacctaatattttgaagttctgtttagatattaaatcagaactggtgagtttaggagcaaataccaaagattctgctaaagaagatgatattgccacagggattaaagatatagagcagcttcaatccatgtggacacgattcaaacgtaaaggcctcggtgataatctatcctcatttaggaatgcacttgctttgggtcagcttaatgatgataccttaaataatgggattatgttaagtactgttcatacaatgaaaggacttgaaaaagatatagttttccttatcggtatgtgtgagggggtttttccagattatcgagctaagagcaaagtcgagctagatgaagaaagaaataatgctttcgtagctataacaagatctcggcgttggatttttgttacttatccagaaaaaagaatgatgccttggggggattataaatatcatcctgcatcaagattctttctcgatatgcagtaa

SEQ ID NO: 72312 - DNA, 2091 bp, Anaerococcus hydrogenalis ACS-025-V-Sch4
atgattttaaaaaagatgaaagtcaaaaactttagattattaaaaaattttgagttaaattttaaagatgaattgtcgctagttataggcaaaaataattgtggaaaaacatcatctattattgttttagataaaatgctaaattcatctaaattattttgggaagatataaatttagaatgccagaaagatctctataaaaaaataattggttttgatataacaaagctggatgaagttcaattattagaaactattaatatgcaattattcattgagtataatgataatgattcatatgagaatattcaaaaattcatgatggacttaaatccagataataacataatagttttagaatttatttcggtaatagctgcaaaaaaaattatagaattaaaaaacattattagtgaaaaaaatattgaagattttaaatcattttccaaatttatgagtaagaattttgcaaacttctttgaaacgaaaaaatattcaagagggtttgatgttgaagcaaacaaaacaacgcaagatagatcagaagaaattgataataaagatattcaaaaagtcattaaagtggcaggaataagagctgatcgagcggtttctaatgatgatcgtaatcatgttttatcaggtttaactggtaaatatttcagttcttataaagctgcaaaagatgaaagtgaatcggtatttacaagacttgaagaaaaattggaggaagccgataaagaattatataagatttacaatggagaaaaaagtgaaggtgaagaacccattgatggtatttttagtgatgttatagatgttattaaaacttatggtggtgcagaaaatggaattgatatagcaatagagtcatctatttcagagaaaaatttattgtcagataatacaaacttaagttatagacaagggggagattattcgcttccagaaacatataatggattggggtatttgaatttaattggtattttatttgagattgaaaccaatatacaggaattgtttgaacaaccagcagatataaatctcttatatattgaagaacctgaagcacatacacaccctcagttacagtatatatttataaggaatattaaatctcatatcaaagcacatagaaataagttgttgaaagaaaagaataagcagttgcagattttaatcacttcgcattcatcacatatagtttctgaatgtaactttgatgacattatatatttgaagaaaaacgggaatacggtcatagctaagagctttaattctttaaaagaagagtatgttggagatgaacagaaaggatttaagtttgtaaaacaatatctgacaatgaatagaagtgaacttttctttgcggataaagctatttgtatagaaggagataccgaacgaattttaatgccagtgatgatgcataaaattgataataaagaaaagccaagagcagatattataccactattatcacagaatatttctataatagaagttggagcgcattctcatatatttatgcctttattttcctttttaggaacaaaagttttgtttgttacggatattgactctgttaaagctgaaaagaaaatagataaaaatggaaaagaaagaactgtatatacgagttgtcaccccgatgagggaacacatacaagtaacgcatcaataaaagaattttttaaagatactggaattgatacatcgaataatcaatttaaggaacttgtagggaaaaatgctgaggataaaattaaagataatatgagaatggcctatcaaataccagaatcttatggtgagtatcaagcgagtagttttgaagatgcatttatagcactaaataaagactttatattaaaaaacaaagaaggattttatcaatatggagctttaaaagatttttcgaatgatgaaatagaaaatggtgattattataattttgctttgaataatgtgaaaaagaaatcggcatttgcatcaagcttattgtattttgataatgagaatggcgaagaagatgaaaaatgggcagttccacattatattgaggagggcttattatggatacgctaa

SEQ ID NO: 72313 - DNA, 1905 bp, Anaerococcus hydrogenalis ACS-025-V-Sch4
atggatacgctaacattggaaaaagaagtattagaagctcttcaatgtataaaaaatggtgaaaattttattttagaaggtggagcaggtagtggaaaaacatactccttaatttccttaataaatgcactcacagaggaattaccagatataaagatagtatgcattacatatacaaataatgcagttgccgaaattttatcaagaatagaaaatgagaatatttgggtttcaacaatacatgagtttatatggtctcttatcagaaaatatcagaatgaaataaaaaatattttagttgagcttattaacgatgataatgaaaagaactttaaaaagccaaaagatttttctgaggatttaatttctaaagaatatttcgaaaatctttatgtggattatgatgagtattattctgtaacgccaaatgaagaaaatagagtgaaaatcagccataatcacattttgattgttgcagagaaaatgtttgagaaatataaaaaaatagcggacattttaaaggatattgcagattgtatttttgttgatgaatatcaggatacaagtcctttagttgctgatattttactaaagcatcttgagcaaagcgataagaaaaatgtaattggtttttttggagattcaatgcagtctatatatgacgacggagttggtaatttaaatcaatataatttaactaaaatagtaaagacgcaaaaccgaagaaatccaagagttgtaatcgaagtagccaataagtttagagatgatgatattgagcaaagaccttcagaagatataaatgcacctaatatggaaaatggtactattagagaaggtagtattaaatttttatatggaactgaaataaatgattttataagtgtaaaggggaagaatatttttgaatcttgggatttttctgatggaaaacaaacaaaagagttaaggctaacacataaatataatgctgaaatgactggctttaaagacttatatgatctatataatgctgatttgataactaagcttataagtgggataaagaaaaaaattgataagggaaatttagaatgtaataagactttgggagaaatagcgttagaggtaaaaccgacatataacaaagtggagctgttagatcaaattaacggaaatgaaatttatcagtcaatatatagtgttttagaagatatgtcatgggaagaagcttacgaaaaatgtagaatcactaaggaatcactcatgtcatataaattaaatggaatgagtggtagatatgaagctaattcttatagagataggattttacgcagattagatatattagaggagattattgaattatatgaggctaatagatttaatgattttctgagaataacaaaattttctattcataatagaaatgataagatttgccttaagcaagcaattgattatcttgtaagtgaagataatcaaacgatagaaaatgtattaaaatttgcggaagtaaaagggttactcaaagaagatgaattgtttagtgattatatttcaaataaagggttttatttatgggagagaataaaaaagataacatttaatcaatatagaaaaagcgttttatatttaaaagaattttcaccaatttgtactcaacatagtgttaaaggtagtgaatatgacaatgtattgcttgtattagagtctgattggaataaatatgactttagaacattatttgggaaaggatctccgaactctaatgttcagaaacgtacaaaaaaattattttatgtatgtataacaagagcaaaaaagaatttaataatatatatgcctactgatgattctgacatattagaaaaagctaaagagtattttggagaagaaaatgttatagatctctcttcgatttaa

SEQ ID NO: 72314 - DNA, 2076 bp, Xanthomonas gardneri ATCC 19865
atgcgcatcaagcatgtagagattgaaaattttcggctcttgaggaaggtctcggtcgggctagaggagcgaacgacgctgatcgtcggccgcaacaacagcggcaagacctcaatagccgagctgttccgtcgtctgctttccgagcgaactctgacgttcaggttggaggatttctccctcggctgccacgaatgcttttggatggcattcgaggcgttccgcgccggcgcggttgctcccgatgtgctcggacatcttccatcaatcacaatcactcttgacatttcctatgatgtcgactcacccgatctagggccgctcagcgattgcattatcgatctgaatccagactgtgcggaggcgcggctggttctcacttttggaccgcgaacgattgcggccgacgcgctgttcgccgggatcgtcacggcaggcgaagatttggccgctgaccgtagcgctctgtttcgcgcgctcggcagcaggttgccggcagcctatgcgtcgtcacttgaggcggtcgaccccaacgatccaacaaatcgtaaggctctggaaccgaagacgcttacagcactggtccacgggggattcatcaatgcacaacggggactggacgatgacaccaaccgcgagcgcgatgtgcttggcaaagtcgtcgaagttctctttcagtcggcattgactgatccgcttgacccggaaaagcgcaccactgccgaacagttaaagacggcggtggagcaaatccagggtgacctgcatgccggcttcaatgcgaagctgacttccctgctgcccacgttcgatctattcggctatccggggctagccgaccccggcctggttaccgaaactagcttcgatgtagataagctgctcaacgaccacaccaaggttcgctatttaggcgtgaatggcgtcacattgccggagacttacaacggcctcggggtgcgcaacctcgtttatatgctcctacagctgctgcgcttttttcgcgagtatcaggcaaaaccgtcggctgccggagttcacctggttttcattgaggagccggaggcccacctgcacccccaaatgcaagaggtcttcatccgccagctcgaccagatcacaagcgcgttcgtggcacagctcaacgagaaccgcccctggccggtgcagttcgttgtgaccacccattcaccacacatggcgaacgaagcgcgtttcgaatctatgcgctatttcttgtcagttccagacggcgaaggcctgcgccggtcggtcattaaagacctgcggcttggaatgggcgatgcgcctgtgcccgatcgggagttcttgcaccagtatctgaccctgactcggtgcgatctgttcttcgccgacaaggccgtcctcatcgagggtacctctgagcggctcctgcttccggccatgattcgcaagactgacgccgcggctgccggtgaaccacagctggcgagccagtatctaacagtgatggaggtcggaggcgcttatgcgcaccggtttttcgatcttctgaccttcctcgaactgcgcacactgatcatcaccgacatcgacgccgtgatatccaacgagaacgggaagcgcgtggccgtgcccgtcgcggagggcgaatttacgagcaacggctgcatcaaggcttggttcgagaatgatgtttcgccagccgcattgttggcaaagacggcagttcagaagatggtcggccttcgccggctcgcctaccagatccccgaggcagacggcgggccgtgcgcgcgtagctttgaagatgcattcattcttgcaaaccccgaccgctttccacttggtgacggggatgccgccaaactcgcctatgagcacgccgctgagcagaaaaagtcgacgttcgcactggagcatgcaatcgagcaaacggactggaacgtgccccgctacatttcggagggcttgcgctggttggcccacggcaaccttgtcgccctggagccaccacccgctgtcgctatcgagatcgttgcggaagtggccggtgtcgccgtgaatgtcgcagaggctggcgagcatggctga

SEQ ID NO: 72315 - DNA, 1776 bp, Xanthomonas gardneri ATCC 19865
atgtcgcagaggctggcgagcatggctgatggcgccgaaagtcccgccgacgctgccggtcgcgtcgcgcttgaacggatgttcgcatgcctcgacgaagcgaggagctttcgtttggaggcgggcgccggtgcgggcaaaacctattcgctcgacaaggcgcttcgccgattgattgaccatcgcggctcggagcttcttcgccagcgccagcagattggctgcatcacatacacgaacgtcgccaaggacgagatactttcgcgtatcggggcgcatccggcggtgcgatcagagaccgtccatggtttttgctggtcgatcctgcaggattttcagacgactctccgtgcccttgtgcccggattgcccgggtgggcggagaggttggagccaactggtggtatcggcgctcgacgggtgcactatgagcttggcgttccccgcgtggtggatgagcaagtcaccatccgccacgaggatgtgttggcgctgatgattcaggtgatggcatttcccaagttccgggcggtgctgacggcacgttatccggtgctgctgatcgacgagtaccaggacacggacgcagcgtttgttgacgcacttaaggcctggttcctcgatcacggcgaagggccactgattgggctgttcggtgatcattggcagaaaatctacggagacggatgcggctcggttgagcatgacgcgcttgaggtaatcgacaagaacgccaacttccgttcggtggccccgatcgtgcagatgctaaatcgtatgcgccccgatctgccgcagatggtgagcgaccctgacgcgccaggcgaagcgcgcgtcttccacaccaatgactggcccggagtcagacgcaccggacagggcggtggccactggacaggtgacaccagtgccgacgcggccagagcctatttcggtcacatcaaaagacggctcggcggcgagggctgggatttctcagtcgggaagaccaagatactgatgctcagccatagcgtgctggctcgcgaacagggatacgcgagcattccgccgatttatggtcagttcaatgagccctggctgaagaaggatgatccgcatatcaagtttctgacggaccagctcgaaccggcatgtgcggcgttcgaagcgcggcgttacggcgagatgttcgagagcttcggcgcgggcatgccgcgcattcgcaagcatgtggacaaggtcgcatggactgacaccatggagacgttgatcgcgctacgactttctggatcgattggtgaggtgatcgactttcttgctgcgcagccacacatgcggcttcccgaggcagtggaagaacgcgaaagaaggctggcggaaatagggcctgaacctgtggagggagagtcacggcgtgtcacccaactgcgcaagctgcgggctgtctcttactccgaggtcatagcgctagaccaattcattgatggccatacgccgtttgcaacgaaacatggtgtgaagggtgccgagtttgagaatgtgctcgtggtcgtcggcagaggctggaacaagtacgattttgcccagatgctcgcatggagcgaggccggcccaccggccgacaagttggagttctacgaaaacaatcgaaatctcttctacgtggcttgctctcggccgaaggttcgcctagcgctgctcttcacacagcttcttagcccagatgccatgagcaggctggcgacctggttcggtgccgaaaacgtcatagcgctgcccgcgcaacctgattag

SEQ ID NO: 72316 - DNA, 1800 bp, Paenibacillus vortex V453
atgcatatatccaatattaaaatcaagggatttagaaactttaatgaagcaaatgtaaatttaaaacaaaagtcgcttataattggctcaaatgacattggaaaatcaaacttaatttatgcccttagactactacttgataaaaaaatatctgactcagatttagaactaaaggattcggattttcacgtatatgatgaaagtaataatgagatttttatacaaatcaaattcgagagtgttgtggaggattgtgtaatagggaaagtgggtaaatatgttaattcagaaggcgagctttttcttgcttatgaggtaaagaggggggagtctggagaaaaaagctatcaattttacattggtcagcgggaagatgatctacaacctatagaatctcgttattacttaaaagttttgaatatggattatattgaaagcagtagagaacttaattcatatatcagaaaagagaagaaaaatttgcttttagaatctaggaagcaacgaactaaacaaatagtacaatctgatgataaaataactaaaaagattgaaaagtcaataaatatcttgaataacagaataacgaaattatcatacataaatagtgctacaagtagtttaaatgatgaattattgagtctatcatttcatcatattgctagtacgattgattttgatacaggtggtatagatgttgaagattttataaatagtgttaatcttgtttccaaggtcaatgggaaaagtttgtctgttggaggagacggacgtaacaatcaaatttatcttgcactaagaactgcaaaaaacagaattttggacgatactccattagaagtgactatttgttgtattgaggagccagaagcccatttgcatccacatcaacagagaagattatcaaaatatctagttgaatcactcagaagccaagtattgataacatcacattcaccacaaatagcaagtgaattttctcctgattcaataattaggctctacaacgaagctgattcttcaactcaagcggctaatgatggatgtagcactggactggaaaaatcaattattgaatttggttatagattaaatattgttcccgcagaagcattcttttctaatgttgttttacttgttgaagggccttcagaagtattgttttataaagcattagccgcagacattggcattgatcttgataaatataatatctcaattttgatggttgatggtgtagggttcgagccttttgttaatgttttaaatagtctaaatattagttgggtagtcagaactgataatgatattataaaagttccacacaaggactactattactattcagggatatcgcgttgtttaaagattgtggagaatcattgtagttatgaagatacagaccccataactcaattaataagtaccaaaaagaatttgctgggaaatgttaattcaagagaaaatttaactaaatctgaaatagaactaggtcaagagtttatagttgctttaggggatgtagatttgtatttatctaacattgatttggagaacgatattttaaactcacccttgcgtgaagtggttgaaaattattatggagaaaaagattatgaaagtttgctaatgaaaatgcagaaaagcaaagcaacatttatgtacgattttttatataaaaatcaagggggattaaaagttttattggagaacgatttatcgcttcctttaattaggtgcaaagaaattgtggaggagatgtttaatgaatccgacaccagaacaaaaggagattattga

SEQ ID NO: 72317 - DNA, 1632 bp, Paenibacillus vortex V453
atgaatccgacaccagaacaaaaggagattattgactatactggacatatcgtagttattgctaatccgggaagtggaaaaactttcacaatatcacagaaaattattagtatattaggcgaattagaattttatcaaggtgttatagctatctcatatacaaataaagcaagtagagagcttgagaaaaggtgtttggggaatggagccgataggaaaagctcgttctttggcacaatggataaattctatatcacagaaattgttttttcttttgggagacacatttttggtactcctaaaaaagaacttgaaatcattgacgtgaagaatgaatttttcaaggcatttacgggatttgaggatttagaatctgagaatgcagaaaaggatattgatgcatggataaataacaattttgcatcactagttaagttatatgtagaaggttatgtactgcttgaatcaatatccaaacttgctctgtatataattgacaattgcatctcctgtagaaaatatttaaaggcaaggtataagtatgtatttattgatgaatatcaagactctggttctgaccaacatgatgtctttattaagttaaaagatttaggcataatttctgtagcggttggggatacaaatcaatcaatatttggattctccaaaaaatcatcagagtttctagtaagactagcccagaatgctgactttaaactatttcatttaacaaagaatagaaggtgtcacccttcgattattaactatgcgagcaaattaatatcaaaggggttcacggactatatttcctcaaatgaaactcgtatattttctaaatccatcaatgggggagaaaaagaaaccgctgagtggctaaatgctgtgattcctaaggttattacacatttcggagtcgaatcgagaaatgagatcggaatacttgtgagaaatagtagaacagggaaaatgctacaaaaaaatctaacgctagaaaacaagttttttggtagtactccgtttgatgggaataggagtctttggggaagtatttttgaaagtattcttaattttatatatgatgattctttaacgaagtatgagttagtcggaaattatttagacattgagttacaggcaggaaaagctagagaatttatgcgtttactgagtgcggtcgaatgttataaagataatatattggaaatgcagaaaagtagtcctatattcattaaaattgcaagaattatataccctcaagctgaaaatataactgctgtaacgacattgaatattgttcttaacagccctgaattacttgagttttttaagcctgcagataagaatcagattcaaattatgtctctccataaatcaaaaggccttgagtttgaagtggtattccaccttgatcttcatagatatgttttacccaaagaatttaatggggaatatcccgaagcaattcaagatttgaatttgcactacgttggcattacaagagcgaaaaagtgttgtgttctatgtacaagcacggtaagagtaaatggaaaaggtgaaaccaaaacaggcgacccttcaatatttttgcaattgaacagattgtatcctttgagaagcccattcatgtattaa

SEQ ID NO: 72318 - DNA, 1686 bp, Burkholderia pseudomallei 1106b
atgacgcacgacaaaggtcgcggcagccgagagatactgtccagtttgatcaaggtcgatttcctgcatgcacagcggcatctgtcggactctggtggcggagctcgatccgaagatttgtcgcggtgcttgagtcgcttctatgaaagaaacctcgagaaacacgaggaagactatgacgcccaacgcgcactctatcagtcggaggcactgctcaacgaccatctcgaacgtgttttcggcccgacactcgagcggctctcgcatctcggctatccaggcctcaacaatcccaagctgttgatcaagaccgcactgaatcctgcaactattttgagcagccatgatggtgctcgggtgcattacgccgttggaccagaagtaggcatagacacgcagacgacactgccggatcgctacaacggcctggggttcaagaaccttatctatatggtggtagagcttctagacgcgcatgccagatggctagatatagaagagaaccgtccgcctttgcatctgatcttcatcgaagaacccgaagcacatctgcacgctcagttgcagcaggtattcattcggaaggttctggacattctcgatattcccgatgaagatgcaccgcactgcaccactcagattgttgtttcgacacattccccgcacgtgctcttcgagcgcggcttccaaccgattcgctatttccgccgcgttcgcgaggccggagttcagcgatcggaagttctcagtatggcttcgttctatgaaacagctaacgacccgaacgatcctactgaccgtacccgggatttcctcgagcgctatctaagactcacgcattgcgatctatttttcgccgatgctgccattctggtagaaggtaacgttgaacgcttgctgatgccgcagatgattgcgaaggttgcgcccggccttctgtccacctacgtgagcattctagaagtcggaggagcattcggccatcgattcaaaggtcttatcgagttcctggggctcactaccctgatcgtcaccgacatcgatagtgttatggcgcctgcggcagccgatccagtagcccccgacgatgaggatgatcccgatgccgatcccgaccttgaagaagcagccgaagatcgagccgcagttcgaggcggacgcaaagcatgcatggccaatgagcccggagcattgacgtcaaatcaaacgctaatccaatggcttcccgggcgcagcaccatcgccgatttgctcaacgcgactgtcgaacagcgcattcaagtccgcactgttgctagcgatgcgttgatccgcgtctcatatcagacatcggttaacgcaagttggcgtgggacgacagctgccatggtcggtcgaacattggaggaagccttcgcgctcgagaatctggcctggtgtcaggatgcggcacgcgccgaaatccgcctgcgcgttcgaggctgcaacaaattgtcccttgaacagatcgcacaaagtctgcatcgcaaaatcaagagcgcgaatttccgcaagaccgactttgcattggcgcttctctcacaggacccatccgcgtggacggtgccagcctacatctctgaaggtcttctctggctcgagcatgaggtggttccccatcctcccgaaatcgcggctcctccgatcaacgcaggagcagtagcatga

SEQ ID NO: 72319 - DNA, 1896 bp, Burkholderia pseudomallei 1106b; identical to SEQ ID NO: 71759

SEQ ID NO: 72320 - DNA, 1701 bp, Escherichia coli WV_060327
atgagaattgaaactgtttatattaaaggattcaggaattactgtgatgctgttattaattttaatgaaactaatttgattataggtgcaaatgatgttggaaagaccaacctattatatgccattcgattattacttgataaaagtttatctgaattagatctagaaccaaaaagcaatgactttcatgtaaattcgacaggtgaacaggttgaaaatatagaaatcactatcaagtttacagatgttagtgaagatgctgtaatatctaaattaggagggtatgttagcgatgaaggggaaacatacattaagtatcttgcttcatcattaactatggattacaagatattacttagtcatgaacataacaattttgatgaggttcctaatagattttacttaaagtgtttaagtctaaggtatataaattcgcaaagagatcttgaaaaatacattaaaattgaaaagaagcatcttttaagattggcgcaagaagttcgtagtgaaaaggatactgaaaatgatggggcggtttttactgaattaaataagctacttactgaagtaaatgaaaaagttaaaggaataagttatgttgcatcagcaacagaagagcttaacgaggaacttagaaagttatcctatactcatgatagattaactgttcaacttgatactggtgcaatagggattgaccagtttatagagaaattagaattaagtgcgaatacaaatgggaagaaactaatgcttggtggcgatgggtttaataaccaaatccttcttgcgttatggaaagcaaaaagtgttcgcgagcatgatgttgaaagtgaagtagtgatctattgtatagaggaaccggaagcacatctatttcctcaccagcaaagaaaattggcggcctatttaatcgataaacttcctggccaagcaatcgttacaagccactcaccccaaattgcagtgaattttaaacctgattcaatcataaaactatactatgatgatggagagactctagccgcaagtaatggatgttctgattgtattagctctgcatgggatggaatgggctaccggatgagtattattcctgctgaggcattttttgctaacgtggtttttttggtcgagggaccatctgaggtgattttttacactgaattagcaaaagcattaagtattgatcttgattattataacatcagcattctttctgttgatggtatccaatttgaagtttatagaaaaatattaacagctctaaatattaattggatcgtaagaacagacaatgatgcttcaaaagtacctcataagaatgaatggcaatatgctggtgtaaatagggcgttagcactgtgtggagagaataaagaaccaaactcaagtattcctatagatagtaaagctttgcatactaagtggggaaccatttcaccaataataaatcctaacggcgtttatatatctttttttgatcttgaaggagatcttgctaatgacttttcgaagcatgttcttgattatgcaagtaaggataatctagatgatgccgctgattatttgagaggaaaaaaagctatacgtatgcgtgagttaattaaagagaaaaaagcttttttaactgaactgaagagcaaagatatagccagacctctaatacatgcactgaaaattgctagaggtgaattatga

SEQ ID NO: 72321 - DNA, 1623 bp, Escherichia coli WV_060327
atgaagctaactaaggaacagttagatgcaattgattacgaaggtaatctggttataactgcatgcccaggaagtggtaaaacaacaatactcgtccataagattgctgcctgtttatcccattccaaggattatcagggagttgttgcgttatcatatacgaataaatccagcgaggagctaaaagccagatgtagaaaattgggagcagagttaaattctagcttctttggtactattgataagtttttcattaacgaaataatattaccttttgtaaggcaagtatggggcagaaacgaaagcgctctcgaagtagtaaagtatatagatctttctcaagaattaaaagataagacaaataagtactttgaccgagtggatttttattctaatacttcatttgagggcatgggttctctgagggatatttatttaaaggggatgttgattttagacttccttcctcacttggctttttatatagttagaacatcatattcttgtcagcggtatttaatggcaaagtatattggtttttttgtcgatgagtatcaggataccggttattttactcatcaggttttcaagttcataccaacgctagggatgcctcttattatcgttggtgatttggatcaatcaatttatttgtattctcaccgcagttcggattcactaaaagatttcatgaatgatagtggtttctgtcataaggaaattacagtaaatcacagatgtcacccatctatagtaaattacgccaatagaattaaagattttgaatgtcaactagctccgtgtgatgagatttttgtttatagaaaatgtgttgatggcaatcaaattgatatagctaaatggattggtgaaattcttgataatgtaaaaaataaattttcaatatctgataataaggagattgctatattggtaagaagcaatgcttgcgcggagctagtttctgataatttagttgtttctaatagggcttatttggataatgatttaacaaaggctggtggtaaggtttctggtcttgttaatgatttattatgttacaggtataacttaaataaaactgctcaatctattttggagggggttttgggaagcagtgtcaaaaggagcgaggctactcgtatccgtaaggctattaagcaggttagaagtgttacagatgcctttcttattgacgtaataaataaaattgtagtaactcttttagggactgaaatcgagcagcatcataagtccgctctttcagagatattagttactccgaggatgcaaaataattatttggatgttagaagtgatgaagtacaaataatgacgttacataagtctaaaggtcttgagtttgactttgtttttcatttggatctgtatgattggattttgcctaaaagagttttcatagaaggaagctatgatgttgtattcgaaaatgaacagcaatgcataaatcttcattacgtaggaattacacgagcaagaaaaggcattatgctaatgcattctacgaaacggtataatggttcaggtgatcttaagaacggggctccatctcaatttcttttgaaacctgggttagatggcctttataaaaaaataaattaa

SEQ ID NO: 72322 - DNA, 1833 bp, Burkholderia gladioli BSR3
atgcgtgtttcaagattgcagatagagaactttcgcggcatcaagaaagcggaacttcacttctcaggacatacgctcttgatcggtggcaacaacgtcggcaagagcacgatctgcgaagcactcgatctcgtgcttgggccggatcgactgaatcgaacaccccccgttgaggaattcgatttccgcaatgccggctatctgaacgaagacggcgaaacacccgctccaattcgcatcgaagtcgtcctcgtcgatctcaccgacgacatcaagaagctctgcgccgccaacctagagttttggcacaaggccgacaagcgggttctcggcgaaggcgagattggcaacgctgacgatcccaacgtggaactctgccttcgcctgattaccgtcgcccaatacgacatcgaagaagaccagtttttcgccaagacgatctatggccgaagcgatgatgatgacgacgctgatcccaggtcaattcccaccaaggtcaaacgagcgataggctttctttacctgcgtaccatccgtaccggctcgcgtgcgttgagcctggagcgcggcacgctgctcgacaacatcctgcgcatgaaagaagcccgcaagggaatgtgggagagcattcgccaacgcttggctgcccttgatccgcccatagacaccgacgctactgagctggggccgatccttgatgaaatcgaaacacggctggcggaatacatcgcgcccggtagcgacgggcgctcgacccgtctattcgtctcccagctcacgcgcgagcacctgcggaagaccatcgctttctttctgacgatggggcgtggggaggaagccgtcccgttccaacaggccggcagcggaacattgaacacgctcctgctggcgctgctgaccttcatcgccgacctcaagaaagacaacgtcatctttgcgatggaagaacccgagattgcccttccaccccatacacagcgacgaattgcgaactacctcctcgaagaaacttcgcagtgcttcgttacatcgcactctccctacgtgatcgaacgtttcgagcctgacgggatactgaagctcaaccgcgacgaacacggcacgctaagcggcacggcgatcaagctgccggccggtatgaaggcgaagaactaccgacaaaactttcgtcgagccatcgccgaagccatgcttggccaaggcgtgatcgtcggtgaaggcatcaccgaacaggatgccttgttggtggtcgcgcagaagatggaagacagcaacccggccctgttccccttggacgtggccggtctatctgtcatcaatgccgatggcgacggaaacctggagaaattgggggctttctttaaggaaatcggaacgccagcctttgccttctttgatcgcaagaagcgcacggacgcggaaatcgccaccttgcagggtagctacgtggtagccaaggaaatccagcaaaaaggcgccgaagtgttgatggccgaggaaactcctttggaacggcaatggcagtatttggaggccctgcgcgcagaagacgccgatggccggtttgggattccagtaggccgcccagctgacgacgaattacgcaagctgaccacttccacgttgaagggcctgaaaggcgaaggcggtgcggcaaagctgctgcaactgtgcgctgtggccgagctgccaaaaaccattaccgacttcctcgctgacatctatcaacgctacccaaagccgaagcgcaaggaagcacctgccgcgcaggtcgatgccggggcagcagcggcaggtgacaacgccgcagccggtgccccagagggactgtaa

SEQ ID NO: 72323 - DNA, 1734 bp, Burkholderia gladioli BSR3
gtggccctggtcatctgcgcgcagcgacagagcattctcgacgagaacggcgcgatcctcgttacgggaggcccaggcagcggcaagacgaccatcgctttggctaaggccagactcgtcatcgaacggggcctctcacctggtcaatctgttctgtttctcagcttctcgcgtgctgctgtagcgcgcgtcgccgaagcgagcaagacgcagttgcctaccgccctgcaaggaaagctctcaatccagactttccactcgctcttctggcgcatcttgcaggcttatggatacctgctgggcgcaccgagatcgctgcgtctgctgatgcctcacgatgaggcagccatgcggcacgagttcgagagcaatggcggtgactggaacgtcgagcgcgaacggctatttcgggaaacagggagagtcgcatttgacctgttcgctccgaaggctcacgaattactgtctcgaagcgcacgcttgcgcgagttgttttcgtcgtgttatccgttgatcgttgtagatgaggcgcaggacaccgcggaagatcaatggcagtgtgttcgactgctatccgctggcacacaaatgatgtgcctcgctgacctagatcagcaaatctacgacttccgaccgggtgtcagctcggaccgggtgacgcacatcatggccgccttacaaccgctgcgcgtggatctggctggcgagaatcaccgaagtcctaattcggaaatcgtcgccttcgccaacgacatgctattgaacacaccaagaggtgcggcgtaccgaggtgtatcacggatgaactatcgcgctaaccgagagtaccgtgaccgggcgatccgccaagcaatcggcattgccattcaacgtgcaaaggaagccgcccaaggcgacatcgagagtctggccgtacttgcaacatggggtcgcggtgtcaacgtcatctcccgtgccctgactggcgacggcacgaatttgatcccgcaccgagtgatgatcgacgaagcatcagtgctgctttcgagtcgcatggtggcgtttatgctggaaccgcgcaggcccgtagcagaggaacttctggacttggccgatggactcgaccttgctgcgatggttttccgggcacgcggcggaaataccaatctagccaccgcacagcggttggcagcaagtgccgtacaaagccgcggcggcacttccccacgcgctaacggagtggcatccaagctcctagccgcagtgcgtttattgcgcacccacgaattcactggcgacccgaagcgggattggctagatgcgcgcagcatccttcgcaatgctggtgccaacccgtttcaagctatagcagaggatgccgaacagcttgtcgcgttccagcgtggccgccgtatctcagcagcactaaccgaactctggcaaacgcagggagcatatctaaatgcgcggggcgcactcgacgctgccatagctgaagatcagctcttgtcgggtggcaatgacttgaggggcatccacgtcatgaccattcacaagtcgaaaggcaaggagttcgacgcagcaatcatcttcgatgacccgaacagcagtcctctgcttttcactcaagaggttgcgcctcaccctcgttgtcgcaaactggtgcgagttggtatcacccgtgccagacatcatgtgctgatgctttgcgatatgttcactccaaccgccttactgcaagggcatcaactctag

SEQ ID NO: 72324 - DNA, 1788 bp, Burkholderia gladioli BSR3
atgcacctgtccagattggtcatcaagaatttccgcaagctgaagtacgcggagctgacattccaagccggcctgaacgtcctaataggcggcaacaacgtcggtaagacggcagtgatcgatgccttgcgtgcactgctggcggggcacgacgaaccctatccacgcctcggcgaagaagatgtgcatcgccccagcgatggcacgccgtccggagacatcgtattcgagtacgtgttcagcgggctcagccttgacgacgaagccgacttcttggctgcgctggtgcctggcgcagccggcggtctcgacgcccatattaaaatccgctactcggaagccgacaaagcgggccgcctgcgcgccaagcggtggtgcggcgagcacgaagatgtgggcctgacggcggacatgatggaaaacctgcggggcgtgtacctgccaccgctgcgcgatgcctcgcaaggcctgaagccgagtcggaccagccagttagcgcggctgctacaactgttggcagacgatgccggtatcgatggcatcaacaaggcgcttcaggaactcgatggcacactgaaggcgcaccttcccatcgtcaacacgcatgaggccatcaacagccggcacaagacgatgctaggcccgcagcttgctcagatgctggaggtcggcctgagcgcaagcgactttaagagcctgaagtcccggctatcgctactggtggataccttcgagattgagcagaacgggcttggcttcaacaacctgatctacatggcagtcgtgctcagtgaactggctaagaaccctgattcttgttatcgaggcctgatcgtcgaagagcccgaggcgcatctacacccccaactccaggctgtgctgctgcagtacctgcagtcgatccaagccgtcgagggtgagaagcccgtccagctctttgtgaccagccattcgccgaattttgcgagcatcgccgacttggacagccttgtgtgcctggtggacacagggaccgctgtcgagacgttcctcccgcgtaccatcgtcttcgagaaggggaagcgcgaaaagctggagcgctacctcgacgtcacgcgcgccgaactattcttcgcccgccgcgtgatcttcgtagagggggcggcggagctcatgatggtcaacgcgttggcaaagcggattggctgcaacctgcgtcagcacggcgtaagcgtcatcagcgtcgaaggtttgaacttcgactcgttccttcccctcttcggggacaaggcgctgaagattccggtggcggtcctgaccgacgccgacccagtgccccccgagagcgagccaccagtctctgctgagacgacggacgacgaggatgatgaccacgagccggtttatccggcgcccggcgacgtgattaccgtgtcggccaataccgcaaagatgaaggcccgggaggacgctcacgtcaaggtgttccacgggctcaagacgttcgagtacgacctggcgctggagtcggacaaccgccccgccatgctcaaggcgctgggcgagctgcacccgaagatcgccaagtcgctaactgccaaaatcaatgctgaggctaccgaggcagccaaggccaaagcactgttctgcggcatgttcgaacgctcgaagaacaacgtccagaaaggtagcttcgcccaatctctggcgcaggtcattgcggaggaaaaagtggcgttcaccgtgccaagctacatacaggccgccatcctgcatgcttgcagcagtgcggagacgccggagccatga

SEQ ID NO: 72325 - DNA, 1827 bp, Burkholderia gladioli BSR3
atgagcgacctgacaccagagcagaaggcggtcgtcgacgcgccgatggtgccgctgtgcgtcatggcctgcgcgggcagcggcaagaccaagactgccgtgcaccgcctcgtgcgcgtgcgctgcaatctcggagaagcgcgcggccgcgtggcgttgctctcgttctccaacgtggccgtcgataccttccgcaaagcctatgacgaccttgcgagcgacctgccgtccagcgctggccgatcgagggtcgacatcgacacactagacggattcataaccaccaacatcatccgccctcacggccatcggattatgaagtccgcccgggcggctttcctcgttacaggcggcgagtccttcctagaaggcttcaggttccctacctcgtcctttcctcagccgatcaccgctctgcaggtgggcttcgaaaagggtgtcgaggtgttcttccacgtctacaacgaccagatcgagcaggtggacaagtccacagcgtgcaaccttattgccaagcttgctcgcactggggcctacacgcatgacctgggacgttattgggcataccgaacgctaaaggagcaccccgagctcctcgccgcaatagcccgccgttacccccacatcctgatcgacgaggcgcaggacatcggaacgatgcacgaggccatcctcgagctgctcatcggcgctggctcgcgcgtcacgctgatcggcgaccccaaccaaggcatctacgatttcgcaggcgcaaatggtaagttcctaaccgaataccaccaacgcgatggcgtcaagccgctctaccttcaccggaactttcggtcggctcccagcatagtggatcttgccaacagtctatgtggccgtagcgacgtcgcggagcgggcggtgcccatgaagccgcatggcgcctttttcacgggctacaagcggagccagcagcaagaactcattactgcgtttcagggtgcgctccccgccgctggtgcggacatcacgcgctcagccgtcctctgcaggggtagaggtcttgccgatacccttcgtggagaggaagcgccggccggccaaggccaggtcaaggctttcgcggctgctgcggtgctgcgcgaccggcgaaaagactttctgaaggcgtttaagcgcgtggccgttgctgtggtcgcgttgctggacagcccgccaaataacctagtgagccgaatcacgcagacctccactgatccggtcgacctggaactccgcaagacaatctgggcgtttacgcgtgacgctgccaccggcctcccctcctcctcgttggtcgccgacacgcagtggcactccttgctgctggcccgggtcaagatcttgatggtcagcctggagtcaaagttcgggttcaagcagaccgataacatcggccgcaaactgtctaaaaaggcgttgccgaacgcgccgctggcaagtgccgacgacctggccgacagcgacgtgacgacgctgcgcgtcgacacggttcacaaggctaaaggggaaagcctcgacgcagtgctgtacatcacccttaaagagcacgcgcacgcgctgctgggcggtgtcgccacggaggtggggcgcattggctacgtcgcggcgacacgggcccgagatctgctatgggtggctgtgccggacagtgcgctgaaggaacttgggccaaagctgctggctaaggggttcaaagaagtgggggttgccacgccgccggtcactggggctaaagccgaggtcagtacggacgttgcgatcgcgtccgtagccgccacaacgcccatcactccgagcacctctgaaacaccatga

SEQ ID NO: 72326 - DNA, 2199 bp, Pseudomonas brassicacearum subsp. brassicacearum NFM421
ttggccggacgcttaccgatcaacgactttaccctacaacactggatccagatcgataacgcagcattcgattgggagagggttccgaatggcgatcctcttgtgccagtagcgtgggaccgggtccttccgtttttggacgtgtggctcaacgtcccagcgcatgaattgcattacgtacagaaactcctgccgacgctcgactggaatggatccagcattggcgttcgattgaggtttgagcctaaggatgcacaagctttgcagcaggagtacctgatcgccaagctggcggctgccgccgtgatggcgaaggcagaagaggtatcagtggaggtaagggctacgtccgccgccgaagaggccgaagttgttgtgccattacccagctcgacgtttgccctctggccgcgttcgatgatggacttcttggcacgccggatgcgatcaaccttcgaggttcgcgcctatttactggaccctgctgaactgagatcgccagaaaacggacttgcccgtcctcagccgttgccggagcatagtgagccgattagtggcgacccgtttagtgggcttattcgcatcgacgagatcgacgctcagcgcggattcgggcactccgggtcgacaggcacaccgcacggggatgattcccgtgacgacttcatggagcagcgaacaggtaaaaagctttcaagccagcttcgatcttattacacccaacacctcgaccccttcgacaagccggaaccgaaagacctacaggcattgcaagcgcttcacgtcgccaagactgcgtttggccagcgtcttgaggatagctttgccgatgcactcaaggaacttgaagacatcggctatccgggagttaccgatccaaaactgaccattaccccctgtatcaatccgatcgatgggttaaaccatagttccgctgtgcagtatgaggttccaacccaactggcacagaataccaagatgcatcggctgcccgaggactcgaatggcctcggatatcaaaacttggtttcgatggtctttgctctaatgagcttccgcgacaagtggatgaaggtcggtaaggcaggcaaacaaacgactgcagacggccttctcatcccacctcttcatcttgtcctgattgaagagccggaggcgcatcttcacgctcaagttcagcaagttttcatcaagcaggcctatgcggtgctccgaaagcacgatcagctaagggactgccaagatctgcggacgcagcttgttgtcagcacgcattcaagtcacctcgcccatgaagcggatttcgcgtctctgcgatatttcagacggctacctgcgccggcagaagctggatccgtgcctctcacctcggtcgtcaacctgtccgaaatctttgacggtccggacaaaagcgagcgtttcgtgaagcgttacctgaaggcaacgcattgcgacctcttctttgcggacgccgcgatccttgtcgaaggaccggccgagcgcattctcgtgcctcatttcgtccgcgagcgcgagacctatgcgtacttgaagcgctgctacatcacatggcttgagatcggaggcagtcacgcgcatcgtctgcgatcattgatccagcatctcgggctgagcactctgatcatcacagacatcgacgcgaagcatggaacgacgaacgcctccgttgtcccagcccgtggagccgggcagagggcacgcaacgaaacgttgaagacctggataccgaaggaagagtctcttgacctgctcctagacaaaaagagcgaggagaaagttctaacagattctagtggctacgcgcttcgcgtcgcctatcagcagcccatctctatggcgttcaaggggcagcctcctactgaggcccttgccaacacatttgaggatgcactggtttacgagaacccaggcctgttcgaaaaactcgagggacatggtctgattgcaaagtttcgggatgcgctggcaagtgccactgatcttgaggatctggccaagcaagcgtttaaggctctagaaaatggaaaaaaggcggagttcgcacttgatcttatctacagcgaggagattaagtatctgaaagtgccggtgtacatccacgaaggacttacctggcttgcaactcagctgaagcgcaaggaagaggatgttctcggtaagatgaggacaaaaccatga

SEQ ID NO: 72327 - DNA, 1875 bp, Pseudomonas brassicacearum subsp. brassicacearum NFM421
atgatatccctcgatgcggtggtgtctaacgacgacgttgatgatgccgtcgatgttgagatatctaggtgcctcaacctcgatgacccacagagtttttttctgtttgcaggtgctggatctgggaagactcggtcactcgttaccgcccttaagaaggtgcagattgacttcggctcgcggctgagattcaaagggcagcgagtgggcgttatcacgtatacgaatgcagccagtgaagaaattgaaagacgcctggcattcgatccgacgatagaagtgtcgactatccatagtttcgcctggtcactgatcgaggggttgaaccgagatattcgcgaatggctccgtttggatcttgcagccgacatagagaaactcaataaggatgaagcaaaaggtcgtgccggtactaaggcatcggcgacacgccttagcaaaatcgcctcaaaaaccaagcgtcttgcaaacctcgattcggtaaagcgattcgtatatagcccaaccggagaaaaccgaggcagagattcgcttaatcactcagaggtgattcaacttacatcgcatttcctgtcgagcaaacctgctatgcagagcattctggttggccgcttcccgctcctcttgatcgacgaaagccaggacacgaacaagaatttgatcgatgcgctattcgcggtgcagtccacgcacaaggcgcgctttgctcttggtctgctcggcgacatgatgcagcgtatctacagcgacggtaaggagggccttggtcagaacttgccgggcgactgggcgacgccgaccaaacagatgaaccatcgctgtccgaggcgggttgtcagtttgatcaacaaggtgcgcgaggcgaccgataagcagcagcagaaatggcgatccgatagcgctgagggctgcatccggctctatattctccccagcgagacatctgataaacaggccgccgagaaggcaatcggtgagcatatggccaaggtatcggcagatgacaattggaatgatctgaagacatgtaaaaccctcacgcttgaacatcgtatggctgcgagacgcatgggtttccttgagatgttcgtaccgctttacgaggttgagagctggcgcccgaattttcttgatggctcgcttccgattgttcgttttttctctgaagaggtcttgccgcttatccaagctaagaaacgcgaggatcgttttggcatagcgcgtattgcacgcgagcattcaccgctgctgtcggttgatgcgttgcgcgccggggacaatagtcagtcacagcttcagctcgttgcatcatcaatcgatcagcttatgtcgctgtgggtagacggggcggacccatcgctcgccgaagtcctccgcaacgtagcagcgacaaaactctttccgattcccgagttgctacagccaaacgcttatcgcgacaaggctctcgatgcggttgagccggccgttgatggggtggatgccgaccgacagagcgaacgtgcggcagctattgatgcgttcctagaggccccattctcccagattgagccgttcgccaactatgtttctgggaaggctcacttcgatacgcatcagggagtgaaggggctgcagttcgatcgcgtgatggtcatcatggatgacgaagaagcccgaggcttcatgtttaagtacgagaatctcttcgggggaaaaggtgttggtgatccttcggtagaaagcactcggcggctgttttacgtcacttgcagtcgcgccatgcagagcctagcccttgtggcttatacctcctcgcccgggcgcgtgagtaagtttgcgatcaatgaaggctggttctccgctgacgaaattgtgacggacatagggttgtaa

SEQ ID NO: 72328 - DNA, 1596 bp, Oxalobacteraceae bacterium IMCC9480
atgagtattttgattgactctattcgagtagctggctttcgcggaattaaaaatttagaagtttttctcactcgtattacagtactcatcggtacaaataatgcaggtaaaacttcgctaataaaagcgcttcaattaaatttgggtgattattcaagatgccttacagaagaggatttttatattgctcccgatgaaaagcgggtaagcgaaataattgttgatgtccgaatcgtgcctgctgacgtgaatggaactcgaggcaaagaatttgacgttgaatggctaaccgaattcggtgacaagattcaatcagaagctaatggcaatcaatttgttgcaatcagaacccgctctcagcaaaatgtaactaaaggtggttttgatacgagtcgcaccattttggagaactggccttcttttgacaattggacaactattaagcttaaaggtacaaagctaagtggtcgtttacaatgcattccgtttatttccatggaagcacagagggatattcatcaagatttacgtgatcgatcatcattcattggaaagattcttgctagtgttgaatacgaaaaaaaagacatattggaacttgaagcacaaataaaaaaagtcaatgatgaggcggtaaataaaagcaaggaactcaaaagccttaaagctcacttagaaaaactaaatcaatcgattggaggtgctggcggcgcagaagtaactccattccctaaaaaaatccgtgatttatcaaagaatttttctgtctactttggtgaaaatgacgctaattctttttcgatggaatatcatggtatgggaacacgcagttgggcctcgatgctaacgattaagtcttttatagagattttgagcaacagacatactacagagtccaaatcgctgttccctattcttacggctgaagagccggaagcacatttgcatccgaatgcccaaaaaacactttatcgccaactctcagatacaaaaggccagttaattttgagttcgcattcaccatttttagcatccatggctgatctatatgaaattagatcattggtaaaaactaaaaatgggattgtaatgcataaaatttctcacacaatgactaatgaggacaagaaggttgttgccagagaggttttggcaaaaagaggagagttgctatttgcgaagtgcataattttatgtgaaggcattactgaagaacaagtcctgccggcaatgcttgaattgtatttaggtaattcgccttggaatatgggggtatcttgtgtgagcgttggtggaaaaaattacagcccttttgttagattggcatccagtttcggcattccaacatgcattctaagtgataacgacggcagcacaaaaacagaagtcgaagcacaaattcgaagattgaatagagagttagatattcctttaggagataacttgtatggtgttaattaccttaacgctggaaatgactttgaggctgaacttgtcggtcatggattgcgagatgaaataattgatgcacttgtattgtatgaaaccaagggttcaacgatcaagagatataagacggcaaagtacacgaattga

SEQ ID NO: 72329 - DNA, 1896 bp, Oxalobacteraceae bacterium IMCC9480
atgttgaatttatcaaaaagtcaagaagccgtagtccatgctgaaattggacagcctatgcaggtacttgccgctgcggggtctggaaaaactagagtgttaactgagcgtgtacgatatttaattgaaaatacacgcaaagacggtgttatcgctttaacatttaccaacaaagcagcagaggaaatgcaaactcgcctagccgacttagatgaacttgatgagcgctgctgggtagccacaattcatgctgtagctcagagaattttggataaatatggacacaccatcggcttaccgtctgagcttcatatttatgagcgcgatcaggatagaaaaactgttttccttcaatcgttaagagagaataatgttgatatcgatgattttcttaacgtgggtgatgaaaaaacacgaaaagatcgtgaacgaattattcagaattatttagaacaattttcagtggttaagcgagagcttttaaccgaagaagaaataaaagaaaaatacccatcaaacgaatcttttttgagaatttatcaggaatatcaaggtgccttagttagaagtggcggcttagattttgatgacattttggtttatgcgcatagaattttaatggagcaaccgtggtgtgctcagatctatcgagctaaatataagcatctgtgtgtcgatgaggcccaagacctgaacaaagcccaatatgagttcattaaggtattgtgcggcgacaaagttaagagcgtaatgatggttggcgacccaaatcaaatgatcttcggattcaatggatcatcatctgattatttatgcaaattctttccactggatttttctgctaagatttttgaattaaaggaaaattaccgcagctcaaaatcagtaattcgtcttgctaacaaattgaagccaggatcgcagatagaggctgattttgtacttgatggacagtttgaaattagctcatacaaaaatgaagaagaagaggctattagcatttccaataaggtaaatgagcttcttttgcagaaaacgaataccgagattgagggtgatatatcgctctccaatatggtcgtgattgcacgtaatcgattcgtttttcttgctttagagaaaattcttagtgaaaaaggtattccatactcattgaaaaaaggcgaacgccaagcggagccatcatccatattcggcaaagtactggatcttgcaatacgaattcgcctgaatcctaaagattggatcgatggaaaaaaactttgtaccgctctaaaaatagaagttccttccttatggggaaacgacaatatattacttgagatggccaatgctgctcgtcaatcatctatgtcgttctgtgacatttatgctgaacttcttgatgcaattcaggcgttagatatagaacagccaaatataccgaagctatacgataactttaataagattattaaagatttgaatgatgctcatcttccaaaagaagacaatgaacttgagcgttcattgcaggagctagatgactttaggaagtgttggactacttttaaaagaaaaggactaggggagtcactcgcatcctttcgcaatgctatcgcgcttggacaggttgcagataactatgatcctgctggactaacattaagtacggttcatactatgaaaggacttgagaaagatatcgtatttctcatgggaatgtgcgaagggatatttccagattatcgtgccaacactaaaaaagagcttgaagaggaactcaatagtgcttttgtagccattacgcgagcaaagcgctggatattcgtatcttatccacttcagcgcgttatgccgtgggggagttcaaaatcacagagtgtttcacgatttgtgaaaatgttgcaaatgtga

SEQ ID NO: 72330 - DNA, 1992 bp, Vibrio parahaemolyticus 10329
gtgaaaataaaaaacgtacgaattaaaaactatcgtctgctcaaagatgtgtcattttcgattgatgaaaaaacaaccattattgttgggcgtaacaatactgggaaaacttcatttgctgaggcttttcgcagctttctgaatcatgctggtcccaaggtgcgttatgaggatttcaatcaatcctgtctgtcaggtttcgaagatgcgctgaatgctcatcaaggcggagctgaagacgatgttgtgaggcccatgcttccaactatcgagctagagttacttatcaattataaagaaaatgcggacgaatatggtgtcctcggcgactttattatcgattttaacgatcaattatttgaaaccattatcctgatttcttatcagttaaaagacggcaagatcggcgatttttttagtgggctcgataccatcaaacgaaagcagtatttttcggatctgagggcgaggatagagcattactacgaagctacagtttacgcggtcgagccgacaaaccagagcaacaaagcacggcttgagttttcgtcatttaaaaaattgctgctgtcgggtcttataaatgcacaacgcggtttagatgacgaaacgcacaatgaacgtgatgtgcttggtaagtcgttaggtaatattttcaaaagtgcgagtagtgttggtgcgccagaagcttttaaggcgcaatcagctgaaattcataatgtcgtcgaaggattacaacaagttgttgatactgactttcaggcaagagtgaaagctctacttcccaccttaaatatttttggatatccgggtctgcacgatccaaatttaagcgcagcaacagagcttaatgtgaaatcactgctggaaagtcacacccgagtgttttatcaacgagatgaccattttacattgccagaaacctataacgggctgggaatgcggaatctgatctttatcctcttccgaatttatgagtatttccgtgagtttcaaagccatcaaacgccaccgaaagggcatgtaattttcatagaagagcccgaggcacatcttcacccgcaaatgcaggaagtatttattcgacagcttgagcaaattgttgagcagttccagcgcgaactaaataaccagcaggtgtggcctgtacaatttattgtgagtactcattcctcgcatattgccaacgaagctgattttagcaaggttcgttatttcctatccaaaaatggaaatgagaccaaagttaaggatctgggcgttgctttccaaagtgccgaagcagcgggcgacaaagagtttttgcataaatacctgacgctcacaaaatgcgacctgtattttgcagaccgagcgatcctcgttgaaggggcgactgaaaggatattgttgcctcaaatgattaaaaaagttgacgcagctttagggactaacttaagacagaaatacctgtcagtcgtcgaaattggtggagcttatgcacaccacttctacaaattcatagatttccttgagcttaaaaccctctttattactgacttagacgcagttgattcaaaacaacatcatgccgctgtaatggtgagccaaggggacaggtcgagtaacgtcggcatttcaaaatggtttggcgaggagggttattctgacttagctactattagagctaaagattcagattctaaaattctcggatatcggcgacttgcttttcaggtagatgaagatgttagtggtttatgcggccgcagctttgaagatgcatttatcttggttaatagccagttattccagctaaataacttaactggttccgcacttgaggccgctgtttatgacaaggcaaaagatatcggcaaaaagagcaaagctgattttgctattgaatattgtataagtaatacggattggctcgtccccaagtatatccaagaagggtgcgcatggttagacgaagacccaacagttgctgttgaaggagtgcaatcatga

SEQ ID NO: 72331 - DNA, 1752 bp, Vibrio parahaemolyticus 10329
atgactgcactgaaccccgcagcacaggcgtcagtagagacacttgaaagcttgagaggttgtattgaccaagggcaatgtttcagattggaagccggtgctggagcgggaaaaacctattcgttgattgagtcgctcaagcatctgatttcgttacgtgcaaatgagtttgttgtatctgggaaacaagttgcatgtatcacttatacaaacgtggccaaagacgagatcaaggcaagaaccgataacaatccagtcatttttgcagatacgattcatgccttcagttggagtgttttgcaaaactaccaagtgcagttgagacaacttattcctacgcttggggcaaagtggcaagagagaattgcagaatcggtaggcattggtaatcaaacggttaagtacgatttaggttatgcgtcgattaaagagcatgaaatttctctgcatcatgacgatgtagttgcgttaatggctcgcatgttggcctttccgaaattccagaaattactgaaaagtaaattcccaattatctttatcgatgaatatcaagacactgatagcgcacttgccgaaagtatcgtgcaaaacctgattgataatgattcgggagttgtggttggcctttttggcgatcactggcaaaaaatatacggctcgtcagcctgtggattgattagtagccctgcaggaaaaatcatcgagattggcaaacgagccaatttccgttctgataaaaacatcgttgaatgcctgaatcgcatgcgccctgaattacctcaagccgaatccgacccaagctctgttggaggtataaaggtctaccattcaaatgattggcaaggtgcacgtcaaactggtgcacattggaaagacgatcttcctgaggaagaaactagacgatttatccagcaaaccaaatcattaatggttgaacatggttgggatatgtcgttatctaaaaccaaaatattgttcttgacgaataacctaatagctacagaacagaaatttaagaatttggctgattgcttcaattatgcagaagactatctgaaaaaaaatgacaaatacattgagttctttgttgatactgttgagttaacggcgctagctttccaacaacgtaagtatggtgaattgcttcagattaaaaagaaaaaccgctcctacttaacgtcgcaagctgacaaaactgcttggattgagaatttagaaaagttaatgcgacttagagacacatctacaatcggtgatgttttagacctgttgataactacgagtatgccgagagttccggcaaaagtcgcggattctgaagtccgttatcaaacattatctgcccgtgataaagattcattagagccagatgaattgagtttcgtcgccaaaattaggcgtcttcgtgcagtgtcttactctgaagtcataaacttggccgagtacataaatgataaaaccccgttttcaaccaagcatggggtaaaaggcgcccagtttgataatgtactagtagtttgcggccgtggctggaatcactacaactgggatcaaatgcttgaatggatagaaaacggtgtcccaaaaggaaaagacggaacttttgaacgaaatagaaacttgttttatgtcagctgctctcgggcgaaacataacctcacgctcctctttacgcagtacctctctgataaatcacttacggcccttggtaaaatctttgggaacgaaaatatcaaaggcagtccattttag

SEQ ID NO: 72332 - DNA, 2106 bp, Bacillus amyloliquefaciens TA208
ttgcttttaaaaggtgttactatacaaaattataggaagtttaaaaacgaagcattttcaatggctgacgacgttaccttgcttgcaggtgctaataatagtggtaagacttctatgattaatttaattggatctataatgcaaaatggcaaaacgccattttttatttcggatataccagtaaggctatcaaaacaatgggtagatgaagtttatgagacctttatactgtgctttaaggaaggcgatgatcaattatctacagtagagagaattataaacaagctatttagtactgaattgtttaatttagaatgtgatctaataatacctgcaacatctatacgttttagaatagattatagtgaagaggacgatattagaaagtttgccgattttattatggatttgaatccggataataaaagcttctattttgaatattcatttcaacctacttatgtatcctttggacaagcattggaggaaaattataaaaaattatatgcaagatataaaaaaattcattcctcaaaagatccaacattaaaaatacgacaatttaaagaggtaatattgtcaatttatgaagcgagtataattgagaaatgttactttagtgatagcgattatactgataaagtcgaaattgacatttcaacttttcgaagactgtttaattttagatatattaatgcaggtagaccactcgatgatcagagtaatggtaactttaaaagtttaagtaaaaatatggttgagctcgcaactcatgatgaaaaactaggtgccctattagagaacttaccagaccaaatactaagtccaatacaagatacggagattattgataaggtaagagacacatcggtgaaaggtcttagcaatgcggttaaaacaattgctaaagcaagtggaggcaatacagggagtatgatccttgatatagatattaacgaaggcacaataacctctcttcttaatcaaataactaacactaaatatcaatatgaaggttatttcctcaatgaagcctcccaaggattaggttacagtaatatgatttatatactgctacagttggaaacatataaaagaaaaattgatccgctattagtcaacctatttgtggtagaagagcctgaatcacatatgcacccccaaatgcaacgaatctttgggaagtatttaaaagattactatcttcaaaaaaaaatacaggggttaataactactcattccggagaaatggtgcgcctaacggaaatgaaaaatttaagagtttcacgaccaatagatcagttagaaagtaaaatttacgatttttctatgtttaaaaaaggcttgagtggtgacaccactttggatacattttatgattggttttatgaaataggattttctgaaatagtttttgcagatagagtaattctatatgagggtgacacagaaaggttgcttataagaaagttattgactctagatatatatgaagaacttaaccaaaaatacatagcctatgttcaagttggcggagcatacgcacataaatatagtaaggtgataaattttctgaagataaaaactcttgttttaactgatctagattataaaaaagatgcaacaactgtagaagcagtaaaagagtctaaaacaacaaatgcaacaatcaacacctattatgatttatcaaaagaaataaagtctccaacaatacttgatttgtatgaatggaaagacaaaggtgagaataagattcttggaggattagtcctaattaattatcaaggaaaatctgaacaatatgctcggactttagaagaagctatgctctcaaaattttataatttgaatgtgttagaaaaaaaagatagaagtttctggattgagaaaagaaatagcgataatcttaaatatactattccaaaccctgataaatctaaaaaagatgatttagataaagatgaaaaatacagtattagagatattgttagacattcagagaataataaaactgattttatgtactcagttattttaaatggtctaatagaaaagatgcttcctaattatattaaggagggattagattggctgcaaaattag

SEQ ID NO: 72333 - DNA, 1380 bp, Bacillus amyloliquefaciens TA208
atgttttataaagcaggactaaatactagctcaaaactctattttcttggcgacaaaatgcaacaaatatataaaaactatgatgggtcatttgaaaaagaattaaaaactctaaataatgaaattaaattagatactaatcatcggtcaataccagatatcgtttctatattaaataatatatataatgataaggaattcaaacaaatctcatccgataaaaaccgagctaataaaccagaccatccaccaagagtagtattgtgtgataacattcaaaaaagaataaaaagggaacaattaatttatccgaatgctttattgttatttttattaaatcaacaaaggtttgattcgataggcgctggagaattttacagacaatttaatagattggatagatattcacaagtaaaccaactaaatgctagtgatgtcttatctgataatacaaatgaaaataaagatcctcttttaaagttgctttttatagtagataaaattctaagttattatgaggattttaatcttggcagtataattcaaacccttaaaaggaatcaaaaaatatttgatactagaattggtacaattactagtcatcaggataaagttaacttaaacaatctattaaaacaaatatatgatttttatcagaaagacagctcaatatatgaatttttaactttattaagaggctctagagttataaaagaggaatatatagataatatatctaatgaatatattggagtgttagcagttacattaaacgaattcaaggcactgtcaaactatttgaaagacccgaaagtttcgacacaacatggtgtaaaaggagagagtcataatactgttttcttcattgcggacgattcctttagaacaccgctggttcatatgtataaattcttaaaactatggactattacagaactatcgttagattctctagaatccttttattatgattataaaaagtggattgaagatacaattgaccatttagcatgtaaaatatcagatttgaataaagaaaagtatgaggcacatgcaacttatctaaaaacaagagttgaagaattatgcaaatatttcgagaataattggatatttaaagatctttgtgaagacttttacaatgcatatcttctaaaacctaatgttacaaactttaaaaaatgttttaaagagagtactgtgtacggagttctgtctgcgtacagacttttttatgttggttgctcaagagcaaaaagcaatttaactatttttattgataagtataaggtaaaagatttttctgaggatttgatttttaagttaaagagaacgggatttagtgttgaaattgaagcaaaagaattgcagaaattgtga

SEQ ID NO: 72334 - DNA, 1953 bp, Methanosarcina barkeri str. Fusaro
atggcaagtttcaacaaatatcttaaatatgtgttatgttttggaaattataagggcaagatacacaagagagaccttacaatgtatttgaagaaaatacatgttaaaaactttagatgtatcaatgatattaatttagaactaaactctggattaaatgtaattatcggtgcaaataattcgggaaaaacttctttactggattcattaagattggctttaagcattggtaattacagtagaagtatctatgtttcaagtgaagatttttttgtagatgaatttggaaagaaatcccaaactattgagatagaccttacattttctgaactgactccagaagacatgggagtcttcattgagatgttaaaagttaatgatgatggaaaccatgaattagagcttcatgtcaggtataaaagagagagaaaaaatggaatagaaaaaattagggttagatattggggaggagaaaaagaggcaaatactattccaatagaagttatggaactattttatattgtatacttagaagccttaagagattctgagaattatttaaagccgaatagaggaaataaattaggtcaactgtttctaaaattagttccagacgaaactgcacaagaaaaacatgctcagcaaatatacgaaagtattacttcaaacgaagattggaatgaactaataacggacgcaagaaaaaagattaatgaacacttagaaaatacgactcttgagcacgatacccttagaatagatattgattttgctccagtggattttacaaagattgcagaaagattgaaaatttatataccgatcttaaaaaagataaaaagagaattgatagaaaatatttttgaagaagaaggatgggaaaaatactttgaatacccacattcggataaactgattttaaagacagacataaaagaattattgaaaaatgaagtaaattctgaacttaaattcaaaatttcaaaattagaaaagttcattcagaaatttgagatatatcaaaacggattaggatataacaatttgatatacattgcgactataataggcgatttgatcgaaagagtaaatagaaaaagtgagaattatattgcacttttaatagaagaaccagaggcacacctccaccctcaactacaaaatatattgtttaattattttaagaatatagaatcaaaaaatattcaaatatttctcacttcacattcacctacaattacagctaaaactgacatagatacagttattttaatggagaatagttttaaagtagacattttgcctttaaaagatatcgaatttgaagatgagacagataaaaaatatttgcagcgatttcttgatgtcacaaaatcacagttattttttgcaaatggagtaatatttgtagaaggaatctcagaagctatgcttcttcatattttctcaaaaattttgggtatcgacttagagaaaaatggaattgaagtcgtaaacatcggtggagtagcctttaagccttttgcgaaattatttaattcagaacatatggataaaaaaataaaagtaagagctgctatactgtcagatgatgatgaatcagacggaaaaatatctcgcagagcaagtaatctgaataaacttaatagtgaaaatttgaaggtatttttaggtacaaaaacttttgagtatgaactatttctcttaaatggagaccttttaacaaatttatataagaagttacaccctaattttcctcagtctaatcctcaagaaaataccgaaaaaaatgcagattacctggtaaagaggttgaaatcaaataaagataagggtgaattttctcaacttttaatgatggaattaattgaaaatgaagatacaagaaataagtttaaagttccaaggtatatcgaaaaatgtgtgaagtgggtggttggggctgaggattga

SEQ ID NO: 72335 - DNA, 783 bp, Methanosarcina barkeri str. Fusaro
ttggggctgaggattgaagactttagtggagataaaatacacatactagagaaagatggtgtattcgttgtcaaagcttgtgcaggaagtggaaaaacatgtgtagttgctgctaaaatctcttcattactcagaaaatgggaatctaataacagaggaatagccgctatttcatttactaacgttgcttggcaagaaatcgaagataagttgaagaaggattttggagtcgattcagggttagattacccacacttcattgggactattgatagtttcatagatacatatctattgttaccttttgggcacttggttcttaattgcgaaaataggccagaaattataatgaattgggaacctgagatcagaggaaagttcgaatgtaagaaaagtggatgtaaattaagtaatctctcttatgatattaatggaaatttaattagttatagtgacagcagtcatttttcaaattgtagtctgagccatcgttactgtaaggcatcaaaaatccaattacgtcaaagtggttatttaactcaagctgatgcaaatttttttgtgatgaagttgctagaaaagtatccagacattgcaaaagctattgtatacagatttcctgtatttcttatagatgaagctcaagatacttctgatgtccaaatgaaaatttttgatcttttgttggaaaatggattagaaaggcttatgctaataggggatccaaatcaagcaatatacgaatggagaacagcgaatccagaagtatttataagaaaataa

SEQ ID NO: 72336 - DNA, 1797 bp, Cupriavidus metallidurans CH34
atgaagttgaagcgcatctatatcagcaacttccgcaacttcgaacagattgacgttgcattggacggaagtgtagttgtggtcggcgaaaacagggttggcaagagcaacctgctcttcgccctgcgccttatcttggatccgagcctccctgatagcgctcgccagttggggcaaggggatttttgggatggcctaggtgagcctctagaggacgagcgcattaccgtgttcgtcgaactcattgagtttgctaacgacatggatttgcttgctgtcctgaccgactatcggctggacgatgaccctgacaccgtgcggctaacctatgagttccggcctatcgccggcctcgctgggtttccgcaggctgatgaggattatgagttcatctgtttcgggggagagtcggagaataagcggtttgggcacgatgtgcgccggcgtgttgcaatggacctgcttccagccttgcgagatgctgagggtgaccttgcagtttggcgccgttcgccacttcggcctttgctagagcgcgcatttgcggaagttcccagccaagacctcgggcaagtgagggatgtggttcagcaagcaacgcagcaactggccgaattcccgacggtgcaggctctccagcagcgtttgagagacctcttcgtctccatgagcggtcctaaacaggacattcagccagctctcggcttcggcaccaccgacgtaaccaggctcatcagaaatttgaagctgctcatcgatggcggcctcagaaccattggtgatgcgagcttagggtcggccaacgtggcgtttctaacccttaaggccctcgaactgcagcagttgatgagtgaaaaccgtcgggaccacacggtgctggccatcgaggaacctgaagctcatctgcatcctcacttgcaacgatctgtatatcgacatctatttgaggatttggccggagcacaaggtgaacaactctcccttatgcttacaacacactcgccgcatatcgcgagtgtggcgcctctgaggtcccttgttctattgcgagagtctccgcagaacggcactgtggggacatcctctgcagaaatttctctcaccgaggatgaagaagatgacctcgctcgctatctcgacgttacgcgggcagaaatgctgtttgctagaggcatcatcttggtcgagggcgacgctgagaagttcttgttgcctgtgatggccgcttcgatggggcacgaccttgaccatctgggtattacgatatgctcggtgtcgggaacgaacttcactccctatgcgaagttcctcacggcgttgggcatcccattttccatcattacggactgggacccaagagtggggaagaagccgctaggttttaaccgctcatggcgtctggtcgagagcatcgagcagacacttacaggagttgcgcagccgaaattggttcaggaactcgtcgccatagccgactacgatgacttctgtttgcgatgcgaggacttcggcatcttttcaaacttcgtcacgttggaagtcgacttgtttgatgaccaagattttaccggcgagatcatcgcaacccttcgagagtcgaattggagcgaggaacgccgtgcgtggatcgacgcatgggaggacgaccctgacaagttgaacgccgagaattatttgaaacttatcgatggtgtcggaaaggggcgttttgcccagaggctagcgtcaaagattgtgggtgccatccctcctgaatacatatctaaagcgatctcctacgtagtcaatcgtgtctaa

SEQ ID NO: 72337 - DNA, 1776 bp, Cupriavidus metallidurans CH34
gtgtctaatcgcgccgcctatcttcaagctgccgaggagcttcgcgacaatcctgggcagtgggcagcttacgagtcgcgaggacactgtgtagtcttggctggtcctggtagcggcaagacgaagactctcactaccaagatggcacggcttctcgcagaggacgtagccgagccgcggggtgtcgcatgcattacgtacaacaacgagtgtgctcgtgagctagaggcacgactttcttcgctaggcgtagagccaggcgggcgtgttttcgtaggaactgtgcactcattctcgcttacgcaggtgatcttgccctacgcgaaggtggcgggtttgggattaccagatgacttccgtgtcgccaccaatgcggaagcgcttgcggctctggacgatgcggcccaagttgccatgggtgcggttcccaatctgcaaaccatacgctcgcaaatggggagctatcgtcgctcaatccttaatcgggacagcgacctatggcgggatacgaatcctcgtttggcaaggttggctgaggcctatgaggccgagctccgcgttcgtgggctcattgacttcgatgacatgcctcttctcgcagttcgtgcgctgagagagaacccttggcttcagacagcattgcttgcgaaataccctgtcctggtcgttgacgagtatcaggacctcggtgcggctctgcaccgcatggttatgggcctctgctttagtgctggtatgcggcttttcgcagtgggagatgtcgaccagtcgatttacggcttcattggagctcagccgcaaatgttgcagcgtctggccgagagggaggatgtggagatcattcgccttcagctcaattatcggagcggacatcgaatcgtggccgcgtctggcgctgttcttggggtggatcgcgggtacgcggcggtggacggggcgccgcagggtgaaattttcttccattccctcgggggtagctacgaggtgcaggctcgtcgtctcatgaccgacctccttcccgccgctatggcgcgtgagccaggtgttcgctacgacgaaattgccgtcttgtatcccgccgcctggattggcaatgctgtcgcagaggcggcgcgccacgccggagttccgtttattcggacggatggtaacgctctatatcccaggtcgagccggttgatgcaatggttggaactgagcgctcaatggtgttgcggagggtggcggactggtagcccacggttttcccagttggtatcggaggggcgaaggctgttcggggacgccatccgagcagaattggacgcagcggcatttcatcgagcgctagtggcttgtctatgggagatgcgaagacccgacatggtgctctatgactggctacagcgattcaagcgcaccgtgttggaccaacatgcccaactatcgccgaacctgagggatgagctcaacatcctgggttcgtttctggagagagtctcgccggatgccgactacgcggagatgactgttgcggagtttgccggcgaacatacattcgacaggctgatgctgtccacgcttcacagcgcaaagggccgagagtttcgcttcgtatttctgtttgggattgatcacgggcgattgccacggaatggcgccagacctgatgagatcaatgaaagtcgtcggctattctatgtgggcataagccgagcaagaacagaggtccacattgcctacacacacggcaactcgtcaatcttcgtggatgagcttcaagcgcggttgaactga

SEQ ID NO: 72338 - DNA, 2241 bp, Streptococcus agalactiae NEM316
atgtatttaaaaagtttatcaataaaaaattatagaaaatatggcgaagaagttcagactattaactttgcccatagtaaatggtcagaaatgtcaggtgctgaagatgaatcggaaaagataaatagaacagaagagtatatatcaaaaagttcatcattaattgtagggaaaaataattctggtaaaagtacaattgttaaattattaaatacactacaaaataccaagtcaggtagtagaaatattttcaagtatacagattttaatctaaaaatgttatcagattggtatcgttttaatattgataataaatctaaagaagatatagaaagtattgataaatctgactttcctaaactagagtttcagttgatattaggaattgatgatgaaaatgatttgatttcaagtttcgaagatatattaattttaggtggtatagaaacagttggaactcatgaaaatcaagaggttgcagaagtaactatcgatgttaaatatgaagttgctgatgttcagtctttcttagaagaacttgttaaaattaaaagtagccctcgagagaagattgaacaatatgatcaaggatatcaaaaagaacttcgataccggaaatttttaagtttatttagtagtaattactttgtattaaatttttatcctataagaagagatgaaccagccaaagaattttctctatcttcattactaaaagtagcgacaattgaggcaaatacggtaaaaaatgacaagacactttcacaagcttataataaaatagtttcaacttatataaaaaataatgatattgtggaaattgatagtttagttggtgatattaattatcaagtaaaggacatggttgataccaatataaaggatattcttcaaagtgcagtatctagcatcgagtcaactaagaatttaaaaatgaatttacatccagatgtaactttagagaagatttttgcaaatagcattatttatgagtaccaagagggaaataataacatacctgaaagccagtttggtatgggatatacaaatttgatggttattattgcaaagattgttgactatattgagttatatagtgagaaggatattaatggttcagtaaacattctctgcattgaagaaccagaatcatttatgcaccctcagatgcaggaattatttataaagaatatttcaaaagcaatagctaccttactaggtaaaaaacagcaactagatacatttcaaattatcataacgactcactcaacacatattttaaatagcaagattcaatcaggaaatactcttaacaatattagttatctaggtcaagtaggtgtaaataatataataaaaaatgtaagtgatgataaaattgcatctggtagagatattgataaaaaagcttatgaatatatcaaaaaatatttaagactagagatcacagatattttctttgctgatgcggttgttttagttgagggagtttctgaagaaacttatcttagatacgaaattgataggcattccattttgaaaaatcatcatgttaaagtttataggattgatggtgcatatgcacaccagtttattagtttgttagatttgttaggagtcagaactgttatttttacagatttagatttaaaaagatcggaatctgaaaagaaagttgatataaaggataatgctgaacctgatgttattccatctaatattcctgatttagaagaaaaatatggaggtgtagcaagttctttgactaccaatggaactatacagtattttgtaaaaaaattgttgaatgatgacaaagccaaatacgataaaataaatagtaagataattgaaatactgactgataaagaagaattggttgttgagtataataatatttccatgtattctcaaggtaaaataaataaatattatgctactagctttgaggaagcgattgttttaacgaatgcaggaaacgaagatgaaaataaatacaagaaatccttgattaaagcactacaatatgtccatcctaatatgaggtattttggtgatattgatgaaacatcagaaatagccgataaatcttatatgtatcaagttaaattatctgatgggaaatcaaaattttctactgggattgtatatttatcgataaccgataaagagtttagtctcaagcgacctcaatatgttgaatcaggtttgaatttactttgtggttattttgaggagtaa

SEQ ID NO: 72339 - DNA, 2019 bp, Streptococcus agalactiae NEM316
atgacatatacaattagtacagagaataaacaattagagttagacattcagaaagatattaatgagtgtttagataactttgagagcttttgttttgatgccggtgctggtgcagggaaaacctatgcattacaaaagtcaattgaacatattttgaagacggagggagaaaatttaaaattacgaaatcaaaaaatcttatgtatcacttacactaatgctgctaaagatgagattcttagtcggattggtaaaaattctgcaatactggcctctacaatccatgaatttctatgggggtttatttctattcagcaagagttactgactatagaacatgagaaaaaaattaaagaggaacttaacggaattgaacaaaagataattgataatcctctttttggcagtgttaatctggttgatttccataatgcgattagtgatgaagaatttctgaaagtattctatagtacaccaattagtcctgcaggagattttaaatctatgattaaagggtacagtgaatactttagcccctatctaagtaatgttaataagtttagcagtttagttaagaatgttgataagaagtacaaacttgaagaaacattgaaagaaattaagaataagaaatctaaaaaaatcatctataatcctattcgaaaccgtgataaacttgaaaattatgtcattagccatgatacgttattgctttactgtaggaatatcattacgagtcagaatttattaaagagattgttttcagatagatatccatatgtcttagttgatgagtatcaggatacggatgaaaaagttgtcgatataatagatagtattagaaaatttacaatttgtaaaaaaaactttgtggtaggtttttttggtgatactctacaaaatatttatagttccggagtgggaaaacttccaaataaagaagaatataagagtataactaaaatttttaatcgtagatcgtcgaaccaaattgtagagttgattgaaaagattagaaatgataattttggtcaacaatctatatatactgattttgataacggatcctataatttttatatagctgatgacgattttgacttagatatttttttacaggaaaaaaacttagttagtaatactgcttgccttttaatgaagaatgatgatattgctagggtacgcggattcgatgtattattagcaattataaaaaaatttcctagatttggtggcaataactttgataatgtgaataatgaatttttgcagaaaaatttgcagcatatgggatggtttttaagagagattcttactttcatagactttattcaaaagtcatcagattataactcaactgttaaggaaattgttcagtttataggaccgtctaaatcaacaataacattcggagagatgaaacagtttattagtagtttgagaggaattaacttgtcaacattgacaattgatgaatgtattaataaaattgctaatatccaagaacgaatatcaggtgaagatattttaagaaaaatattctcgatagatgatactactgaaaatattttattgaacattaaaaatcgtgcctatgattatttttactatttgcaggattcggaggagtattccgaaagagaaatgatagttattgataatttttttaggttagatgttactcaatttatcaagtggtataaatatatttttgatgacttaaaaaatgaggaaattagttattatacattgcatggttcaaagggattagaatttgataatgtagttgttgtattacaagataactttgctgggaagagaaattattgtaaatatttttttgaaaattataataatttaactgattctgatttacaatttcaagaagttcgcaatcttctttatgtagcatgttcaagagcaaaaataaaactttgtgtaatctacatttctgatacactggaagatgcgttaaagaatattgaaagtatttttggtgagattcaatatttagcataa

SEQ ID NO: 72340 - DNA, 1998 bp, Photobacterium profundum SS9
ttgtacatcatgaagctatcaaaagtccgtatctcaaatttccaatgttttgaccaaagtcagacagaaattgattttgaagaacaactcacagctcttattggattgaatggcagtgggaaaacgtcaacactccaagcattaagtcgaatgtttggcgtcagtgaatcagctagaaaaataaaggttgatgactttcatagtccatctgttactgtgcaaagagcggatgaactgtcaatagaggcatggtttacttttccagaagtcgaatctgaagcggacatgatcgctgttgcaggaacgtttaaccagctatgttttaagtcttcaggcaatgaaatgatgcttaggttgaagcttgaagcaaaattaacggttgatgatatatcccctgacggtgtcgtagatgaaactgtctactatgtactgagtgacagtgatacttacgctagtgataaatgtcgagagctgcgtaggtctgatagaaataacattcaagtacattacatcccagcgagtagaaacccttttaaagaaataagctcatctacaaagatgctactgggtagattgctaaatgcaattcaatgggaccaaagtgcagatggcgagcttcaaaaggctttagagttaactgaacaagcaagtgaagaaatctctaagaatagtgcgataaaacttattgagaaacagcttcaaaatagctggcaagaaatgtattcaggagattatctgagtaaggcgaaagtcaattttttgccattgcaaactgatgagctattaaaaacaattactctctctttcgagtctgatacaaataatagaaaggctacgatggataggttgagtgatggtcaacgttcgctattacatatcgccataatacaagcagtacatgaactagagtcaaaaacgcttagagagcaaagtaatcgagttcattttgattctaaaaagttgaataccccaatttttactctactagctttagaagagcctgaaaaccatctagcccctcacttcttggggcgaatagtaaaatctatgagttccttggctaaatctacaaacgcacaggttttggtcactacgcactccccaagtttagtaggtagaatcgaaccgactcaaattcgttactttaggttggatagtacatcgagaagtacggttgtctcaaaaatacagttaccagaccagcaagatgagttgtataaatttgtggcaggtgcagttaaggcttacccagagatctactttgcccgtttggttattttaggtgaggggcaaagtgaacaaatagtcataccaaaattgttgtccaaagttggtattgatattgatgatagtttcgtttctgtcgctcctttaggtggtaggcatgtaaaccatttttggaagcttttgaatgggttaggcattccatacgttactcttttagacatggattacggtcgaaatggtggaggatggggtcgtataaagtacgtagtcgaccagatggttatgttagggaagagtgaaataattacgggtatacccaattgggatgtaagcgactctaaccctatgactgatacgctatctaacagcaaaaatactgcggagggattactgaatcagcacggtgtattcttttctacgccactggatttagattactcaatgcagttgtcttatcctaagaactataatgaaaagcttactggtgaaaatggtccgcaagataaagattgggagtccttaaagtctgctgttttaaagactaagtattcaaagggaattgctgattattattatgatgagatgcaagatgaagatgctttcttatggtacaactacaggttccttggtagtaaaggtaaaccagtttcacacataaatgctctagagaaaattgactttaatctagctgaaaatatctcccgaatccctacaggtattcaggagatgataaagcacatagaaaatgaaatttctaatctctcggagtaa

SEQ ID NO: 72341 - DNA, 1719 bp, Photobacterium profundum SS9
atgattgatgcttcagtgtgggaaccaaaggacggattaaaatttgacgataagtctctaggtatcatcaagtgtgataataacatttcaattatggctggacctggggcgggaaagactgaaattcttgctcaaaaagcttgcttcatacttgaaacggaattatgtgcttggccttataatgttttatctatttcaaggaagcgagaatctgcttcaaatataaaaaacagagtatcacttagatgtggaaatgtgctatctgaaaggtttcactcttttacaattgaagcctttacgaaaagtatcgttgataggtttatgcatatattgcctaaacacgaacaaccgaatgaagattataaattggtttttaattccagagatagtaacttcagagacaagttaacttttgatcaacttactattaccgctttgaaaattgtaaactcttcttccaccttaatgtcatcgataagagcgacatacaaatatgtttttattgatgagtttcaggatttgaatggccatcaatatgatttcgtgaagtcaatattttgtgggtctcaaagtgttgtcactgttgtaggggatacgaagcaggcggtaatgaagtttgcaaacgctttgccagatggctttattaagttcaaacaagattttaaagctgacttaaagataatttataccaattttagagcagctccagaactgaaacaattcatagattgtataggtaatgaatggtggccgattaatactgagagtgttgaatctaatattgacagtgttgcattggacaaaggtgactattctctacttaatttcaatgacgaagagcatgaggttaagcaactatctctaaagattaagaaatggatttctgaggatggaattaaacctaaagagattgctattttatttagaataaatacaaataacaactacagtaaaaacctcaatattgccttactagacctaggtgttttaagtataaatgaaagtaatattcaagactatctgtccgagcctttaggaaaagtgctagtttcattattatgcttattgactcgccctagagatataaaagcatgggagtgccttagagattcatatctttattgtagttctagtaactctctacataacgattttgagttaactagaatactcaaactaataggggatactccgttttacggtgatggagatgctaaaacattcgatagtatattagatgtaaccatcgaaatcatgaatgaattcttctatgagaacttaaagaaaacttggacacaatatcgacaaggtactctaatggatgagacttttcatggtgtactagaagagttaaaagaagcaagaaacataagttcttcgtggtcaggtgctgttgatcttatttcaggagttggagctgttcgaatgatgactattcataaaagtaaaggtttggaatttgaagctgtagtcttacttggactggaagattattcttatttccgatatggaatgacccaaaaaaaattggatgaggagcgttccacagtttttgtcgcattgtctagagccaagtcaaaactattaatatcgagtgcaatgagtcggaaacatacaggtccatccaagtttatgcatgttaatagtattataaatgacttaactaagttcggtatgaatagatcacgtgttgataagttagacactttgaagatatga

SEQ ID NO: 72342 - DNA, 1449 bp, Mobiluncus curtisii ATCC 43063
atgcagcaactgtattacagcatcagcaattctgattttcgggatgcagagcaacctctttttattgaagcgaaactaacaaaccttaacagtgacgaactctcctttttcccagatgaagtagacgtccaagacaactccctgacgattcgattggaagcaaatctcaacggcgaggatctcaccattagccgcttcttcccatatggggttggtaatgcccctttaagctcagcacaacttaaaatcaccggatggaatatggtcccatccgacttttcgacgaaaacgctcgccccaggccggaggaacatcgtcgatgattaccttaaagaaatcgatgcatcgggcgatcaggttaagttgggggaagcgatagacgcgcttggcagcgccattaatgactccaacgcctttaccggcgctttgagctccttggcctctaagctcaatccggcgctagagggtggagtgacaaccgaaaatctccgattcgtcccaggggcagcaatcgaggggaatcttttaagcgatgtgcggcttgagatgaaggataagtctggctctatgcgggaggtaaccgagcagtcagatggcacgaaggctctaatctcgtttgcaatatttggactgattaattcgaacgggattatcgcgattgatgagcctgaaactcatcttcatccgtctgcgcagcgaaatttgatgcaggtactgcagtcttcggataggcagctaataattgctacgcattccggtgttgttgcgagcgagtttagcccggacaacattgcggcaatgcgagaatccatgcctcccgctcagccaaagagtggattcctcgaagggcaagaggaccagaaaatgcttgccagatggtggattagcagccgaattgagttgctaacagctaggaatatcattgccgtagaaggtcagtcggacagaatggtagtagaacgggttgccgagttagtcggaaatcacttgaaaagagatggtattgagattctcgaggcaggtagttgcaatgaaatgccgtacgttatggacatttttggcgccaatgggtttggaaagcaagtaagtattctgattgatgaagacgctgaaaataagacagccagcgcactcagtattgcactcaaagatctcgcttcaaaatccgtgttcgtatcgagagtcgatctcgaagacgagtatgtggcggctattggatccagctcactttgggaagcgctcggcaaatctaacctgtttcctccaaacaggctgaaatgctgccgtattgccagaggagccagtctgccaagcgcaaccgaattggcaaccttctgcaggaggaagagaaacaaaatcgcttgcgctatagtcgcgtgcagcctcatggatggtacttctgcttcaaggttatccagcgttgtagagatgcttaataatgccgtctag

SEQ ID NO: 72343 - DNA, 1707 bp, Mobiluncus curtisii ATCC 43063
atgccgtctagcacgaatccagcaactcaagagcagcaagaaatctacgattacgaagcgttcgacatggttatcacctctccggcggggtgcggcaaaacagaagctcttgcatatagggctaaagggcttctcgaacgattcgatttctccggaaacggcaggaagcttctcattgtcgcattcacgaatcaggcgcgggacaatattactgaacgactagcaaagtacatcagcgttcaagcattgaagcggcacgttactgtgtgcaactttcacggcttggcgtcaagaataattaaggcgcatggaaacgttgttggcatcgacgacacttgggaagtcgcgagtttcgattggacgaggaaagtcgttcagaaactgaattgcgacaaagagacaagaacgcaagtggaaaatgccctgaggactgcaaagctcacttgtctgtctgacgatggggttatggaagcgctccaggcggaaagtggccagattgggcggctggcgacatcaattgaatacagtcgtcgcgagcgaaagattgttacatacgatgatcagataagaaccgcattatggatactgcaagacgagagggtcgcacggttgtacgaaaatcacttctttgcggcactcgtcgacgagtttcaggatttgacacctcagcaattgaagcttgtcaaagcgctgtgcggaaataacatttcgtatgcaggagaccttgcgcaaagtattttttcgtttgcgggtgcggatgcgagctttacgtatcgggaaatctccaagagttgtggcaagcaagtcaaattgatcaaatcatttcggtcagcaccagcagtactagatgcagtcaactcgctttccacgctaactgatagcgagaacctatctactgctatgcccttccattggggtgatggcgggctttcgggctattcgtgttttaggtctgaggaagatgaagccagatgggtagtggccatgtcacaggcaattttgtggcactgtccaaatcaacgagttggtattgtgaccaggacgggtttccgatcaaatgctattaagcatattcttgcgtcggagaaaattggttataccgactggggaaacgggctatttagacctgaggtggcaaagaccctacgaaacatttgtgacgatatggaaggcaaatcctttgatggcacgctggaaatctatcggtacataatggagcaggccgctcaagctcaagggggattgcccgaggaactcgaagaggcgagcgcgtggctttttgatcagattttgcagcacaaaaatggcctttctgtaatacctgagatcaggcggtgcatcgccgaaagaaaaggcaatgagacgatggcaacacgtgtcggtatacattgcctcacaggacacgccgggaaaggccagcaattcgactgggtattcattgttggtcttgagcagggatcgataccgttctacaaggcaggcacaaaggaagagttaaaggaagaggcgaggattctttcggtaatgatttctcgcgcgagaatcggattcgtggctacttcgaccttaatcagcccctataactactctcgagaaccttcaaaattccttccttatcttcaaaagaatccgagtttcctcaacaataaagatcggatcgaggaatggtgtgctgctgcagactgggcaaccattgctcagatgtaa

SEQ ID NO: 72344 - DNA, 2136 bp, Erwinia billingiae Eb661
atgtatctaaaaagtttagttattcataattttaggaaatttagcaattctaataataaagtctgtttcgttaaagctgggaaaacctcacctgaacaatcaccagttgctgcgtcaacaacagtagtcattggaaaaaacaactcaggtaaaacaacgataacaaactccttagcattattatgttcagatacagataaattaaacggaaatgactttaaccataattatttgaggcggattctttctgcatttcttgcgtcagatttttcaatatacccggaaataaaattcgaaatggagttcatcctagatgatataaataatgatagcactagtaatttctcaccattcatagatgtatcatcattgagtagtatcccaagagatgataccaaagatacaacagcatatataatgataatctttaaaatttatgatgaggaaatttttcgggatgcagtggatgatttaattaaagaaaaaaaagacagtggttacaatgataatgagttttttagacgttttttagatttgatatcagagacggaatttaaaagagtcattaagaatatagataataaattaattgataaggccaaggtgaaaaacctgatcgaccttcggatcattaaggttgcgaataatattcatgaccaaaggctactagcaaaatccttcaatagaattataaagttcatgtatgagaaaaataaagatgaactaaagagtattttgcatctggttgatgggaataaccacagccttactgaaaaaataaaagtaagtcatcaagataatgtcgaatcagttttaaacacaattattcttgatgaaagtctaggtattgaattaagagccaacttaactttcgatagattaatgggagatctcataacatatgagcaccgtgatggcgaaaatctaattcctgaaggtcaattcggattaggatatgcgaatcttataaatataattagtgaaataattgattattctaatagaagcttgcatgaagaaaaacagcttaaaatccagcttttatgcattgaggagcctgaggtttttatgcatcctcagatgcaagttaatttcattcgtcatattgaagaggctttgataaagatattaggactaaactctaaagacattagttcaattaaaagccaaattgtagttactactcactcctcacatatattgaatagtattattcatggaagcggaacattcaatgaaattaattacattaatagttcaaaaggaaatagtgagagtataattttgaacgataatgatctttgcgagggtggcaaggaatttgattactttaaatttattaaaaaacatgtaaaacaccaagttcctgagcttttcttttctgatgcaataattttagttgaaggaataactgaagaacgtgtcataaattattatattgatagaaacacgttcctaagtaaaggcaatatttcagttttcagaattgatggcgcgcacagaaaagtgtattcaaaccttctgaaaagaataaatattccaacattgataataacggacatagatttcaaacgggataactcccttttcaaacaagtgataatacaagatgatggctcggagattactactgaacattttccgcaaatggaattattggatgattcaatcgaaacaacaaactctaccttaactcatttcttaggaagcaaaaaagttataaatttccccgagcatcacatatctgataatatatatcttgcttaccagttggaaaaaatatctcttgatatacctgacggaaataaggcgagttattatgcaacttcattcgaagaagcgttgattctcaaaaattatagaaatgatttattaagaggtgttttactaaaagttgttggaaaggactatttagatattatttcagatgaaaaggaaaaacatcacattcttgcgatgaactcattcaagatacagaaaaaactatcagacagtaaaagtgcatttgctaacgccatcatttatgaattactaactagcgaagatgttaaaccagaattgccttcatacataataaatggattgtcgtggcttggaagtcaaaagcgtaaagttagaggaggtgactatgtatga

SEQ ID NO: 72345 - DNA, 903 bp, Erwinia billingiae Eb661
atgtatgaattagacgcagaaaaagaaaagacagagcatgaaataattgaaagtatttatcattcaattaatgaggaaaagtcattttatttccagtctggtgcaggtgctgggaaaacatatgcgttagttaaagccattaaatacgcagggcaattatgtgctattaagaaaaataattcatctagaaaaatactatgtataacatatactaacaacgccacaaatgaaatcgccgagcggttgccgtcctcagagcattattatgtttcaacgattcattattttatttgggatttattgaagaattataacaaagagttgattgagacccatgtttcattccttggggatgaaataaaaagattagagtatatagtttttcacgatcctgatttacataaatcatataaaaactttagaagcctttcaattgaagagctagattttttaattgaaaaaatacgcgaagataaaataaattactatgaagtcgcttttggccccgccgtgccgtattggagttatttagagtctgtgattggtatagacttgttaagagcaatcaagtccaacaaacaagatgtatacgatgcaataaagatattactgaccattaagaattataaaaactgtctggattcaataaagactggcgatcctaaatataaggatataacttacaaagccaatcaaaatattgaaatactacatctaagtgtgattgggcatgatacattacttaaatatgcaaaaatattattattaaaaaacataggtttgtctagagtggtaattgacgcttatccttatgttttcatcgatgagtgccaagatacaaacccagatatcattgattttttctctgagatttatacgtattcaaaaggttcaagtgactga

SEQ ID NO: 72346 - DNA, 1380 bp, Bacillus amyloliquefaciens DSM 7
ttgtcaatttatgaagcgagtataattgagaaatgttactttagtgatagcgattatactgataaagtcgaaattgacatttcaacttttcgaagactgtttaattttagatatattaatgcaggtagaccactcgatgatcagagtaatggtaactttaaaagtttaagtaaaaatatggttgagctcgcaactcatgatgaaaaactaggtgccctattagagaacttaccagaccaaatactaagtccaatacaagatacggagattattgataaggtaagagacacatcggtgaaaggtcttagcaatgcggttaaaacaattgctaaagcaagtggaggcaatacagggagtatgatccttgatatagatattaacgaaggcacaataacctctcttcttaatcaaataactaacactaaatatcaatatgaaggttatttcctcaatgaagcctcccaaggattaggttacagtaatatgatttatatactgctacagttggaaacatataaaagaaaaattgatccgctattagtcaacctatttgtggtagaagagcctgaatcacatatgcacccccaaatgcaacgaatctttgggaagtatttaaaagattactatcttcaaaaaaaaatacaggggttaataactactcattccggagaaatggtgcgcctaacggaaatgaaaaatttaagagtttcacgaccaatagatcagttagaaagtaaaatttacgatttttctatgtttaaaaaaggcttgagtggtgacaccactttggatacattttatgattggttttatgaaataggattttctgaaatagtttttgcagatagagtaattctatatgagggtgacacagaaaggttgcttataagaaagttattgactctagatatatatgaagaacttaaccaaaaatacatagcctatgttcaagttggcggagcatacgcacataaatatagtaaggtgataaattttctgaagataaaaactcttgttttaactgatctagattataaaaaagatgcaacaactgtagaagcagtaaaagagtctaaaacaacaaatgcaacaatcaacacctattatgatttatcaaaagaaataaagtctccaacaatacttgatttgtatgaatggaaagacaaaggtgagaataagattcttggaggattagtcctaattaattatcaaggaaaatctgaacaatatgctcggactttagaagaagctatgctctcaaaattttataatttgaatgtgttagaaaaaaagatggaagtttctggattgagaaaagaaatagcgataatcttaaatatactattccaaaccctgataaatctaaaaaagatgatttag

SEQ ID NO: 72347 - DNA, 1554 bp, Bacillus amyloliquefaciens DSM 7
ttggctgcaaaattagttgataatatttttctcattaatgctccagcaggtagtggcaaaacaactaaaataaaatcaatgattgtaaaccataagataaaacatccacttgataatatactttgtattacttacacaaagagagctgcagaagagcttaaaaagggactggatgaagaagggattcacataagcacaattcattcatttttacataaatttttaagaatctatttttgtaaaaatgaaatgatagatttatatatggagttatttggggatttaatcagagggaatattgagaacaaggaagagaaagaacatgtactagctagaaacaagaagtatatcgataagtttggttgtttaaccttagaagtgataaaaactaatataagttctatttattataatgaaacttcaaacaatcatctttacaaaggaggtttgtctcacgatagtttgctcatatttgcagaaaaggtattcgaaaagtttcctaaaatcaagaagagattaactcaaaagtatcaattgatttttatagatgagtaccaagactctgctcccagtgtattaaaaatgttttataaagcaggactaaatactagctcaaaactctattttcttggcgacaaaatgcaacaaatatataaaaactatgatgggtcatttgaaaaagaattaaaaactctaaataatgaaattaaattagatactaatcatcggtcaataccagatatcgtttctatattaaataatatatataatgataaggaattcaaacaaatctcatccgataaaaaccgagctaataaaccagaccatccaccaagagtagtattgtgtgataacattcaaaaaagaataaaaagggaacaattaatttatccgaatgctttattgttatttttattaaatcaacaaaggtttgattcgataggcgctggagaattttacagacaatttaatagattggatagatattcacaagtaaaccaactaaatgctagtgatgtcttatctgataatacaaatgaaaataaagatcctcttttaaagttgctttttatagtagataaaattctaagttattatgaggattttaatcttggcagtataattcaaacccttaaaaggaatcaaaaaatatttgatactagaattggtacaattactagtcatcaggataaagttaacttaaacaatctattaaaacaaatatatgatttttatcagaaagacagctcaatatatgaatttttaactttattaagaggctctagagttataaaagaggaatatatagataatatatctaatgaatatattggagtgttagcagttacattaaacgaattcaaggcactgtcaaactatttgaaagacccgaaagtttcgacacaacatggtgtaaaaggagagagtcataatactgttttcttcattgcggacgattcctttagaacaccgctggttcatatgtataaattcttaaaactatggactattacagaactatcgttagattcttctagaatccttttattatga

SEQ ID NO: 72348 - DNA, 1971 bp, Streptococcus gallolyticus subsp. gallolyticus ATCC BAA-2069
atggacagtttatatatatctagagtagttataaagaattacaggaactttaaggacttagatgttaatttgcaacacaagtcggtaatcgttggtgagaacaatgttggcaaaacaaattttatcaaggcattgcagctgattttagatccttcactttcagatgaagatagaatgctatctgaaagtgattttaatgattctcttaagaatcctatggagaataatcaagaaattttaatacagatttatattagcaattacagaagaaacgttgcaataatgacaatgttatctgatgcgactgtcttggatgctgaaggaaatgaagtgcttttattaagctataagtttttcccacatatagatgagtttggaaaaaaagaatatcaatatgaagtatatatgcgagatgatatgtctagaaaatttggttcgagagaaagaaagtatcttaatataaaagtaattaaggcactaagagatgtagaggcagatttgagaaacagcaaaaaatctccggtaaaaaagatgcttgatgattataaaatcagtaaagaagttcttgaaaatatagcaagtgaatataaagaatgcggtgatcgcgttttggatttagatgaaatcaatgatatgacaatgcatatcaatgaacgtttttcagaaatccttgggaatcatgactatgatatttcgttacaggcaatggaggtggatccaacaagggtattaggatcgctgaaaatgttgatggcaaatcgctctgtatcggattcaagcttggggctagataatattttatatatttcgttggttcttcagatgctaaaagataaaacagttccaacttttgtttctggttcagaatatagtgaactattaacaaaggaaaatagcgaaataatagatgaatgctatatttccaatgcaggtgaaaattatgttttaagaactgatttaaatgaagagaactatgcttcattgtatacatttatggcagacaatggacatggaaacaatgcagttactttgctggctatcgaggaacctgaagcacatcttcatccagtttatcagaggttaatctataaagatgttattaatcgaaacggatttcctattcttcttactacacattcaacacatattacttctgtagtaccaattaagtcattggtacacttgcatcaagaagcagggaacacagttgctcattctacagcaagcatgcctatgttggaaggggaatttttggatgttgaacgatatctcgatgttaaacgtggtgaaatatttttaggaaaaggtgtgatactcgtcgaaggtatagcagaggaatacattattccaaaacttgctgaattattaggtaaaccgttggatgagaaggggatagtagtttgtaatattaattgtacgaattttaaaccatatatgaagatgcttaattctcttagtataccgtatgcagttataacggatggtgacttctatattgaaaatgttgacgatagagatgattcaaatagaaattatcatgtgatggagaaagatgtaaaggataatgatacctgcggatcccttggaagggaaaacgctattaaaacattcgaagcgttggatgatagtgtgccggaaaatgttgatttagctttatatttttcagaacgaggatattttattggtaaatacacgtttgaggtagatatgatggaatgcacgtctactgaagctggtgaaagggcttttactgatacatttgatcagttagtcgagagtagtcgaaagcagaataactttaaaaacagattggagaatcaagattatgagttctgcttacgaagaattgaagatcagagtgttggtaaaggaagatttgcacagattttctcggggaaatgtgttactgataactgtccagattatgtaaaaaatgccattgaatatatttatgcgaaagtagatgaatga

SEQ ID NO: 72349 - DNA, 1830 bp, Streptococcus gallolyticus subsp. gallolyticus ATCC BAA-2069
atgagtacgacgacttatattgaaaaactaagtagaattgaaaaagatgaataccagaaggctgcctttgatagtcaaagtaatacagttgtattagctgggccaggaagtggaaaaacaacagttttgactttaaaagccatgcatttgctaaatggtgtaattgcagaaccgcgtggtttggcatgtcttacttatagtagagaggctgcaagagaatttacagagagattaaaagaattaggtttggtaaggggaaataatatatttcttggaacggtacattcattttgcctcacagagatactgggtaaattttgtgatgtatattcattaaatattccgacgccgataaaaattgcttctgaaaaacaaagagcaaaactatttgagatagcaaagaaaaatgttgggtgcaatgataagtattttaaaattgagagaatgaattgtacaagaatgcttagtatttctggagtaagtaatatttgtgttgatagagacgaaactgcagagataatagctaatgaatatgaaaaactattaaaccaggccggtgttattgactatgaaacaattattattgagtctacaaagctattacaggaaaaaccttatgttagagagtgtatatctgcgaaatatccgtggcttttaattgatgaatatcaggatttggggcgaccgcttcatgaaatggttctcacacttatagacaatacaaaaataaaattctttgcagttggtgatccagatcaatctatatatggatttcagggagcagtacctgattatttaattgaattagctgatagacctgatgttcagaaaataactttattgaacaactatagaagcaatcaagacattattgacggttcagaacttgtgttaaatcaacagcgtggttatgttgcgaaaacacgagaaaatgaagatgctgtttataaatttattgaagtaaatgaagagttggatgaccagattgaatattttgttaaaaggatcgttccaggacttgtaaaaaacggcattccctatgaggagatagcagttcttgttgggaataattcggaatgcaatagtattgcattaagatgccagaaagagaatatcccatactatatcgtaaagcatcaatttaatcggagcgattttgtaaaatgggtagaaaactgtgcttcgtggattgaaggagataaagatattgttttttcggatataggtgacttttggatatcgttgataacagtaaatggcgcaatgtatttgacagatgaagaaaaactaattatcagagagcgactgtataaggttcttgtggaaagcaaagattatgaaaaatcactgacgaaatggtttgaatatgtaaggaaagagctatgttttgataagtatcttgaacaaaatacgtatttccaggatgaaaaagataatattgataatctgatgaaagaaatgtctggtagtgaatataaggaatatggaatagataagttttctaaaatcgggaagcccgagaatcaaattgttatttctacaagacatagttcaaaaggattagaatttgaggcaatagtaatgatgggaatggaagaagatcattttccaagttattatgttaaaaacgacgccagattattagcagaggctaatcgtttgtgctttgtatgcgtaagccgagcaaaacgtgtgtgtattttaatgaaatcaagttattatacgattaaaactaaaaatggtccgtggcgaaaagagttcaaaccatcgatgtattggaatatattatactcaaaatatggtaatattaatacaaagaaacttcactaa

SEQ ID NO: 72350 - DNA, 2235 bp, Paracoccus denitrificans PD1222
atgaaacttagacgcattgaagtcttcaattttcgcaaattgcggcgcgcccgtctggatatgtcggacaagcagacgctgctcgtcggggccaacaacagcggcaagacatcggccatgaaggcgctgcgcaaattccttaaggatcgcggcggtatcgacacgcgtgatgtaacagcctcaaactgggccgcaattgaacagatcgcgggagcctggacacaggaggtcgaggtggatctcagcccgctcctggcccagcttccgttcattgacgtctggctccatgctgacacgtcagaactgcaccatgtcgcgcacctaatcccaacactgacctggactggtggcttgctgggcgtgcgcctacgcttggagccaaagaggggggcggacatcaaggcgcagtacctggccgcacgagaggccgctcagacgctgcaacccggcggcgcaacggccaaagggttcgcgctttggccacgtgactttcgagaatttctagacaagcgcctaagggacctattcgagcttaacgcccatattctggatcccatgagcttcaccacgacagggccggttgagccgcaggccctgccggccttgtcggaggggatcggttcgaacccctttgctggactcatccacattcgtgagatcaacgcgcaacgcggtttcgcagacgcaggggacagtaatggcgatgacgatgaaccgacgaacgcaactagccgcaagattgccagccagattcagccctatttccgtaaacatatcgaccccgaaaaggaccccacgccgaacgacgtcaaagcgctcgaggcaatccatgatgccgaaaccacctttaatgcccggctcaaggatggtttcgctgatgctataaaggaactggaaagtctcggctatcccggtgggctgaacaatccgaaactcttcatagccacgcagatcaaacccgtcgatgggctcgatcacccggctgcggtgcaatacgatatctcgggcgacacatctggggtgaagttgcctgaaagctacaacggcctcggcttccagaaccttatctccatggtgtttcagctaatgcgtttccgggatgactggatgcaagtaggcaagttcaaatcgcagttagtgaccccagacgacaagggtatcgaacctctgcagctggtgctaatcgaggaaccggaggcgcatctgcatgttcaggtacagcaggtctttatggctagggcccacaaggtgctgcgcaaccataaagatctggagaaggagggctcggcctttaccactcagctggtcgtgagcacccattcgggccatattgcacatgcagccgcgtttgaggagctgcgttacttcaagcgggagctgccaagtcaaggagttgtgcccacggccagtgtggcgaatatgactgggctctttggtgcggacaacgaaacccatcgcttcgtgacgcgctatctgctgagcacacattttgatctattctttgccgacgccatcatcgtaatcgagggtgctgcggagcggattctgctgccgcatctgatccaacatcactaccccgatttggctgcagcctatctatcctttttagagcttgggggcagtcacgcgcataggctgcggcctctgatcgaggcgctggaggtgccgacgctgatcatcaccgatctcgacgcggtggcagaggtcgacaaaggcgggaagatcgttaaagagtcggtccagccttgctgcggggctgctcaaaccacagccaaccacgtgctaaagacctggctccccaagctggcagagattgatgagttggtaggctctccccccacggctctatgtcacacggcccctgaccgccctatcgccgtcagctatcaaaccccgcaaaaagtgacacttggctcggtgtccacgagcgtcacgcccagtaccttcgaggatgctctggtcctgactaacccgaaagccgtgacggacgccgcaggaacagggttctcctgcctcatgacccgtgcctttgccaaatccattgctgaggctcaggcccctgaagacctcgccaaggcgctctttgaaaggttggcaaaaaaaccggaaaaggccgccttcgcactggatcttctgtacatcaaagatatcaaagtgttgcgcgcgccgccctatatcaacaccggccttacctggctcgcgggccaactgaagggcgtggagggcgcagcgtga

SEQ ID NO: 72351 - DNA, 1953 bp, Paracoccus denitrificans PD1222
gtgacagacgtgaccgacgccacccgcgacgcgggcgctgacgcgacgattcgcgcgtgcctgtcccttgatcagccgcgcagcttctttctctttgccggggcgggatctggaaagacgcgatctctcaaggaggcacttgagggattggacacacagaccctgaccaccttgcgcaaacacagccgcaagatcgccgtcatcacctatactaacgccgccgcagatgagatcacacgccgcgtcaaggccgatccggtgtttcaggtacagaccatccacagcttcgcttggtcgctcattgaggggcgcacggcggatattcggggctggctagagagcaacctgcggacagaaattgccgagatccaggcagcccacgcgaagggccgtgcgggcaccgacgcccatgacaaacgcgagaagaagatggcctccaagacgaagcgtctggagcgcctggctgaaattcgcgccttcacctatgcacccgagggggacaatttcggccgcgatgcgctgcaacataccgaagtcattgcgctcgccgcgcatttcctgactgaaagcgagacgtttcagaacatcgttctggcgcgctacccgttcatcctaatcgatgagagtcaggacacgatgaaaccgctgatggaggcgctcttgaccttcgaggcgcgccatcgcggccgcatcgccctagggctgctcggggacacgatgcagcgtatttataccgatggtttgcgcgatcttgaccaacgagtgggggatttttcgcaaccggccaaacagatgaaccaccgcagccgcaagcggatcgtggacctggcgaattcgatccggcgcgacgatgatggccgccagcagcgggcgcgcgaagacaaaccgggtggcaccgtgcgtgtctttattgcgccaagcgacggcacagatcgcgcagtcttcgaggcctccgcccgtgcagaaatggcccgcatcaccggagattccgcgtggcagaacgcggaggcgatcaagaccctcacgatcgagcgtcacatggccgccgcacggcttggtttcagtgagttgtttgagcccctgagcaaacccgataagctcaaggacgggtttcgagacggcaccttacccgcgatgcggcttttcacccaccgggtcttgcctctggtgacggcacaaaggaatggggatgcctttgccgcgatggcagtgctgcgcgacggctcaccgctggtcgataagagaggtatccgggaggggggcggggggcaggccactggcctcgacgcggcgcgggcgggcgttgcggcgctgatgacgctatttaatgacgaaccagatccgagttgtgccgacgtgttggcagtcgtggccgagcaccggttgttcccgatccatgaccagcttcgggcctgtttgcctgacgacaatctggtggcccaggacatggccgatatccttgctgagcttgatcccttgtttgacgagctggacctcactacgcccgagggcacaccacccgctgaaaccaccatcactgaggcctggacgcaggcgcttgaggcccggttttcccaagtggcgcgctacctcgcctatgtcgaagaccgcagcccctatggcacccaccaaggggtcaaggggctcgaatttcctcgggtcatggtgatcgccgacgatgcacacacgcgcttcaaaggccttgcatcttacgagacgctgtttggtgtgaaacccttaggcccagccgcccagaaaaaggcggacaacggcgaggaaaccacgatcgagcgcacgcgccgcttgctctacgtcacctgtacccgcgcagaagagagtctcgcgcttgtgctctactccgaagcccccgacacgatccgaaggtttctgatctccaacgggtggatggccgaggacgagatcgtgatagctgcgactgacgggacccattaa

SEQ ID NO: 72352 - DNA, 2070 bp, Burkholderia cenocepacia HI2424
atgaagctgcgtcatgttcagataaagaacttccgtcttctctcggatgttgatcttgctttggaagatctcacgacagtcgttgtgggtcgcaacaacagcggcaagacgtcgctctctgaagtcatccgacggctactcgccgacggcagtgcacagtttcagcttgaagacttctccagcgcctgctatgagggctttcgtctagcttgggaggctcggagcaacgacgaacacgacgatatcgtccgggcgctcatcccctacatcgagctgcgactgactttccagtacgatccgaatcagccgcaattgggaccgctgagtccttttgttatcgacctcgaccctgactgcaccgaggcgcttgttgttgtccgctacgagctgaaagacggtcagctttcccagctttttgatggtttgccaccgacgccgttgtctgccgaagctcggttaacgttctttcgtacgttgcgcgatcgaataccaggcaattatgcgacgcgcatatgggcagaagaccccaatgacgctggaaaccagcgccagctccttcccaacgcagtgaagggtctggtcaaaacgggtttcatcaacgcgcaacgtggccttgacgacgtcacgtcacgagagtcggacgttcttgccaagactgtcgagcttcttttcgcaacggcgtcatcggcgtcggcagatgcggccgacaaacagatcgcagattccctgactgatgccgtccagggcattcaatcgcagattgatacaaacttcggcggacagctaaagggattgatccctgccttgaagagctttggctaccctggactaggtaatcaggagctgcataccgagacccttcttgatgtgcgaaagctgttgtccaatttcacgaaagtccgttacgccggctacagcggtgtcgcgttgcctgaatcgtacaacggcctcggtgcgcgcaatctgatcttcattctcttgcagttagccgggttctacaaagcctatcgcgccgaagcgacggccccaggcatccacctcattttcatcgaggagcccgaggcgcatctgcatccccagatgcaggaggtattcatccggcaactcgccaaaacggcccaattgctggtggacagtacagaagacaagaccccctggccggttcagttcgtcgtttctacgcattcgtcacacgtcgcaaacgaagcgggcttcgaaagtattcgttacttcctcggacgagatgtgtctggagcgcaacccggcgtccggcagacgatgatcaaggatctgcgcagagggctggatggcgtttctgagcctgacaagaaattccttcaccagtacatgacactgacgcgttgtgatctcttttttgcagacaaggccattctggttgaaggcttgagcgaacgtcttctattgccggtcctcgtcggaaaactcgaagaggctgagcccaactccccgaagttgtccagccagtacgtcaccacgatcgaagtgggtggcgcatacgcgcatttgttcttcaagcttctacacttcctcgagctccgcagtttgataatcaccgaccttgacgccgtggaaaaagcgggcggttcggcgtgcgaggtccacaaaggaacgtattcaagcaacgcttgcctgaaggcgtggttctcggatgacgacccgttcactctcgcgggacttttggccaagggcgaggccgagaaaataaaagagggcaatcgcatcgcctatcaatgtgcggaagcggaaggtggtccatgtggacggacgttcgaggacgccttcatcctctcaaatcgggcgctgtttgggctgacgggcaataccagggaagagttggaggttgccgctcgtagcaaggcaggagaattcaagaaatcggacttcgcgctcaggtatgccatcgaggagaaagggtggagtgctccgaagtatcttgtcgacggcgtgcgatggctagcggccggcatcgaacctgaccagtccgatcctgcgctggctttagcagcggacgttatcgttgcgaaggcggaggccgctcctcatggctga

SEQ ID NO: 72353 - DNA, 1737 bp, Burkholderia cenocepacia HI2424
atggctgatatccaatctccggccgagctggcgagtcaatgtgccctcgacgcaatgtttcaatgcctggatgaaggacggagtttccggctcgaagccggcgctggtgccggcaagacatattccctgatcaaggcgttgcagtatctcatcgagcgtaaccggcatggtttcccgaaaaagaatcagcagattgcgtgcattacattcacgaacgttgccagggacgagattgccgctcgtactgacaagagcccattggtgttctgcgagactaaccacgccttctgctggtccctgatcagaggtttccagaagcagctaaggtccttggtggaagcaatgccgcactggcaggagcgactggcagaagtcggcggcacgctcggcgcccgcatggtcgagtacagcctggggcaccgctcaattcgcgaggaccgtgtatcgatccaccatgacgatgtgctgcccctcacgatttccctgatggagcacctgaagttccgccggatggttgcggatcgctttcccatcatcctggtggacgaatatcaggacactgacagggattgggtcgaggcgatcaagcggctttttttaagcaatccggatggaccgctgttcggcttcttcggagatcactggcagaagatctatggcgatgggtgcggccggcttgagcacgagtccgtaacggaaatcggaaaggaggccaacttccgctcggtgaagacgatcgtggattgtcttaaccggatgcggcctgagttgcgccaggaagtcagggacccggattctgtgggccacgtgagcgtttttcataccaacgactgggtggggcaacgccgagccggaggacattgggccggcgaccttccggccgatgtcggtcatcaggcgcttgagcacgtcaaggagctcctggcacagcaaggatgggatcttgcgccggggagcacgaagatcctgatgttgacgcacaggctgctcgcaaccgagcagggctacaccagcctgccaaccgtttttcgctacaacgacgccttcaccaagaaagagcatccgcatattgcctatctcgtcgatgaactcgaaccggcctgcgacgcgtttgcggcaaaccggttcggagtgatgttcgaggcgctcggcgggacgacgccacttcttcgcagccatgcggacaaagcggcctggcacaatgcaatgacccgcgtcctggaacttcgcgcgacgggcacggttggagacgtgatcgatcatcttcttgatcaacgcaagccccggcttcctgacgcgatcgaaaagcgcgaacgcgaactacgcgacttcgatcggactgccggcgaagagatgccggaaaggcttgccgaagttgagcgactgcgcgctgttccctacgcggagatatcagcattgcgggcgtacctggacggtcattcaccctttgagaccaagcacggagtgaagggtgccgaattcgacaacgtcctggtcgttatcggtcggggatggaatcagtacaactttggcgagatgctcgggttggcggctggacaagcgattccggcagcgagggaggagtctttcgagcgcaaccgcaatctgttctatgtcgcgtgttctcgccccaaacggcgccttgcactgctattcacccagttactgtcgccggtggcgatgggcacgctggaacaatggttttcgcccgagagcgttcacgccgtcgtgctctga

SEQ ID NO: 72354 - DNA, 2244 bp, Leisingera sp. ANG1
atgaaacttacacgcattgaaatcttcaatttccgcaaattgcggaacgcccgtctggacatgtcggataagcagacgttgttcgtcggggccaacaacagcggcaagacatcggccatgaaggcgctgcgcaaattcctcaaggatcgcggcggcatcgacacgcgcgatgttacagcctccaactgggccgcgatcgaacaaaccgcgagcgcctggacacaggaggccgaggcggatctcagcccgctcttggctcagcttccgttcctcgacgtctggctccatgctgacacgtcagagctgcaccatgtcgcgcatttgatcccaacacttacctggactggcggtctgctgggagtacgcctgcgcatggagccaaagaagggggccgacatcaaggctcagtacctagccgcgcgagaggccgctcaggcgctacaacccgacggcgcaacggccgacggattcgcgctttggccacgcgactttcgggaatttctggacaaacgcctgaaggacctattcgagctcaacgcacatcttttggaccctgcgagcttcacaacgacagagccggtggagccacatcccctgccgcccttgtcggaggggatcggtgcgaacccatttgctggcctcatccacattcgtgagatcaacgcgcaacgcggtttcgaagatgcgggagacagtaagggcggcgacgatgagccaacaaaccgaaccagccggaagatcgccagccagatacagccctatttccgcaaacatatcgaccccgaaacggaccccacgccgaacgacattaaagcgctcaaggccatccatgatgccgaaaccaccttcaatgcccgtctcaaggatggcttcgccgatgccatcaaggaactggaaaatcttggctaccccggcggactcaacaatccaaaactcttcattgccacgcagatcaaacccgttgacgggctcgatcacccagcggctgtgcaatacgatatatcgggcgacgcatccggggtgaagttgccggaaagctataacggtctgggcttccagaacctaatctccatggtgttccagctgatgcgcttccgggatgactggatgcaggtaggcaagttcaaatcccaagtggtgagcgcggacgacaggggcatcgaacccctgcaactggtgctgatcgaggagccggaggcgcatctgcatgttcaagtgcagcaggtcttcatggccagagcctacaaggtgctccgcgaccatgatgatcttagggagaagggatcggcttttaccacgcagctggtcgtgagtacacattcgggccatatcgcgcacgctgcctcgtttgaggaactgcgttatttcaagcgcgagctgccaagtcccggagttgtacccacggccactgtggcgaatatgacggggctcttcggagaggatacagaaacccgtcgtttcgtgacgcgctatctgctgagcacacattttgacctattcttcgccgacgccatcatcgtgatcgagggtgccgcagaacgaatcctgctgccgcatctgatccagcatcactaccctaatttggctgcggcctatctctctttcctggaattggggggcagccacgcgcaccggatgaagcctctgatcgaggcactggagctaccgacgctgattatcaccgatcttgacgcggtggtggaggtcaacaagggcggtaaggttgtcaaacaatcggcccagccttgctacggggccgctcagaccacctcgaaccacgtgctaaagacctggctccccgggctagcagagatcgacacgcttttggctcctccactcaaggccctgtgtcacacggcctccgaccgccccatcgccgtcagttaccagacactgcaaagcgttacccttggctcggtgtccaagaacatcacgcccagcaccttcgaggatgctcttgcgctgaccaacccgaaactcgtaaaggacgccgcgaaggcggaactgtcctgccgcatgacccgtgactttgccaagttcatcgctgccgagtccacgccagaggacctcgccaccgcgctctttgatcggttggcaaaaaaaccggagaaggccgccttcgcgctggacctcctttatatcgaggacatcaaagcacttcgagcgccgccctatatcgacactggcctgacttggcttgcgcgccagctgaaggacggagggggtgcgatatggtgggcgtga

SEQ ID NO: 72355 - DNA, 1950 bp, Leisingera sp. ANG1
atggtgggcgtgaccgacgacacccgcgacgctggcgctgacgcgacgatccgcgcgtgcctgtccctcgatcagccgcgcagcttctttctctttgccggggcgggatcgggcaagacgcgctctctcaaggacgcactggaagggttggacacacagaccctgaccaccttgcgcaaacattgccgcaagatcgccgttatcacctataccaacgccgccgcagatgagatcacgcgccgcgtcaaggccgatccggtgtttcaggtgcagaccatccacagcttcgcttggtcgctcatcgagggacgcacggcggatattaggggctggctggagagccgcttgcagacagagatcgccgagatccaggcagcccatgcaaagggccgggcgggcaccgacgcccatgacaaacgcgtcaagaagatggcctccaagacaaagcggctggagcacctggccgagatccgcgccttcacctacgcgcccgtgggggacaatttcggccgcgacgcgctgcaacataccgaggtcatcgcgctcgccgcgcatttcctgactgaaagcgagacattccagaacatcgttctggcgcgctacccgttcatcctgatcgacgagagccaggacacgatgaaaccattgatggaggcgcttttgaccttcgaggcgcgccatcgcggccgcatcgccctagggttgctcggggacacgatgcagcgcatttacactgatggtttgcgcgatctcgaccaaagggtgggggatttcgcgcaacccgccaaacagatgaaccatcgcagccgcgcgcgggtcgtggacttggcgaatgcgatccggcgcgacgatgatggccgccagcagcgtgcgcgcgaagacaaaccgggtggcaccgtgcgcgtctttcttgcgccaagcgagggcacggatcgcgcggcatttgaagcttggacccgggcggaaatgacccgcatcaccgaagaccgcgcatggcaggacgcggaggcgatcaagaccctgacgatcgagcgtcacatggctgccgcacgtcttggctttagtgagctgtttgagcccctgagcaaacccgacaagctcaaggacgggtttcgcgatggcaccttgcccgcgatgcggcttttcacccaccgggtcttgcctttggtgacggcacaaaggaatggggatgcctttgccgctatggcggtgctgcgcgacggctcaccgctggtcgataagagaggtatccgggcggggcacgcggaccaagcctctggcctcgacgcggcgcgggcgggtgtcgcggcgctgatgacactatttatggacgaacgggatccgagttgtgccgaagtgttagcggtggtggccgagcaccggctgttcccgatcccagatcagtttcggccctgtttgcctgacaacagtcccgtggcccaggacatggccgacattcttgccgagcttggtcccacttttgacgagcagggcctgactacgcccgaggacacacctcccatagcaaccaccatcaccgaggcctggacgcaggcacttgccgccccgttttcccaagtggcgcgctacctcgcctatgttgaagaccgcagcccttatggcacccaccaaggagtcaaggggctcgaattcccccgggttatggtggtcgccgacgacgcccacacgcgcttcaaaggccttgcctcctacgagacgctgttcgaggtgaagcccctaggcccaaccgcgcagaaacaggcggacaagggggaggaaaccacgatcgagcgtacacgccgtttgctgtacgtcacctgcacgcgggcggaagagagcctcgcgcttgtgctctattccgaggcccccgatacaatccgccacttcttgatttccaacggatggatgtccgaggacgaggtcgtgatggctgcgcccggcgggacctag

SEQ ID NO: 72356 - DNA, 2172 bp, Bacillus amyloliquefaciens LL3
gtggggagccttatcataagtgagtggggttttataaaatcggaaattcatctgggggttcttaaattgcttttaaaaggtgttactatacaaaattataggaagtttaaaaacgaagcattttcaatggctgacgacgttaccttgcttgcaggtgctaataatagtggtaagacttctatgattaatttaattggatctataatgcaaaatggcaaaacgccattttttatttcggatataccagtaaggctatcaaaacaatgggtagatgaagtttatgagacctttatactgtgctttaaggaaggcgatgatcaattatctacagtagagagaattataaacaagctatttagtactgaattgtttaatttagaatgtgatctaataatacctgcaacatctatacgttttagaatagattatagtgaagaggacgatattagaaagtttgccgattttattatggatttgaatccggataataaaagcttctattttgaatattcatttcaacctacttatgtatcctttggacaagcattggaggaaaattataaaaaattatatgcaagatataaaaaaattcattcctcaaaagatccaacattaaaaatacgacaatttaaagaggtaatattgtcaatttatgaagcgagtataattgagaaatgttactttagtgatagcgattatactgataaagtcgaaattgacatttcaacttttcgaagactgtttaattttagatatattaatgcaggtagaccactcgatgatcagagtaatggtaactttaaaagtttaagtaaaaatatggttgagctcgcaactcatgatgaaaaactaggtgccctattagagaacttaccagaccaaatactaagtccaatacaagatacggagattattgataaggtaagagacacatcggtgaaaggtcttagcaatgcggttaaaacaattgctaaagcaagtggaggcaatacagggagtatgatccttgatatagatattaacgaaggcacaataacctctcttcttaatcaaataactaacactaaatatcaatatgaaggttatttcctcaatgaagcctcccaaggattaggttacagtaatatgatttatatactgctacagttggaaacatataaaagaaaaattgatccgctattagtcaacctatttgtggtagaagagcctgaatcacatatgcacccccaaatgcaacgaatctttgggaagtatttaaaagattactatcttcaaaaaaaaatacaggggttaataactactcattccggagaaatggtgcgcctaacggaaatgaaaaatttaagagtttcacgaccaatagatcagttagaaagtaaaatttacgatttttctatgtttaaaaaaggcttgagtggtgacaccactttggatacattttatgattggttttatgaaataggattttctgaaatagtttttgcagatagagtaattctatatgagggtgacacagaaaggttgcttataagaaagttattgactctagatatatatgaagaacttaaccaaaaatacatagcctatgttcaagttggcggagcatacgcacataaatatagtaaggtgataaattttctgaagataaaaactcttgttttaactgatctagattataaaaaagatgcaacaactgtagaagcagtaaaagagtctaaaacaacaaatgcaacaatcaacacctattatgatttatcaaaagaaataaagtctccaacaatacttgatttgtatgaatggaaagacaaaggtgagaataagattcttggaggattagtcctaattaattatcaaggaaaatctgaacaatatgctcggactttagaagaagctatgctctcaaaattttataatttgaatgtgttagaaaaaaaagatagaagtttctggattgagaaaagaaatagcgataatcttaaatatactattccaaaccctgataaatctaaaaaagatgatttagataaagatgaaaaatacagtattagagatattgttagacattcagagaataataaaactgattttatgtactcagttattttaaatggtctaatagaaaagatgcttcctaattatattaaggagggattagattggctgcaaaattag

SEQ ID NO: 72357 - DNA, 840 bp, Bacillus amyloliquefaciens LL3
ttggctgcaaaattagttgataatatttttctcattaatgctccagcaggtagtggcaaaacaactaaaataaaatcaatgattgtaaaccataagataaaacatccacttgataatatactttgtattacttacacaaagagagctgcagaagagcttaaaaagggactggatgaagaagggattcacataagcacaattcattcatttttacataaatttttaagaatctatttttgtaaaaatgaaatgatagatttatatatggagttatttggggatttaatcagagggaatattgagaacaaggaagagaaagaacatgtactagctagaaacaagaagtatatcgataagtttggttgtttaaccttagaagtgataaaaactaatataagttctatttattataatgaaacttcaaacaatcatctttacaaaggaggtttgtctcacgatagtttgctcatatttgcagaaaaggtattcgaaaagtttcctaaaatcaagaagagattaactcaaaagtatcaattgatttttatagatgagtaccaagactctgctcccagtgtattaaaaatgttttataaagcaggactaaatactagctcaaaactctattttcttggcgacaaaatgcaacaaatatataaaaactatgatgggtcatttgaaaaagaattaaaaactctaaataatgaaattaaattagatactaatcatcggtcaataccagatatcgtttctatattaaataatatatataatgataaggaattcaaacaaatctcatccgataaaaaccgagctaataaaccagaccatcaccaagagtag

SEQ ID NO: 72358 - DNA, 1842 bp, Methanosaeta concilii GP6
atgtatttaagcaaaatcagcgtgcacaactttcgaaatttagagtcgctggaagcaaatctttctccaggcctcaatgttatagtaggagaaaataatgttgggaagacaaatctcttggatgcactacgtgttgcattaggttctgcatggaataattcggagccgattcatctttcaaaagaagatcttcatcgtagctctgatggcaatatgatagataaatcgataatagtagatttaatattttcagagctttcagaagaagaacaagctcagtttttagaaatactgaattataatcctaaatttcccgaaaaatcaaccgctagcatccactttgagtggtcatggaatgaaactaatgaccgtggatattatcgacgttgggggggcgaaaggtcaaattcagaaacatcgatctcagaggatatactacaaatgctctcaataacactactcggtgcattgagagatgcgtccagcggtctagcgcccggtagacaaaatcgtttaggacgtcttttaagagtatctgcaaatgcacacgataaagctcaattggaggaagtaatctctaaagccaacaacgatttagaacagaatccatttgtaagaagtgctgaggaaaaaataagcatggctctagaaggtgcttctgggccggagttcaaacaagaagcaattatcagatcatccgagccagaatttgaccgaattgctaataatttacgcctagtgctgaagattagcgatttggatttggccacaggtaagccgataactcgggaactaagatcaaatgggttgggatataataatctaatttatattgctactgtgctcagcgaacttgaaactgtagcacaggctgcacttccacttctacttgtcgaagagcccgaggcgcatttacatccacaattacagatcttgcttataaatttccttctgaaacgcggtgcaggaagcagtgagactcatggcgtccaggtaattgtaactgctcactctccaacaatagcgtcatacgttcccatcgaaatactcagagttctccatagagatccttctggaaagctccgttgtatgtgcctacgtgaatgcggattaacgaaaaaagaggcttaccagctcagaagaatgttcgatgttacgagagctacacttctatttgcacggggaataattttagtcgaaggcgttacagaggctattcttattcccgcgctatccaggagattagacattaaacttgaggagaaagggatttccgtaatccctatttgcggtgtacaattttcaactattgctaaactatttggagaaaataaattaaaaatacctctttcaattataactgacggagatcctagtattcaatacgaaaatgatggcgaaaaaaattggaccaatgagattccaaaaaaagacgatgaagggaatatagaagtctgcgatagggtaatcaagctcttagccgaatttatagacaacccagttgcaagcgtatttccttcaaaagttacattggaatatgatttggctgatgccggtgagaaaaaccccgagatgatatgtcgggcctgggaaagttgttcgaatcggccgagaacttttaatctagacagacttaaggcatgtggtaatgatcatgagaagcgtgtacttgcagtttggcgcgggatctgtcgggctaatccaagcagtgggaaaggcgatctggctcaagagctagcagaaatgcttgaatccaatgatgagtatttcattgttcctgattatattaaacgcgccatctatcacgcaaccgggtgtccccatgaagacctgtgccgataa

SEQ ID NO: 72359 - DNA, 1797 bp, Methanosaeta concilii GP6
atgaagacctgtgccgataattttccaacgccggagcaaaaagctgtaattgacagcaattcacgcataacagttgttcgtgcgtgtcccggtagcggcaaaacacgtgtatttgtagagtccttgaaaatgcgtatcgattcgtggacaaagaaaaatgctggcatagcttcaatttcttttacgaatgtggctcaggagcaaattgctgaaggcatcggcaaacacctgccttaccctcactttatcggaacacttgatgcgtttgcgttaagatacgtcgttcgtccatttggtcaccttgtaggattacctaaagaaggccatcgtctcataccgtctcctttggatgaagcaattgaatatccggaagtagagattgactccagtggtcaaaaaattagtttattcagcatcagatttgcagatggcccactccataaaccaaacatgaaagcaaagacatttcgaggtcagattgatattgagcctgattatacatcgaatattttaaagaagaagaaagcagaatggagaaagcgaggcagaattactcactcagactgccaatatatatcttccttaattttgtgtcatccggaattcgggaaaaaagtctcggaactggttactcgtagatttcctatgatacttgttgatgaatttcaggacactaattggtttcttggacttgctttaatagaattattgcgttctcctttcctggagtctggattagttgtgggagatccagatcaagcaatttttgaattcggaggtgccaatcctgatctatttaaagatattgaaaatttacctggtgccaagtctttgcctttgaatcaaacacatcgttgcccgaagaagattgctgctatcgcaactgcactttccgataccggcaaacaagtcttgccaagagataacgcagatcaaggatcggcaataattttggtgcacgatatggaaaaaatagatagaaacaaaaaagttatagcgaatataagcaaattttgtgaagaagaagatcagctggctatcatatcgagacgcgaattaaccttaagaacttttttgggtgaatcaatctctagctttagaggggtttctcattcaggaaagaatatcgaaaacgctgtgcaaatgcttcgttctgaccaatcaaaagtcgcttcgcatatagtggaaagagaactcgcttggattctgtttaaaaatgattcaccttccatgaacgaccttcgtgatcttgatgttgatctaattaaatggcgaaggatcatttatcaaatacttaaagaagccagcatcgataagaaagatgagacatggaatgagtggctgttgagaataaggaagctaattctagattccgcgctcgatctcaattgcgaatttgataaaagaaggatttcggataatttgaagcaaaatctaaaaggtaatgtacttcgaaagatggctgaacacctggaatcaagtgatagtttaattgaaagggcaaccataaaaaccattcaccaagttaaaggcgacgagtttgaatgcgtcgttatattggtccctaaacccagccctaataattcgccttgtccttctgttgaatggtggccagatggtccttcagaagaacgccgcgttgcctttgtggccgcatctagagctaagaagactctaattctttgcattcatcgcgacacatataacgctttaagaacattgagatcagattttgtcgacaattttgagcaaatttttctattcgagagacaacattcattgatggaatttttatga

SEQ ID NO: 72360 - DNA, 2055 bp, Paenibacillus sp. HGF5
ttgaaactatctaaggtaaagatcaaaaactttcgctcttttggacaagaagaagttattcaaatcgatgaactagtagctttaatcggaagtaatagttgtggaaaaactacattcttaaacgctatgcttaaaatttttggtgaaacaagtaaggaaagagaagtaattcgttctgattttcatgtgccaccaagtgtgaacccagatactctacaaaatagtgaattctacattgaaacaatttttgagtttaatgaggtatttacacaaaatggtattgaaaaatatacggtacctagtttctttcagaatttcattatagaaccggacaacaaagcaccttacatacgaataagattagaagcttcgtggcaacgtagtaatcaaccagagggtattgtagacactaatgtttattttattacttctcctgataatacaccaatcaagacacaagataaaaggcctatatcccaatctcaactatctcaaattaaaataatatatgtccctgccttgcgtgatccatcggcccaattacgtatggttactggaacgttgttatggcggctaatccagcgtattaattttgataactcctttaaagttgaaataagccaaaagatgcaagctgtaaaagatatcttaagtcaacatcccggaattgcaaaagttaaagatgtaataaaagaacagtggaataactatcatgcagatgttcgatattctgatgttgatcttcactttaatacacaagacatagaaagtatattaaaaaaaatagatcccaacttttcacctacagaaactgaaaagaattataacgtagattcgttaggtgacggtttaaggtcacttttttatttgtctttggtgggggcactgctgaagacagaagaaattgcattacatgatataatgagtaatcctgataaaccaatcgacgaaagattgtttagtgttatacccccttgtttgacaattgtagcggtagaagaaccagaaaaccatgttgctccacatttacttggtaaaattattcacaatctacttaacatttcaagtaatagcaattctcaagtaatattatcctcccacagtccggccattattaaaagactagagccaactcagatcagacattttagatcttgcaagacaaataaatctactttagtaagaaatattcttttaccggcaaaagatgaagatgctttcaaatacgttaaagaagctgtaaaagcttatccagagatatacttctctagcttagttattctaggagaaggagatagtgaggaaattatattaccgaaagtaatggatctcattgatgtaaacatcaacgttaatgaaatctccgtggttccacttggaggtagacacgttaatcatttttggaaattactttaccaactcgatattcctttcatcactttattagatcttgatctcgaaagaggaggtggtggatgggggcgagtaaaatattgcattgatcaacttattaaaaacgggattgaaaaatctaagcttgtgagcagtgatgagcagctaaaacaaatgcttacttgggaccatgggagtacacatctacaatcatggatcgatatgctcgaaagctataatatatacttcagtgcaccacttgatatagattttttaatgttggaaagatttattaatgaatatattagcggattgagtcaaaatgagggaccagagatcattgttcaaggtgaaactaaaaaaatagcgagtttagttgaaagtgatctctctactcaagaatataacgatcgtttggctgcggatatagcttgtacattaaaagacgtgagtaaaaaaggtgtgctttactcagaagaacaaaaaaagttgatgatatggtatcgttatttattcctatatcgcggcaaaccttcaacgcacatgagagttctctctgaaacagatgatgatgttattaaggctaggcttcccgaaatatttattaaaatggccaacaagatcaaagaagaacttaatataaaggaacaatcaaatgtatag

SEQ ID NO: 72361 - DNA, 1887 bp, Paenibacillus sp. HGF5
atgtataggtatatgacaagtgatgattggacgccagctgataatatgtcttttgattcaactagtataagaataattaaatcagaagttaatacattgatttctgctggaccaggcgccggaaagactgaacttttggcacaaaaagcctcatttttgttaacaacgaacaaattaattttcccgagacaattacttgcacttagttataaagttgatgctgccaaaaatttagaggagagggtacatgtaagatgtggggaaaccctatccaaacgttttatttctcgtacttatgatgcttttgctaaattaatcgttgaccagttttgtaatttactaccaccagaacttaagccatcaattgattatgaaatcgggacaagtgaggatgtgaaacaagcttatatagccgctgggcatcgaagtatccttagagactcatatcgtttttatattaatacatatttagtacaatacaaacttccatttgtagatactgagtacggtgatattgctagaaaagttctacccattttgctaaaaggaaacgataacctacaaccaaaattaacatttccaataattgcgcgtctagcagaatatattgtgagaaacaatccttcagttagaagttctttacaacttacatttggtcatgtttttttagatgaattccaggatacacctgagcatcattatgatctgataaagagcgccttcagagatcagggaaatattctaactgctgttggagataaaaaacaacgtgtaatggtttgggcgggagccgctgacaatatatttgaacgttttacaagtgaatttaatgcagttaatgaaactcttttagtcaatcatcgatcagctccaaagcttgtttcaattcaacaaccaataattaaaagtatgactggtcaagatataataataacccctaatgatcgatggtctgctgaagatggaatatcagaggtttgggggttcgagaatgaaaaagaagaatctttggttgtaagtcagaaaatcaaagaactcattgagtatgagtcgttatcaccaaatgacatctgtattttaaccagaaaattacctgcaatatatactaaagaaataatggatatgttagaacgtaatcatattcatgcacgagtagaagaaaagtatcaaacgttattaaaggaagatgttatacagattatacaatctattatattgttagcattaccaatcaaagctcctgatgaatgggcatttataattaaggttttaaggcaactacatggttacaattcaaggacctccaatattgttcaacaaacacttgagagtaactttattagctacctaaaaacgctagagttaaaaatggcgagtataactaatgaaggcgaattgtaccttttagtcttagatatacttaactatctggatcgggaaagactaagaggattatacagacaatataataatgcatatttggatactctaattaaaaactatgtaaatctattgtggattgaatatgaaacttgtactgattgggtatattcgattgaaagatttaaaggaatgcattcaataccagtaatgtcaatccacaaaagcaaaggattagaatataaggtggtctttcttattggattggaggatgatgctttctttggagacaatattgatgaagagctttgcactttctttgttgccatatctagagcaatcgagcaattgtttataacaaaatgtgacaaacgtggtgttgagaaaaaaacgacgaataaagttaaaccattctttattttgtggaattcttctggaattggccaatttgtttctttcaagaatgaattcaataaaaaattcaatgaatactttggaattcaataa

SEQ ID NO: 72362 - DNA, 1953 bp, Streptomyces griseoaurantiacus M045
atgtatctgcggcagctcggcatcaagaacttccgatcgtgctacgacatcgaggtcgaatttcgatccggcatcacgctgctcgtgggcgagaacaactccggtaagtccaacgtcatcgaagcgctccggctggccacgacaccgctgaaccgccggtccacgcgctggttcgacgagtctgacctgtcacatggccgtgaaggccaggaagcccaattccgtgccacgtacgacggtctctcggcagcccagagggcccactacatcgctgcgcttgatgtagaaacgaacgaggccgcctacacgacgacgtacaagcgggatgagtcccgacagcagatgcgtccgacggtgacggcggggccggtggacggcccagatgccgagcccgacaagcgtgaccagattgcgcacgtctacctggcgccacttcgggatgcccagcgggaactcgactcctcggacggaaaccggctccttcggatcatccgctacctcactgaggaagacgagcaggaagagtttcgcgcgcaggccaacgactcgttcaccaagctcaaggaacatccggtcctgaccgctacgaccaaggagatccagggccacctgggtgagctgaccgactcggtccgcggacagaccgtcgaggtcaccttcgccgagtacgagctccaccgtttggcccggagcctgcgggtgaagatggccgaagccggcatcccaccggccgacctcaccgaatcgggtcttggctatgccaacctactcttcatcgcgacggtcatcctggagctgcgcaacgctcagcacatggagctgacgcttttcctcgtcgaggaacccgaggcccatcttcatcctcagctccaggccgtcttgctcgactatctgcaggaacaggccggggcttcactcaaagacgacacgcacggcccggccggtcgcatccaggtcgtggcgagcacgcactcaccgaacctggccagcagtgtcggcatcgagaacgtcgtggcgctgcgcacgcgggtggacaaggaggccgtccaggacgaccagggcaagcagaaggaggtccggcgccggaagacccaggccttgccgctggccaagatcgcgctctccgaagccgagcggcggaagatcaaccagtacctcgacgccacccgagccggcctgctgttcgcccgccgcgtcatcctcgtcgagggcatcgccgaagcagtcctattgccggtgatcgcccgccactgcgtcttcggcggcgacgatcaggcgaagcagcggcgcgacttccacggcgtcacgatcatcaacgttggcagcgtcgacttcgctccgtacatcacgttgcttttgtcggaggtgaacgggtgccggctgctggacaagctgaccgtcatcaccgaccgcgacccggatgtccccaaggagaagaaggccgaggagggggagagcgagggcggccagggcgagacccaggagccggcggttgtcccggccgaaggtgactccgctgaggagggcgtcgatccggaggaggacgagccggaagacgacgatgacgacaccgcggtgaacaaccgcaaggaccggctgactgcccacgccgaatcgatcggggcaaaggaccacctgtacgtggccgaggctccccacactcttgaggccgacctcctcacgcccaaggccaacgaaccggtgctcaaggcggccttcttgaagcagaagacgcgttccaagaagaagtggcaggccatcctcgacaacgagcgcgggccagcttggggcttctacctgaagcttcgcaagcacaagaggttcatcggcaagggcgagttcgcgcacgacgtggccctggcgatcgagagcggcgagaccttcgcagcacccgactacctgactgacgccatccagggcgtcctggcggacacatcgggtgaggcacgttga

SEQ ID NO: 72363 - DNA, 1773 bp, Streptomyces griseoaurantiacus M045
ttgaacgaactgaagctcaccgaggaccagcaagccctggtcgacgctgaggacagcctgttcgccgcggcctgccctggtgccggcaagacgcgtgccatggtcgcccgctacctgaagcggactgccgaggagcgtcgacgtgggatcgctctgatctccttcaccaacgccgccgtggacgaggtccgacgtcgctgcggcacccaggcggaggccttgcgggtgccccacttcgtcggcaccttcgacaccttcatccaccggttcatcgtcacgccgctgtacgtgaaagcttacggccggaagccgaactacttgcagtcctggacggacgtcagtgcgacgagctttcgtctcgtacctgacctgggcagggctaccgacctggagtttcgttggtttgacttcgagccggatgggcgcgctcatctggatctgaaccgggtgccgaatacgttcggtgatgtcgcagttcatcgtctcctggcgcggcgcaaacacgaggcggagaccaaggcatcgcacattttcggccgactcctcgaggccggaaccatcagctgcgaggctgcccgcctgctggcagcgttctggctcaacagtccgaaggagcgggtcctgctcaaggcgctgctgcgagctcgcttcgccgagatcatcgtggacgagacacaggactgcggcagggaagagctcgacatcctgcgcttccttcgtgactgcaaagtccgcgtggtcatggtgggcgaccttgatcagtcgatctacgagttccgcaacgcgactcccaccgcggtccaggagtttgccgccgacctgcccgtccagctccaacttgaagataactggcgcagttccccggccatctgcgccttcaacagcgggctaaggtccggccagctcgtcgagagggcccgtggagagcactccatagtccagaccccggtgcacctgatcgagttctcggctctcgaccagatcgttcccgcggcgctcgatgtcgccgagcagtacaagctggcggccgatgacctcgtgctcctgtcgcacgccgaggcccacgggatgaaagcagctggcgtgggcagtcaggagaacgccgggagcaaccgagtgctggcaattgcccatgccgggttcaagatcaagtctcaggagactgaccccaagactcgtaagaaggccatcgaccaggtgcagcgggccatcctgaagacccttaccgtcggtcgggacatagagcaccacggctttgctggcatctgcgaggagatcgaggtcgaccctcggtggctggacagcttcgcggtgcgcatgattctgagcctcgacgcgaaaggaaagagccgggcagacttcgctgccgaagtgcgtaacttcctcaagacggccgactggggaggtgggccggcgccgaccgccagcgatctcggcaagctgttcaaagcgccgtccgaggcagcttgggccagcgtcgccagcttcggcaacagcccctcgattcgatactccaccgtccacggcgtcaagggcatggagttccccggagttgtgctcgtcttgccggaaagactgcgggtggacaaggccaccgaacgaacggtcttggatgattgggaaggcgacttcaacaccgaggcccgacgtgtcctctacgtggccgggtcacgggcccaggagctgctggtgtgcgcggtgcatcgtaagcacacggaccgagttgcagctctactcgacgccaagggcgttccatacgtccgccgcccgtag

SEQ ID NO: 72364 - DNA, 2025 bp, Alicycliphilus denitrificans K601
atgaagctgtgcgagataggcatcaaaaacttccgtctgctgcaggacgcgcgcatgcggctggacacgacgggcatcacgacgatcctggtgggccccaacaacagcggcaagacctcgaccatcgaggccatgctggcgttcctacaaaggccgataaagcagctgtcgatcaacgacttctcccttggctgccgtgacgccttcaagaagttcgagacacacgtcctgacgccaccagcagcggcagccgcgggtgctccagcgactgagccgccgccattgcctgcgctgccggtcctgtcgctgcaactgaagttcgactacgacgacaccggtccggatctggcactcgcaggcgaactgctgatggacctggaggatgcgtccacgaccgtcaccgtcgagatccgattcgggcctgcaaacccccagcaactggcggaggcgtacatgaaagatcgtgacgatgaccagtccttcgccgactaccttgccgtcacgctgcacgaccactacaagctcgatcagttcaagctgagcccggacggcacccaagccgagaggctgcccgaccgcggcatcctgcagcggctgattcgaatcgatgtcgtcagtgcacagcgccacattgacgatcgtgaggagggcagtaaggccacgcggttgtctacgctgctccacgcccactacgagcgtcggtacaaggtcgacgcgcccagcgacttcaaggcgcttgagaagacgctgcgagagcagtccacagcgctcggtccccagtacgtcaaggcctttgatggcctcatgaagggcctcgcgaagttcggccaccccgagtcccccaaactgacggtccgcgccgagctcagcgccgatgggctcttcaaggacacgacgcgcgtctactacgccgccatcgccgctgcgggattgccggccgacggtgccgcggcggcgatcgatcaagccttcgagctgcctgaacgctacaacggtctcgggttcaagaacctgatctacatcgtcctgtgtttgaagtcgttccgtgaggacgtcgagtcagaccctgagcaccgtccgcgcgtgcacctggtggtcgtcgaggagccggaagtccacatgcatccccagatgcaggcggtgttcgtccagaaggtcagcgagttccttgcacccgcggccggcgagactggcgtgcagctgctgctcaccacgcactcgtcgcacatggcggccaactgcggcttcgcgccgattcgctacttccggcgcaataagggcacggtcgagatcaaggacttgctgtccttcgaggcttcggcgaagactgaccctgagaagaccgcgatggagttccttcggaagtacctcacgacgacgcgatgcgacatgttctttgccgacaagctcgtgttcatcgaaggacaggtcgagcgcatgctcttgcctcggctgatcgcggcactagaagccgcacttcgcgacaagctcacttcgacctatgtctgtacggtggaggtgggtggcgcgtatgcgcatctcttccgaaagctgatcgagttcctgcagctgccagcgctcgtgatcaccgatctggactcgatcgacggcaccaccaagaagaagacacctgtcgccagcggccacgcgagcagcaatgcgaccctgtcgaagtggctgccgggcagtgccgacctgcccaagctgatggcagctggtgaagcagagaagacctccggccgcgttcgagtcgcctaccaagtcgcggaggccgctggtcaaccttgtgcacggagcttcgaggaagccttcgtgtatgcgaattcggcatggctgctcgctaacaaggccaagctgctcgccaccggcgacaccttcacccatgcggacgccgcggctctgaccgctgacgcctatgcgatcagcctgccgaaggtcgacttcgcgcttgatcttctggccaacagcggctgggcaacacctaagtacatccgagaggggctcgaatggttggcgaagcagtaa

SEQ ID NO: 72365 - DNA, 1758 bp, Alicycliphilus denitrificans K601
atggttggcgaagcagtaaccgcggcacagccggagaagacggcggacgagcgcatcgccgattgcctcaccaacggccgaagcttcgtgctggacgccggtgctggggcgggcaagacttactctctggtcgagggcctcaagaagctgtgcgcaccacccatcgcggacaggctgaaacgggacgggcagcagatcgcctgcatcacctataccaacgtagccaaggaccaagtgatcgagcggattcaaggcaacagcctggtgcgggtctcgaccatccacgacttcctctggagcacgctgcagccccatcagcaggcactccgacaagcgctgctcgatttcaacggggcgctaccgccggcaagcgcgcgtcgagtcgatcaggctgaactgcgggcgaaggtggatggccggctcgaggtgaagtattcggaccgaggctccaagttcctcgacggtcggatctttcatgacgacctgctgtcgatcgcctgtattgcctatgccaggtacgacaagttggtgcggatcgtggcgagccgctacccctacatcttcgtcgatgagtaccaggacaccagcgcggcggttgtcgacatcctgcttcgccgaatcctgcccttggtcggtggcaaggtcgtgctgggattcttcggcgacaagatgcagaacatttatcaccacggtgagcacaaggggatcggcaccttgccggcggatctcgccgcgccgctggaagtgatcgtcaagcgtgagaaccgccgctgctccctcagcgtcatcaacgtactgaacaagatccggaccgacatcacacagatcccgggcaacatgaacgtacaaggcgatgccgcgtacatccgagtcgggggtgcggcggatgaagctggccttcagcgcgcacgagagctgctgactggcaccttggcctggaacctggttggccacggcaagcgtgagctctacctcacccacaggctgattgcccgcaaggccggtttcgctgaccttttgcaggcttttgcggatcgaggcggcttcgccaaagatgccctcaccgatggttccgatcggcggatcgccttctttctggagaaggtggagccgctggcgcaggcttgggagaagggacaaatcggcgagacgctcggcaggcttcatggcgcgggtcaccggcttgccagtcgcgccgcgaagtcaggcgtccgcgacgcgctgaacacgctgatcgacaagcgcggcgcgggcactgtcagggaggtgctggagacgattcgagatcgtcagctcttcccgctgaccgatgacctgagcatccgcctcgagaacaaccaacccatcctcaccgcggagatggatgaagccgcgcaagagcgagagcaggcggacgcgaagctgtacgcggcactcttggcgcttccctacgcgcaggtcgctgcattcgctcggttcttcatgaccaacacgcctttcgcaacgaagcatggggtgaagggtgacgagttcgagaccgtgttggtggtgctggacgattccggcgctgcgtggaacttctactcattcgacaagtacctgtccggagccgacgacgcggcgaacccagaacgtgcgaaccgctctcgcaatgtcttctacgtctgctgctctagggcgagacagaggctcgctgtgatcgacatgggcaaagcatccgcggcgaaaactgcgcggatgcaggcgctgttcggcgctgatcgttgctttgaggtgtag

SEQ ID NO: 72366 - DNA, 2190 bp, Staphylococcus aureus subsp. aureus T0131; identical to SEQ ID NO: 71904

SEQ ID NO: 72367 - DNA, 1794 bp, Staphylococcus aureus subsp. aureus T0131; identical to SEQ ID NO: 71697

SEQ ID NO: 72368 - DNA, 1986 bp, gamma proteobacterium IMCC1989
atgaaaataaaaagcgcccgcataaaaaattatcgattattgaaagacgtatgcctgagcctagatgatagaacgacactgattgtcgggcgaaacaacacaggtaagacttcgcttgctgaaatattccgtagcttcctaagctcaacggggccaaagattcgttatgaagatttcaatcagtcttgtttagctgagtttgaaaaagccctaaatgcttttaaggatgatcaagaaggcgaggctattcgcctattgatgccaacgattgagctagagctgcttatcgattataaagacgatgagagcgattttggtgctttgggatatttcataattgatcttgatgataccttgtttgaaacgtgtatattggtttcctatcagctgaaagacggaaagattaaagacttctttcaggcgctggatgcagctaaccgtaaaaagtatttttctgatctcaaatgcttgatcagccagttttatgagcccgtgatctatgcgatcgaaccgaccaatttaaacaataaagtcagactcgaattctcttcatttcaaaggttgatattgtcagggctgattaatgcccagcgcggtcttgatgatgaaacacacagtgaacgtgatgttcttggtaaatcactggggaatatttttaaaagtgcaagcagtgctggtgcgcctgaagcgtttaaagccaaatccgatgaagtcaatgcggtagtagaaaagctccaagagaaagtcgatacggattttcaggataaagtaaaatcgcttttgccaacacttaacatctttgggtatccagggctgcaagatccaaaattaagtgctgctacggagctaaatgtgaaatcactactggagagtaataccagagttttctatgaaggcgatgatcactttactctgccagaaacctacaatggtttgggtattcgtaatttaatttttattctctttcgaatctatgaatacttcagagagttccaatcacagcctatctcacctaaaggtcatttgatttttattgaagagcccgaagcccatctgcatccgcaaatgcaggaagtgtttattcgacagctcgaggaaatagtcggtgagtttcaaaagcagcttaatgatggaaatgtgtggccagtacagtttgtggtcagcacgcattcctcgcatattgccaacgaggcagattttagcaaagtccgttatttcttatccaagaatgggaaagaaaccaaggttaaagacattggcgaggcgtttggtagcgatgaggtaaaagcagacaaagaatttttacataagtatttaacgctgacaaaatgcgacctctattttgccgatagagcaattttaatcgaaggtgccacggaaaggattcttcttcctgagatgattaaaaaagtggacgaggaaaagaagtgcggcttgcgcaggaagtatatgtctgtagtcgaagtaggtggcgcctatgcccatcatttttataagttcatcgattttcttgaacttaaaactttgtttattacagatttggattcagtaaattcagagtcaaacaactcttcagtaattgttagtaagggcaatcgctctagtaacgtaggcatatctaaatggtttgggaaggatggatactctgttttatctgatgttcgctcaaaggatgaaaacgccaaaacttctggatgtcgtcgattagcgtttcaggtgaatgaaggtggactgtgcgggcgaagctttgaagatgcgtttattctggcgaataccagtctgttcgacctaacagatttgacagggctggagttggaaaatgctgtatttgaaaagtctaaaaaaataggtaaagacggtaaagcgaatttcgctattgagtatgctattgaaataacagattgggttgttcctaagtatatttgcgaaggactggaatggctggataaagacgttgcggtcatggctgaggaagctcagccatga

SEQ ID NO: 72369 - DNA, 1761 bp, gamma proteobacterium IMCC1989
atgaccaacataaatcctgccgaacgggcttctagcgaggcgctggaacagctcagaagctgtatcgataaaggcctgtgttttcgtttagaagctggtgcaggcgcaggtaaaacctattccttgattgagtcaattaggtatttgatatcgaaccgcgcagatgagctattaggtaatcgacagcagatagcatgtattacatacacaaacgtagcaaagaatgaaatcaagaatagaacggatcatcacccagtaattttcgccgatacaattcattcgttctgttggagcatactgcaacactaccaagttaagcttcgggagcatctgccagaacttggtgaaaaatggaaaaatcgaatagatgattcactaggtgttactaatcagaaggttaagtacgagttagggttccccgcagtcaatgaacgcgagattaccttacaccatgacgatgtggtcgcattaatggcgcgtatgctttcgtatccaaagtttcagaagctacttaaaagcaagttccctatagttttaatcgatgagtatcaggataccgatagtaatctggctgatagcattgttgcgaatcttatagataacaactctggcgtgatggttggtcttttcggcgatcactggcagaaaatttacggcagttcagcttgcggcttaatttcaagtaagaaaggaaaaatcatagagatcggaaagaaagcaaactttcggtcggatcgaaatatagttcagtgtttgaatagaatgcggccagacctcccccaagctgaatcagaccctagctcagatggaacgataaaagttttccattccaataactggtcgggtgtccggagagatggtaaaagcggtggccactggaaggatgatcttccagagagcaatgtgaaggaatatatcgaaaaaacgaaaggcttgatgtgcgtagatggatgggacatgtctcccgagaaaacgaaaatcttgtttttaaccaacaaccttatagctaatgagcaaaactttaagaatcttgctgattgctttcgatatactgatgactatctcaaaaaaaatgacaaatatgtccagttttttcttgaggtgatagaaccaactgcattctcctatgagcaatatcaatatggtgaattgttgcaaattaaaaagagaaaccatcctcaattaaagtgtcaggccgataaaacagaatggctgaatattctcgatagagtaatgcacgcgagagctaattctactattggtgatatgctgaaccttttgatggaaaccaaaatacctagaatgtcatcaaaaattgaggagtcagaaaaacgatataatcaacttgtatcaaagccgattgacgagcaggaagaggatgaagcgaagtttgtgaaaaagcttagtaggttgcgtttcgtagagtatcttgagctcgttaatctgggtgagtacatcgatgaaaaaacacctttctcaacgaagcatggagtgaaaggagcgcaatttgataatgttcttgtcgtttgtggtcgcggctggaatcaatacaactggaaccagatgttggaatggatggacggtagttatcccaaagacaagcaagatacattcgagagaaacagaaacctattttacgtaagctgttcacgagctaagcacaatctcactttgctgtttacgcaagagttatccgcaaagtcaattacggtgcttaatcggatgtttgataaagagaatatattaggaaatcccttctag

SEQ ID NO: 72370 - DNA, 1908 bp, Pusillimonas sp. T7-7
atgcagctaacgtcaattaaaattaaagatttccgctgcatcgaagatttgcatatcagcgtgaatgggaatgctgtaatcattggcgaaaataacgctggaaaaagcgctgttcttgatgcgataaaaatcgcgctggggcgtaaatggggtcggcaggggaacactggtttcaatgagtacgatttccgtttaggtgccctggacgaacatggccagccaacccccattcaagtgagcctaggtttttcggagaaaaaacctaacgaatggtcggaaaatatcagcgcagcccttttagaaatcaagaaagtgcaccccgtgacagaaatctcatctattgagatgcgagtcaagtgcgagtttcaatccatcacaaaatctgtggatccggagtggcaatttctaaatcctgaaggtaaaccctactcaggaagaggagccaggaatcaaaatctatcggagttctttcgttatgttccctgcttctcaatggctgctatgcgagatgcttccgtcgaatttggagggaaatcgagattctggggatcacttcttaaatccatcaacatcccagcggataagaccgctgagttggaatccgggttcgcctcattaaatgatgagttactaaaagcagatccgaagcttgaaaacatcaaaaacacattgcgttccattcaaaaggtaatcgctattggagcagtaggcaatgtggatgtgagagccgtcccaattaatttatgggacatcatcagtcgatcagaattgctgatacaaggaaaggacacggatccttggctgccgatatatagacatggcaatggtgttcagagtttggctgtaatttttctttttagggcttacgtcgataatattcttgccgactcttacacggccgacagcactccgatattaacgctggaagaacctgaagcgcatcttcacccccaagcctgcagggcgctgtgggatgctataagcaccctaccgggtcagaaaatcatcaccactcattccccatattttgtacaaaatgtgcctttgaaagatctcataattcttcgacgtggagacaacggaccgaccggccacagaattgagcaggaattctccgcagaaatacctgagtcagacgccttaagccgcgttgtagcgaaatacccggacattttgaactatgacgcaatattcaagacactcacatgtaaaggctatttagacacgggcatctatcgagagttgctgcgctgcttcacagagaacggcgcaaatgaaactcacttgaagttaaagcaccttaaaggacagagtatccgctacatcagcgattccgacatatccaagctggaaagctgggcaaagagaatccgaggtgagatatttttcgcacggaagtggattttgtgtgaagggcaggcggaatatgctgttcttggagcgatagcggagaaacttggaaagccattggattcttacgggattgcagtcatagattaccaaaacaacggttctccgggcgcttttgcctcactagccagatcactaggattcgaatgggcgatgatatgtgatggtgatgacggaggagactcccacatagcgcagctaagaaatcgaaatttcgaggaagcggaaatcagtcaacgcctagtccagcttcctagaggacttgacctagaaaaacttattgcatcaagcccattgcgaccattcatgctcgctgcggctcatgagctcgatgatagtattcaagacgacgacgcactgcttctgccctttgccgaagagcacaaagaagagttggcggtacgtttatctcgacaaatacggattaacgcaccttcggaatcaataccggtggagtttcggcagctatttatcaatctgggagaattaaatgagtga

SEQ ID NO: 72371 - DNA, 1920 bp, Pusillimonas sp. T7-7
atgagtgaaagcggcaaccgccttaataatttaatcgagagcctcactcccattcagcgacaagcctcggcttggaatgatggtgcttttctattgcttgccggccccgggtcaggaaaaacgcgagtgttgaccgctcgcattgctcggctattggtagaatctctggatgatcgctggagaattctggcactgacatttaccaatcgtgccgccgacgagatgcgcagccggataattgatatcgttcccgaagctgaagatagattattcattggtacattccactcctttgcgggggaaattttgcgccaaaatgggactctcttaggaataaaaacagactttcgaatttactcaactaccgctgaccgcatcgaacttctcgaacgagccatgatggaagcgggggtcgaacggagcttttctcccgagaaagttctagcagttcttgatcggctgcgtgacaggcttgtcgggcctgacgaatgcgaacgtctgttcgaaaacccagagcgtgcagcttcagtgtctaaaatttatgctgcttacgagaattttctactcaacgaaaatgctgttgacttccctgctctgattttcaaagcacacttactatttaacaaattcccagcgattgcacgaaaatactcaacgggatataagtacatctgtttagatgagtttcaagacaccaactcgagccagtaccggcttctgcgtgcactcacagatagttccgacaaaaatgtctttgccgtcgcggatgatgaccaaatcatttatcagtggaatggtgctagccacaagcggctcgagcaatttagaaatgactatgaacctagcagtcttcagatgcccaccaacttccgctgcccagcagaggttgtagccctagcaaatcgtcttgtatctcacaacattttgcgctcgccaggtaagagtccgctagaggcaggaaagaatcaactcaatataaatgatcgggttagattactccatttcagtggccaagccactgaagctgccggaatagctcaagacatagcagaccgacatggatcagcgatcagcaaagtagctgttatagctagaacaaaagcacttctcgaaggcgtccaaagggcaatgaatgacagaggcatacaagctcaaattgcccaacgtcgagattcttttgcaagccctccatatgtatggttgcatagcgccctaaaccttgccaatcgacgaacagaccagcgaatatttctagttttcgtcgaaagtagtgccaagcttatgggagttaatctcgactttcaaaatctggtctcgctagcggcaaccacccatggcgatctactcaggacatgggtaagtgaggcaaggaaaactgaggacttaggcgaaccgattcagcgattgttggatattaccgcctcccaactggctgaacgcttagattatggaagtttcgtgaaacaaaccgtttctttctttaaatcacaacaggaagggcttgaggctgagtttccccagttcgatgaagatacgcgagcttgggcagagttagctcgcgagattacatcctccatcggtgcaagcgcgggcttagaaacttttttacaggagcttgaccttcgatccaaggagcctccgctgggaccaaatgtcttgcccctgctcacggttcacggctctaaaggcaacgagtttgatcatgtttatgtggtgggccttgcagaagacgttatgccttcattccaaagtaagagtaaaggtgacaacagccccgaaatggaagaagagcgccgaaactgtttcgtcgccataacccgttgcatggagtcgctgactcttagctatagcgacgaataccggaactgggcaaaagctccgtctcgctttctcattgagatgggtctcctagactcttga

SEQ ID NO: 72372 - DNA, 2034 bp, Bacillus subtilis subsp. natto BEST195
ttgaaaataactaaattaatcattaataactttcgatcatttgggccaactaatactgaaataggattagaagaattgtcagttctagttggagcaaatagtagtggtaaaacttctgccatccaagctctattaaaactttttagtccttatcaaagagatcgattaatagaaaagtcagatttccacatacctgctaatgaaaatccattagattatgataagtcttcactttctatagaggctgtaattgattttaacgaactggaaaatgatgctgagaaggcaagcactgctattcccccacattttaatcatatggttgcaggtgaagttgatggaagtccttatgtacgtataaggctagaagctgagttatcagaaggaaatactttagaaggaattattgagcaagcagtatattatgtcctatccccactaggaacgaaagcagaagatgaagatttacagccagttaaagctagtgagcgttcccaaattcaaatgatatatataccagcaacaagagacccggccatacaattaaaaaatgcatcaggaactatcttagggaggattttaaagggaattaactggccaaaagaaattaatagtgacatacaagaaaaaatgaagcaagttgacgggatttttgatgaagtaaatggtgttaaagggttaagagaaatacttaatagtcaatggagaaaataccataatgattttcgctacagctcaacaatggttgctttcaaccatgcagatttagactcaattctaaaaaaggtagaggtatattttgaaccaactgaaacaggaagcaaatacaaggtagatcaattaggtgatgggctacgttcaatcttttacttatctctagtaaattcttttttagaaattgaaaatgaagcattgcaagatgaagctgaggaagataaaaaggtgtataaacttcaaccaccagtgttaacgttactagccgtagaagaaccagaaaatcatatttccccacacttactgggtcgaataatgaaagctttaactgacgtttctaaaaatgataatgcacaggttttagttgctacccatgcgccttcaatgattaaaagagttgatccaaaatcaattcttcattttagaattaatcaaaaagaaataagaactgtagtaaatccaataatacttcctgacaaagataaagaagaagaatataaatatataaaagctgcgattatggcatatccagaactgtatttttcccaattggttattttaggagaaggtgatagtgaagagattataattccaaagataattaaccttttggatacagatttagatcaaagtaatatttctatcgttccattgggtggaagacacgtaaatcatttttggaaattactacatcaattgaatattccttatttaactctgttggatttagatttagaacgaaatggcggtggatggggtagaataaaatatgcattaaagcagttgatacaaataggttacgagaagaatgagctactctctgtacaaaatggggtactaagtgatgaggatttctctagtatgcatacttggtctatagaagagatagatgaaagagaaaatctttattcatgggttgagtttttagaaaactatggagtatacttttcggctccactagatattgatttaatgatgattgaaagttttctagatgcatataaaaagactgttccaaaacatggcggtccaaaaggtgtagataaagagaaagattctattgaatatatggatcgtttagaaaaggggataagagcaaccttaaaaactgaaggcggctcaggtattacctattcggaaaaacagaaagagttgatgatctggtatgattactttttcctaggtagaggtaaaccaagtactcatattattgcattagaaaatatagatcccaagatgttaagtgagcaattgccaatgccactaaaaaagttgatgaagggaattaaatcaattattgatggtgatctttctgaataa

SEQ ID NO: 72373 - DNA, 1881 bp, Bacillus subtilis subsp. natto BEST195
gtgatctttctgaataactatgtaaaaaaagacaattggatcccaaaagactctgtaattttagaaagcgctgcggaagatgtaataaagtatgagaaaaatgcttacgtactagctggccccggagcaggcaaaaccgaattgttagcacagaaagcttgttatttgttagaaacaaacatcagcacatatcctgccagaatacttgctataagttttaagaaagatgcagcaaaaaatttaaaagaacgagttgaaaaacgatctggtaaagaatttgcaaataggtttgtctccttaacatatgactcatttgcaaaacaactaatggatagatttcatttagctatacctgacttttatagaccaactctagaatatgaaatagttaattttaatagaagagatgtaactaagcttagagaagaagcagaagaacctatcggaaaaataggttggaattactactttgattatgacctttttgcaaagacatacgcaaatgacaaactaccattaataacggaaaaaatagattcaatagaatcttggtataagtatcaactttggaaaagctatattaatgataaagaaagttcaatgttgacattccccatgatctcaagaattgtggaatacttatttagatcaaaccctaagattctaagagcaatcagagctacatatagtcatgtttttttggatgaatttcaagatacaaccttaattcaatatgacttagttagaacaattttcatggattcaaatgtttcagtgactgctgtaggtgatcttaaacaaaagattatgggttgggcgggtgcaatggagggtgtatttaatcaatttaaggaagactttaaggctaaagattttgagttggttttaaaccataggtctgcccctaatttagtccgaattcaaacatcaataataaatgatatgatggggggttcaacagtaatatcaccctctgacaaatggaagaatgaagaggtgggaatatgcgaagtatggaacttcaccaatgcttctgaagaagcaaaaacattggcattagaaattaaaacgtggattgatcaagaaaaacttcaacgaagagatataggtattttagttagacaacgggcagatatgtattgtgacatgcttataaatgaattaagtaatttaggaatacactcaaggatagaggatcaatggcaagacttactagcggaaaatttcatgaaatatgtaatcgacgtattttctttagccacaactgatcgtgaccctaatgcgtggtctagtttaatatcgaatgttttaaatttacgtggtgaaaatgaaacaaaatcttaccaaatagaaacagaaattaatagcttcattgttgaatttaaaaagactcttaaagatgagacattgaaagtgaccgaaaaagtagtagagcaatggttattcaaaattttaactctggtaggattagaattaattaaaggtagctatccagaatatagaaaaggagattatttagaaagaaaagtaaaacaaactgcagagtttcttttttattcatttgagaaacataaagtgtggaataaagcagtagacgattttctgggtattttttcaatcccaattatgtcaattcataaaagtaaaggtcttgagtttgaaactgtgattttattgggactagaagacggggccttttggaattttgagaactccccagatgacgaaacatttactttttttgttgcattgtctagagcaaaaactcgaatgatatttactttctgtaaaaaccgcttctatggacaagataaatctaagataaatgttatctatcaaatgctggagaatgcagacgttaaacaattcgaatggacgtaa

SEQ ID NO: 72374 - DNA, 1848 bp, butyrate-producing bacterium SS3/4
atgcaattatcaaaaatcagaattaaaaattacagattgcttattgatgccgaactggaggttgagcctaaaacaacattgattgttggacgtaataacacagccaaaacatcatgctttgagtgtattggcaatgtgctggacggagcccccttttccttcaatgattacccactgcaaaagcgagagaacctctataccaagatagctctattcatggaaaagaagatcacatttgaggagcttgccaagcagctggaacccatatccatagaatttcttgtggattactctctcgatgatccggaggataacttgggagcattgtcaccttttatcattgatgtagatgtagacactactacagcattaatccgtgttgagttcagattaaaggcagatgagaaagctttgtggaaactattggaggaaagctattacaaagatggagtctttactcttgatgatgacacccacaatgccattgttgcgaatttctataagctatttgaattgacggtttatgcggtgaatcctaaaaatccagaagaaaagcaagtcaaaaagcacaaagaactgaaagagctttttccgttccatatcattccggctgaacgactcctcggcgaagatggtactcagaacagctctctgtctgcactgatttcggatttctttgatatgagtgaagacgaattagacccaagcattacaaaaaaggtgaaggaacttcgttcgattgtcgaaaatgcaaacaaaagtgttcagcaacaaagtaatgagatactaagtacccttgtaagtagttcggtcggttttggttatccaaatagcgaagaactacagttgggtgttacaactcagttaagcattgatgagcagataaaaaatcaaacacaactttcttacacagcaggtgcaagtaaggaaagccttcccagcaaatacaacggattgggatataaaaatctgatcaagatggagtttcttcttgctgcatttgccaagaaggtggaaaagtgtggcactgcctgcattcccctgcttttcattgaagaaccagaatctcatatgcacccacaaatgcagcacgcctttgcggaatatttggaggcttttcttggaaaaatcacctctgtcgggattcaaacttttttgacttctcattccgcccatgttgccaatacaatggtcttctctaaaattcgatatactcagaaaactaaggatggcgtaacttataaaaacctgagtacatttgctcaggaaaatcccaccaacatcgatttcattagaaaatatttaactctaaccaaatgtgatttattctttgctgataaagctatttttgtagaaggtgcatcagaacgtctgctgcttccagacatgattgaaaagtgtgcaaaggctggggattttgattctcaggcgtataaattgcctgcgcagtactatacgctgatagaaatcggtggagcatatgcttacaaatttatcccttttatcgagttcttaggaattccatgccttattcttactgatttggattctgtattaggaacagaaggaaaaaacggcagaacatattataaatctgttccggtttaccttggtgagacaacatcaaatgaaactataaagtggtggtggagaaaaagcaaaggtcttagcgaggatgataaagggaaaattccccttactgagattacattaatgacagccgatgaaaaaacaaaggcaaatgtcaccttgaatttcaaactaaggaacaaggactatgcggccactccttggaagaagctatccggaatgtcaatcgtgcgcattatgaattggaggacactataa

SEQ ID NO: 72375 - DNA, 360 bp, butyrate-producing bacterium SS3/4
atgattgaaaaccttcatggtcgcaattatgaacttgccaaagctgaagctgacaaagtagatgaacagattatcgaagtgttgcaagcaggtcacagctttcgtgtcgaagctggcgctggctctggtaagacttactcacttaataaagttattgaatggattcaatcaaataagtgggcggagtacagccgcaagaagcaaaatgtaatctgcattacttatacaaatgctgctgtaaatgtaattgcagaaaggttatcaaaggattctttcatccttccgtctacaatacattcttttgcgtggaatgcaattaagcaatatcagagtttttctaatcaatattgttaccaatga

SEQ ID NO: 72376 - DNA, 2100 bp, Roseburia intestinalis M50/1
atgtttttaaaaagactaaaattgacaaattatagaaaattttcttcagagaaaaatattgtggaatttattagttccaaaattgttttaaatcaagacaatgatgatattaacgataattttgaggagaatagtgtacaaaatgattgtgacgagatagatgttgcttcggatacaacgttgattataggaaaaaataatgcaggtaaaacaacaataattacggcactggataatttgataaatcataataatgcttttggggcaaatgattttaattatagatatttacaagaatatttagattgttacgatgcttgtaatcctccactgggggcaccatatatagaaattgtacttacaattggtttagaggaagatagtaatgatagaatttctaatttaataccatttatgttggttgaagatatcgaagattctgaattagatatatgtataaggtatgaagttgaggattttgtatattttcaattagagatgaaagaattattttcagaaggaaaagatgaaaacgcattctcaaaatttctgaatttattacataatacagattatgtactgaagtattatgataagaatatgagtaaaatagatgtagattttaaattgtccaatttaatggagttacaatgcatcaaagctaatcacctaaaaaatgatcattgccttacggatgcatttaataagattatcaactacaggtatgacaatattttccaaaaagaaaaaaaggaagtgacaaaggaactagagaaaatcaatcacgatttgactgaaaatattaccaaaaatcatacagacgttattaggaatgttttgaaagaattgatttctatggagcgtatgggggtggatttaagcgcagatattacatttgataagttaatgcgagaccttataaaatacgaatatatagaagatgatgccaatatcccggaaaatcaatttggattagggtatacaaatttggttatgattatagcagctattatggattatatggaaagatatcctgattcttcctttaatagcaaaattaatctgatatctatagaagaaccggagacatttatgcatccacaaatgcaggagttgtttataaagaatataaatgaggcaattcgtgtattgctttctagcaaaaacaaagatgtgaatagtcaaataattattacaacgcattcgtcacatattttgaatagtaaaattcatagtaataatacattcaataatatctgctacttatatgaggataagcggaatgctgctgttgcaaatttaaacaataaaatagttatgccaaatgaacatgaagatgaagaatcagaggcgttcaaatttttgaagaaacatataaaatacaaagtatctgagttgtttttctccgatgcagcaatatttgtagagggctttgcggaagatatgataattccgtattatattgaaaaaatggaagggttaagaaaacattatatttcgatttttaatataaatggggcccatggctttttgtacaaaaggcttattgaagcattaggaataccagtgttaataataacagacttagatattaaacgtaatgaagagagtgatgaggcggataagcaagagggtaaaaaagcaaaaacatatgaacagattagttgtttagctgacaaagaaacaactaatgcaactattatagatatatatgggaaggctgagatatcagctattccagttcatatagaaaaggaaaatttatatttggcatatcagggagaggtaaatgggtattatgctacaagttttgaggaggcgtttattttaactaattatgataatgcgattactaatgaattgctcaaagaactgaaacctaatatatataggagtattgtcggagaagaatccgaatatgaaaagaataaggaaaattcatataagtggcaaatgaagttggaaaaatgtaaaggtgaatttgctagtaaattgctttacaaagttgtcaatgaggagttagaggaaagaattcctagattgcctaaatatatatcagatgggcttgattggatagaaaagaaattaggaggacgctga

SEQ ID NO: 72377 - DNA, 2070 bp, Roseburia intestinalis M50/1
atgggtttatctcaaattaatgatatagatttaatgaatgaaaagaaatctttgaataaattgtttgaatgcagtgattcgtttaccagtgttgtatttaattctggagcaggctcaggaaaaacttatgcgttaattcaatgcttaaaatacattattagtattcatcatgatgatttaaaaaatcacaatcaaaagataggttgtataacatatactaatgtggcagcagaacatattaagcatcagttaggtgtttccgatgttgtggaaatatcaactattcatgaaagaatttggagtattatttgcagtcaaaaatcggctttgttaggtttgcatattgaaaaactaaatagcgaggtagaattgcttaatagtcaattattaagtaattcagaatatgaaaaatatagagcattggacgcatcggctcaagaacgtttttttcagttaatgctggagaataaaaaaaagtataatatggcatataatttaaaggctacagaatttaaagcggctatgccagaagaaattagattgcaatatgcggagcttatatcgaatgtttctaaattcaaagggttggtagataaacttttcaagagaaaaagatatttggattgtctttgcaaaatagaaagtggagaaaaagattatagagtggtaaattatgacgcaatgtataatcgagatcgattagataaaatgcgcattagccatgatacacttttggaatatggatatgaattaattgagagatatccaaggatgaggcaattaatcattgataaatatccgtatattcttatcgatgagtatcaggacacggctgacattgttgtaaagataatgagtcttattgaacaatatgcaaaacagataaagcatgatgtgtttattgcttattttggggactcggttcagaatatatatgatgctggggttggagaacgcttaactcggctgcatccagagttagattttgtgcttaaggaatataatcgtaggtcatatattgaagtgattgatgtggcaaacagagttcgaaatgacgaggttgtacaaaaatcaatttattctgattgtagtggaggggatgttaaactttattatggttcaggagaaaatgtaagtgaatttattgaaaaatgcgcagagaagtggagtgtacaaattgaaaatccattgcattgtatgtttgcgacaaatcaaatggtggctgaatatagtggttttccaaatgtatatgaagcgttcaaaagagcggaaatatatcgagggattggatataagcaacttaactcggaattgttaagtcatgacataattcacctaggaagggtgcaggcaattctatatagattgataaaaatatatacagaagtgcgtgaggaaaagcaaccacttagagatattttaccatcagataaatatagaaatatgagttttcttgatttgaagttgcttatagcgagtttgcgggcaatagatggaaatacattagatgaattattgggtaaaatatttaatgaatatagcatgtcaaatcatcaaatgtataagcttgttatggagaaaatatttgatgttgatgaagatttatcctatgacaaagtactagcaatttttgtaacttctttgtataaatcgtgggatgaaactcttgagagcaaagaaattatacatgaccttttagatataaagcttgaggaactgttgaattggtttcattatatacatagagatgaaaaaaagaaaatttgttatcatacatttcatagcactaagggattggaatatgaaaatgttgcaattattttaggaaaagattttggacaagacaaagatttgtttaaatattattttatgaattatgaggggaatgaagaacaagattctgataaatatgaaaaaggcagaaatatattatatgtagcgattactagagctattaaaaatttgcgagtattgtatattgatgatttcgaagaaataaaagatggaatagaaaaagtttttgaaaaagcatatgcatttacaaacgagatatcaatagatgatttttag

SEQ ID NO: 72378 - DNA, 1782 bp, Bacteroides xylanisolvens XB1A; identical to SEQ ID NO: 72076

SEQ ID NO: 72379 - DNA, 1641 bp, Bacteroides xylanisolvens XB1A
atggatattcaattatcagcacaacaacaagctgttgtaggttgcaacgagccgagaattgtcgtgaaagcctgtccgggaagtggaaagactttctctgtggctgcgcgtatggcaaaacttttacgagagaataatttatcgagacaccgaggaattgcagccatatcttttaccaacactgcatgtgaggttatacaaaaagaacttaaagagacattcggttgtcgaaatataggttatccttcatttatagggacgattgatagttttataaatacttacatatttctgccttatgcccatttagttatgggatgtgattgtcgtcctgaaatagtaggaaccgcatttaataaatggtttgattatgatccgacccaaacaagatatattaggggtaagcacggtgaacgaataattacatctcgtgataccaactactatttcgatctcatatcatttgggcttaatgaccaattattgcgattagccccatatcagtcatatcatttcggaaaagcggattgggataatcccaataagaaagatggttcacctaaaaagattatatctgaattgaaagagatgaaatggaaacatttcaatgcaggcaagttcaatcaggcagatgcgatatattttacattcagaatattagataaatatccttcaataacacaaaatcttgtccgtagatttcctatattgataattgatgaagctcaagacacaacagagttgcaaatggctataattgataaattatctcaatatggagcggaatctattatgttgattggggatcctgaccaagcaatttttgaatggaatactgccagtccacatttatttatggaaaaatacaataatccagattggcattcattggatttgtcggaaaatagacgtagctccgaaaaaatatgtcaattagctaatcgtttctcaggaaatgaaatgtgttcaatagcaagtgacaaggattacacagacgagccatgtattaaagggcatctcgacacgccggaatctgtcaatcaaattacgaatcatttcatcgaaaaatgcaatgagatgggattggatgaatctgaatatgcagttgtatttcgaggacaaaagtttggcgaaacaaactttggattagtaaacaatgatagctcatcaagacagaatagtccgtggataaacggacactacggcgttagagatattgtatatggaaaatatttgattgatcatggaaaatatactgacggactatctcttatagaaaaaggttgctataaaataacaaagcgagtacggtatgttcccgcaagtacaatacgaaaagaaataggggaagtagggtttagaagacatagagcagaaatggttgagtttattcaaaaattaccttcaacgaataatacactgtctaattggattacggaacttcaacaaacgggcataaatctaactgttgatttgggcaaggcgaatgtccgtattgaatcgctttttagaacagtaaatcatctctttcggcaagagcgaccttacctgaaaacaattcattcggtaaaaggcatgacattggaggctattttagtatttctatctaaaaaagctgtcagcacgggtagtgtaaaataa

SEQ ID NO: 72380 - DNA, 1719 bp, Bacteroides fragilis 638R
atgagaataaaggatatttccgttgaaaattatcgaaacttaaattctgcaacaattacatttgacgaatcgtgcaattttattgttggagaaaataatttaggaaaatcaaatatattaaacctgttaaatatcattttcacacgaagaggatttgtttatgatgattttaatgatgcaaatttacctataacagttaatatacgaataaaactcacaaatgatgaaatagggcattttgaagacttgtttgatatagatgattacacctatatcaatattatctgtaaacaagtatcacctgatgataatatggaattttatcatttagaaacagaaacatacatatctccaacccttattaaatgcttaaactttatatactatgattccttgagaaatcccatttctgaaattaattttgacagcagtaaaggcgtagggcgttttttatcaagaatgattaaggattacgtatcgaatacagatataaatactaataatttagttgatattgaatttacaaatgatttattaactaatgtaaatactaaattagaaaaaataaaatcttttaaagaccacgcaattaaagctgttttggagggggatgtttcattgttattcccaaagttaatctctttacaagatgccagaggaggggcattgtcaaaatgtggatatggaattcaatttttattactagttactttatctattttgaataaacttcaaacaatttccgaccaacgtggagaaacaggggtatttgttaatgaggatacaggagaaaggtctatttctgttgtattaggacttgacgagccagagatacatttacatccttatatgcaacgttctcttattaaatatctcaataaagttatcaataatgaagattctgacttaaagttattaataaaagaattatttggaattgataaattagatggtcaaatcatcatcgcaacacattcaccaagtattattcttaatgattttaagcagattattcgactttataaagaaggaacaagcactaaaatagtttcaggaacaaatctatctctcggcgaacaacttgaaaaacatcttttacttcattttccttttatcaaagaagcattctttgctcgctgtgctatttttgtcgaaggggattctgaatatggaagttttcccttgtttgcaaaaaaatgtgatatagatttagatgattgcgggatatgtgttattcaagcaggtggagattccgttctacaactgatacagttagcagaaaaatttggtataccttgtattgggattagagatagtgatggagataataccccgacaagtattcctaatttatggaaaacaacagaacgggattttgaggctgaattaatgaaattgattgatataggaagagaggaagtattatgcgatatactttgtgaatatgattcggaaaagcaagaacgaattctgaatgcacaagcattaaataaacgagcatataaaaaatatggctatttaacagcacctatcagtacagacctcaaattatcagatatagacaaaacaaatatcacaaacctaaaagcctattattctacatggtttggaatcaataagtctcaaccattgggacttttaataggaatgaaactatctaaaagcgaaatccctcaaatatatgtcaatctaattgaacaagctaaaagtttatgctga

SEQ ID NO: 72381 - DNA, 1785 bp, Bacteroides fragilis 638R
atgtatcaaaacgaaatagaaattataaaatctcggattgagaacaaacaccaaggggatgaaaaacaattagaaattattttttctcctaacaaacgattattagttgaagcacctgctggctatggtaaaacacatacaatggtaagccggatagcctatttaatatctatcggcaagctacctgttccaaaaaaacttttagcattaacttttagcgtaaatgctgcatataaaattaaaaaagatgtaagtaagaatattccagaactattgcaggatttaggcaagcaaattaatattaaagaaaaaatatatgtatctaattatcatggtttctgtcgaagcattttaaaaaaatacggtcatagactacatcctgcattgtcgaatttagatactctacaatccgttgatgatagtcgaagtgatagtataatgcgagtatttaataatatttcaatagatgaagcgaatgttttgtcagaattcaacgccggagttaaaaacataaaaggaaagtatttaaaagaaaatattgataaatataattctattgtcatctccaaactattaataaagaatgccattccatataatgcaattattactttaacaattaaattgtttaaagaacaaattggaatattagaattttaccgaaattattatacatcaattctcgtagatgaatttcaagataccaatctactaagttattggctattgaatttcttaattacagataaaacaaatatattgctattaggagattctttacagcgaatttatggatttataggagccgtacccaatttactttcacatgcacaaaatacattcaatttacaacttatttcattggagaagaattatcgttttgcatccaatgagaatatgcttcaattggataaaataatacggcaaaatgctattactccttttgataaccctaataacttaaaatccaaggtggaatttaatatctatgataaccaagaagaagaagctttacaagttgtaattaagtcacaaaaaatattacaaaacgattcctttgctaaagttgccatacttgcaaagcaaagaggacctaatattgagcatattataaaaactttcaatcacaataagataccattcttttatggattatttacagatgaagactctgaatatataacattcaacagaaaatgcctgtatgaatttattgaattactaaaatcaaattcaaagattactaaaaagataggaaaaaaacatattgataaaatacgagaaatatatattaacaatgattccgtacttgttaaagctcttttagaattactcgaaattttttgggttcagctttttgtcgattattcgtttttatctaatgaagataaaattaatctgattaaagatacctttgaacataatggtataaaacaatatatggaattcttaaatacgtctataataatctctacggtacatgcagcaaaaggtttagaatgggattatgtaatacttcctgatatggaaaaagattcatttcctaactggtatggattatgcggtagatgtaaaaatggaaatgactgtaattttgtgatgactaaagatatagaaaaatcattctttgaggaattaagtgtattttatgtagcagttactcgggctaaaaagcaagttttttttacggcaagtcataaacaactcacaaataggggcatttttgaaaaaaactatagttgttttatgaaattgccaggtattgaatatatacaaacagtatag

SEQ ID NO: 72382 - DNA, 1857 bp, Enterococcus faecalis 62
atggatattaatataaaagaattacgaattagaaattataaatgttatgagagtatagatctagatttaaaagattctaatttacttttaggtgtaaataatgttggtaagacatctttattagaagctctggaattatgttttaccccatataaaagaattagcgaagaaattgtatttgttaaaaaaaatgaaatactatcaaaagataagtctataatattggatattttgattgaatctaaagaaagagaatttacggacgactggtttgatttgtttggagtgctaattttcgatgaagacgaaaaacagtatgttggaattaggacaacaataaaatataatcctgtgaacggagagtatcaaattgaaagaaagggtatgaatagttggccaagtagtgatgaagttgaaacttttgataattttgctacagatagaattactaaaagcattattgaagcatttccggtattttatttagatgctaaaagagatattgcttctgaaatgaatgataagtactcatattttgggagattagttaaagatattaagttgtcagaagaaaatctaactgagatggaaagacatttaaatgagataaatgataatatcgttgaaaatagtgaggtattaaaacacctgtctgtcagcttaaatgaaattagtcaggtacttgattccggagagagttctattcaaattaacccagttagtagaaaaataaaagatttaaatcaaggaatggaaatccgctttatggacaaaaaatctgaatccttttcaattaataatcagggaatgggtactagaagctgggctacatttttaactttgtcagcttatataaaatggaaaacaaaagaaatggcggataaagaatctgccttccacccaattcttttattagaagaaccagaggcccatttacatccacaagcacaaagaaaaatctattctcaaatgaataaattagatggtcagaaagttataagtacacattccccgataattgcctctcaagcaaatattgaagagattattcacgtatataaaaaagatgatcaatctaaaactaataatattttgtttcaagaacttaagagagatgaaattagaaaaattaaggaagaagtatttaaaactagaggggatgttctatttgcagatgtattaattttgtgcgaaggagagacagaagatcaggttttacctcaattctttaaagatttttttggttgtgacccatttgagttaggtgttaatattgtaagtgttgggggatttggaaaatataagcctttcatcagggtagcaaaagatttagatattgaattattcattttaagtgatggtgaaaaagatgtgataaaaaaagttaaaaaagcatacagggaagtattttctgatgttactaatgaagatttaattaaacggataaaatttttgccaaatgaatctgatttagaatcatacttgcttgattgtggttaccaaaatgaacttctaaatgtaattgatcaaattgaaggtacagagggatatttaaatcactttattgctgtaaaagatggtactgagaagaaaagagttaaaacagaaaaaatatgtccaacttgtgaacaaaacatttttgaggctccaattagagtttatagtggtgataaagggtatcaagaagctattttagattatttggaaagcaaaaaaacggagtattcttcaatgattggttgtgaaattcttaagcgaaacgacaaaacaaaaatacctgaaattattcgagaaatgttttatgagatatctaacgtcaagaatttagctattacaccattatatttagagaggtga

SEQ ID NO: 72383 - DNA, 1821 bp, Enterococcus faecalis 62
atgaatttaacaaatagtcagcaagaaatagtagattatattgacggttcattactagtaactgcaggcccaggaagtggtaaaacaagagttttaacacaaagaatagcccgtatcttagagttaaaaaaaggaaaagttttggctttgacatttagtaataaggcagctgaggaaataacagagagagttaagaaacaactctctgtagaaaaccatgagagaattaaagtagaaactattcatagtttctgtttggatcttgttttgaatcgaggtaatcaaatagggctagaggctggattaacagttattgaagatagaaacgacaaacttgaaattctgaagagagcatatttcaactcgaaaatgatgcttcctgaagacaaaatcttgcataaagagttacgtgctatagaagaacacaaaaaaaactttttatatcccgataatattgagaataatagtgagtttcgagatatttttgaaacttacaacaacttgttaaaatctaatagaatgatcgattttgatgatatattgtactattcatatagaattttgatagaaagtccatcagttgcgaaaaattatacaaggctatttaaatatattttgattgacgaggcccaagatctaaataatactcagtatagaataattaaagcattaactcctaattttaaaaacttaatgatggttggagattctgcacaatcaatttatggttttaatggatctgatagcagaattatgactgatatgtttatcaaagattatcagccaaaggtattttcattaattgagaattttagatctacttcaaaaattatcaaagcagctagtaaaattcaaccagaatcaaagtctttatcagtttatccattagaaggagaatttcaaatacaggcttttaaaaatgaagttgaagaagctgagtggatatccaataaaatagtctatttattggataatggtagcaaatgggtagaaggaaaaataactttagaggatattgctattattggacgaaatagatatcttttttcaaaaatagaggagaaacttgaggaaagtcaaattgacttcactttgggaggtataaattctaatgttgaatgtgaaacaattgaaatgaaagtatttgaattgggaattcgaattattgttaatccttttgacgatttacattatagacaattaaataaatatttaaatagagaaggaaaagaaagtaattttctagaagatatattaacaaaccaaacagtaaactcagctcaagtaaatataaatatattttcttctgtcattgaggcatggaatattttgcataaaaatcaagaaagttttgttaaatcattgaataaaattaaagaaaaagttttgatagaggaaatcgatgaacaatttaaattcttaattcagggtgatatagaattatggagaacacgttggaataaatatgttaaacaatctgtacaaggagataggagcttatcatattttagaaatcaagtttctttgggaaaattaaatactgataataattcgggtatctctttgttaacagtccacatgtctaaaggtttagagtttcaagtagtttttatagttggtatggttgaggggacttttccagactacagagtaaagacacctgctcaagaaaaggaagaactgaataatatgtttgttgctttgacaagagcaaaaagagaatgctatttgacctatcccttaattaaggatatgccatggggtagtagtaaaagacaaatcaaatctaggtatttaaataaaattgagggtattttctaa

SEQ ID NO: 72384 - DNA, 1896 bp, Sphingomonas sp. S17
ttgaagatctacgccgtatcgatcgataattttcggggcatcagttcgacgacgctggtcctgcctgaccacgctgtcctcatcggcgacaataatacgggcaaatcctctgttctcgaagcaatagaccttgcgctgggtccggatcgactgagccggcgcccgccagtcgacgagcatgattttttcgagggcaactatctcgccgtcgctccagcggcgcccgaggaaggcgctgagccggataagggtgcggacgcggcccccggtgagacgccgaaaatcacggttgaagtcaccatcattggcctgtccgaagagcaggaggccaggttcggcgggcatatcgagtggctcaacgtcgcgacgggcgatttcttcactgatgccaatccggcggggatcgatgcagcggacattaaggccgcgctgcgtgtcaccttcatcggcgcctatgacccggacgaagacgattttaccggcaatacgttctattcgcgcagcctgatcgaaggcgacaagcccgagcccttctcaaagaaggacaagcaacactgcggcttcctttttctgcgctcgctgcgcacggggtcgcgggctctcagcttggagcacggcagcctcctcgacatcatcctgcgcctgaaggaaatccggccgcagatgtgggaaggaactatcggaacgctcgccggaatcgacgtggcaagcgatccggcaatcggcatttccggggtgctagatagcatcgacaagtcactgaagaaatatgtgccgcgcgaatggggcgtgaagccgcacctcaaggtgtcgaacctgacgcgcgagcacctgcgcaaggtcgtgaccgccttcatcgcgaccggcgacggtactcatgcggcgccgttcttccggcagggcaccggcacgatcaacatgctggtcttggcgatgctgtcgcagatcgccgaggacaagcagaacgtcatcttcgccatggaggaggtcgagacggcgattccgccctatgcgcagaagcggatcgtgcacgagctgcgcaagctggcggcgcagtcgatcgtcacgtcgcattcgccctacgtccttgaggagttcaagctggacgagactgtgattctgtcacgggacagtgtgggcacactgagccaggcgcagatcgcgttgcccgatagcgtcaagcacaagcgctaccgtcaggagtttcgcacccgcttctgcgagggtcttctatctcgccgcgtgctgatcgccgaaggggcgaccgaggccagcgccttccccgtggccgcgcgccgactggccgagcttaatgccgcgacctatgcctcgatcgaggcgctgggcatctgcattatcgatgcagggaccgagtcgcagatcgccgacctcgcggggctgtataagggccttggcaagcggaccttcgcgctatgcgacaagcagactgatccggcgaaggcggcgatcgaggcccaggtcgagcggctctttatgcacgacgaaaaggggatcgaggatctgatcctcaagaatacgactcaggacgcgctcgagcggttctcggatgcgctcgattggccgctgcacattctcggcagatatcccgatcccaaggccaatctgatcccggcgctcaaagagtatttcggttgggccaaaggcaattggggcatcgccgattttctaggtcagtgtttcgaggccgagattccgtcgtggatccgcgacgcctgcataacgctaaaggccatctgtgatccgccgcccgcgcccgttgcggcaccgccagtaccgccagcgcccccagtctcgccagcgccgcccgctccaccggctccgcccgtgccgctggccgggaatggcgggcagaccggcctcggacccgctgcttag

SEQ ID NO: 72385 - DNA, 1824 bp, Sphingomonas sp. S17
atggtcgacctgacgccgtcacaaaaggaagttctggccgcggacgggccccagctcgtcgtcggcggtcccggctcgggcaagaccacggtgtcgatcctgaaggcggcgaagatagcgcgtgaaaaattgcggcctgggcagcgcatccttttcctgagtttcgcgcgcgcgaccgtctcacgcgtgttcgaggcgatcgacgaagagcggtcagtcaccaaggaggaaaagaagcggatcgaggttgatacctatcactcgttcttctggcgcatactcaaggcccatggctacctcgtcgggtttccgcggcggatgacgatcctgacgccgccgaacgaagcgattgcgctgtcgtcgatccgcagcggcttcaaggccccgtcgaagctgtcggacgaggaaaaagcgcagaaggcggcattggaagttgccgaacgcatgcggctcgcgactgaggaaggcaaggtctgcttcgacctgttcgccgagcgcgtggccatcttgctgcacggttcggccaaggtgcgcgagctcgtctcgaccatgtacccgttcatcatcctggacgaatttcaggacaccagcgccgagcaatggcgcgccgtcgaggcgattgggaagagcagcacgctgatcgcgctggccgatcccgagcagcgcattttcgatttcatcggtgccgatcccgagcggctgaaccattttagggccgcgttcacgccgtcggagcacgacctcgccggcgacaatcaccgcagcaaaggcaccgatattgccatcttcggcaatcatctcctcacgggcaagtttcgcgacgaaccgtatcagggcgtggaagccgattggttcgcgtcgaacccgaatcaagcctatgcctcgctcgttgctcaggtgctgaaggcccggcaacggctcctcgcgctaggccagcgcgactggtcgcttgcgatcctggtccccaccaagcgcatgacgcgtctggtgtccgacaacctgcgcgcgccgttcggaaacgtgccgccgatcgctcatacggcggcggtcgatatggaaggccctatcctagccgccgaggtgatcgccttcctcctgcagcagcgcagtcataatggctgcttcgacgagttcgtcgacgtgctttgcagcttcttcggcggacgcggcggcgcgacgccgacaaagggcgacctggaggaagccgcgcggttcaggtccgcgctggaaaagtggaatggatgccttgcaaaaggcaaggcgacgccgggcaacagtgtcctgcaggcgacgttcgccgtacaccaggctgcgagcgccgttgtgctgaccggccagcctgatgccgactggacggcggttcgcgccgtcctcgaggagggtggctgcaagcggctcgtggaggttgcccaagaagcccgtaatgttcgcctgctggaacggggcacgcagctccgtcagagcctctcgcaggattggcgcgacaccggcggctataaaaacgcccttgccatcacgcgtcagtcattcgttcaggagcatttcgcgacggcgcacaagcctgagtccggtgttgtcgtgatgaacatgcacaaagccaaggggaagcagttcgacgaggtcatcatctttgaaggctggccgaagcgggtcaaaggcgagatcgtgggcaacccagatcggatcgtcggcggcaacatgaacgtcggcccgatgacgcaggcgcgccagaatttccgcgtcagcgtgacccgcgcgaagatccgaacgacaatcatgtcgcctaaggacgatgtctgcgtcctgctgatccccgcggaataa

SEQ ID NO: 72386 - DNA, 1923 bp, Streptococcus pneumoniae GA41301
atggttattaataattttaaatcttttggggagtgtcaagcaattaactttaataatcaaactgtactgatagggaataatagttcaggaaagacaactgtattacaggcattgagtaagttgttttcagataaacaaagtgatagaatcattcgaaaaagtgattttcatttaccaaaagggttaagacctggtgaaaacacaagaaatctttttatagaaactatttttgagtttgatgaacttgatggaactgtctatggaccagccattccaacatttttcgagcactttacagtttctcaagatggtgcaaaaccttttttacgaatcagattagaatcttcctgggaagatgatggaacagttgaaggaagtattgatactcaaatttattatatttcatctgatgaagatactattagagatgaagacaaacatcgtgctcctagaaaggatttggataaaattagggtactttatgtaccagcttcaagaacgcctgagaaggagttgggtaatgcttcaggtagtatgttaagtaggttggtaaatagtataaattggactgaagatgagataaaagaaattaaagataaaattgatgagttgaataacacttttttatctgaaaatggagcattaactcagatcaacaatgagattcagaaatcatgggaattatatcatgaagataaccgtttttctcaagcagagttgattattaattcttctgagatggcggcagcacttagacagattgccttaaaattttcaccaacaaccactgaagaagcatttacagtttcagatctaggagatggactgagatctattttttatttttcacttgttgattcgatacttgatattgagttagaaattaccaaagatcgtgaagagaatcctgataatccaagatttaagttggtacctccaatactaactatcttagcaatagaggaaccagaaaatcatattgctccacatcacattggaaaactgataaaaaggtttaagcaattaggcaataatgacaactctcaattaattttaacttcacattctccagttattgtaaaaagaattgacccagaagatttgaggtatttaagaatagaaaataatgacagtgttcttcaaaccattgtttctgatatacagttacctcaatcgaatgatgagtcttataaatacattaagggagcaattcaagcctatcctgaactatattttgcaaagttagtagtactgggtgaaggtgatagtgaggaactgctattaccaaagttttttgatttacttggactggaaattgatagttctcagatttcagtagttcctttaggaggtaggcatgttaattatttttggaaattattgaacgctctcaggattcctcatattaccttattagatttcgataacgaaagatatggaggtggctggggaagaattcaatatgcaataaaacaattgatactaaatggggttgctaaagaaaaacttgttactgtaacagccgaatctcaaaaatcacgagttctagatgatgatgagattgataaaataaaggactggaagattgatagacctgataatcagttgcttgaggggtggattaaaatgttagaaaaattcaatgttttcttttctgcaccacttgatattgatttcttaatgttacagtattataaagaacattatctggaaactttatctaccaatgagggacctgttgtttcttatactgatgaaaatagtgacaataaaaaaataaaattaactaaaatggatagaacaaatgattatcaattaattggttttaaaaatcgcatcagtgaagctatacaagcaactttaaaagataagagcggacccggtgatagcttcactgaagaggaaaaggaactaatgatttga

SEQ ID NO: 72387 - DNA, 1818 bp, Streptococcus pneumoniae GA41301
atggtaaagagtgaggagtggtttcctaaaggagatatcattttagaagagactgcattaggagccgtcaaagatgtgactaactgtttagtcattgctggaccaggtgcggggaaaactgaattactagctcaaaagttagactatctattctctacaaataaatgcgtttctccgaaaaaaattctagcattaagtttcaaaacggatgctgcatcaaatttgaaagaaagagttaagaaacgttatggtgatgaatatgcttcccgttttacctcattaacctattcggcttttgaaaagagaattctagaccaatttagagatgttctacctgaggatatacgaccatcaagagattatttgattgaagattgggatactataaaagaactactctctatgaatggaattaatgttaatggacggagaatgtcagatataagaaattttgtcgaaaatattatacttaatgacgggaatactcacaaatttaaaaagaatctactaaaaggaacacaagataataagccggtcctcttgtatagtcaaataacaaagttgagtactcaaataatagctactaacgaatacatccgtaaagcacttcaactgacatacgattttgtatttctagatgaatttcaggatactacatatgcccagtatagtttattaaaaacttgttttttaggttcgtcttgtaaattaacagcagttggagatgataagcaagccattatgagatgggcaggtgcaaagcctgatatttttccagactatattcgagactttaattcaaatgaatatcaattgttgatgaatcaccgctctgtacctaaacttgtagaatttcaaaaagaggttcatcagatattaaatagtaatcacagttctattcagacaaataattatctagaatttcaagagggtgaaataacattatttgaatttgaaaatgaaagtttagaagctaagttaattgcaaatgatatagaatcaaaaattcaaggaggtatacgaccatcagaaatttgtatcctagcaaaacaaaaggttggtatttatagtttcgaattgatatctatattaaatggcaaagggattaaagcaagaattgaaaatgaatatcaggatattttaaaagatcctacgtgtaacctattattagatttaatatcatgcagtcaaggaaaacgagatcctttaatttgggaaaatattagtaatttttatggaaatatcaatggaatagatgagttaactgatgaattaattttagcaaaatcctataaggagattgacaatatagttagtgatattacttacctaatttcaaatcctattcccgataaagacaggatgctaaatttaattaattgtattatcgaaaaaataggtgacaaaagaattatttccaactttccaatgtacaatgggaaaaatgacttgcttatcaccatcaataagttttcaaaactattatatgaagagtattctcaatcacaaggtgcatggatagatataatatctaatttcaaaggtgaaaactcaatttcaatcatgactatacacaaaagtaaaggattagaatatgaggcagtttattttttagggctggaggattctgcattctggagttttaatgatcaaccagaagaagataaaagtgcgttctttgttgcactttcaagagcaaaaagtcacttaatattcacatactgtaaattaagaaataatagtccgcaaaataatagaaatattaatgagatatattcattgctgactcaatccaatttagttgatgttattaattaa

SEQ ID NO: 72388 - DNA, 2109 bp, Pseudoalteromonas haloplanktis ANT/505
ttgaaaatatcaaaaattcaaatcagaaatttcaggttgttaaaggatttttctttagatcttgaagatgaactttcgcttattctcggtaagaataacacaggaaaaacttctatattgaccgcgcttgataagtttcttaatcaatcaagccgtaggagcattacgcttgatgacttcaatgttggattgaaaaaagtgttgcttcaatacctttctggtgtcaaagaacttcctattgagaactgttatcaacccttaggaatagaacttaaagtatatattgagtacacagagcaagatgacttgtcacaagttagttcactgataatgagcctagaccccgatgataataatattgttttgaagtttgaatacaatattgaccatgagcagcttataaagcttaaagatgactataccgaacaatctgaaaaatttgataataatcctgaattatttcttaaagaacacctcggtgactattttggctcagtaaaaaagaaaagccttttattcaccgatgaagctgtttttattgaccttgtaaaagagaatattcccctcaatgacatcttatcattcaactttattagtgccaaaagaagtgtgactaataaagataatgataaaaccttatctcatcaaacggctaagatatataagatctcagacgagtcaaatgaacaaatagatgcctccgaaaagtttaaagaaacccttcgaaagactgatgatgagttaagtgcaatttatgcagatatgtttgatgggctaattcagaagattaaccaatttggcggtgtaaatcctacagataccaaactaaaagtatcatcaacactacaacaccgtgatttactcgatggtaatacaacagtgatgtactcgcacgatactcatgacctgccagagcattataatggtttagggtatatgaacttgataagcatgatctttgatattgaaatggtcatgggcaagtttcgacgttcactaaaggaaaaacctgctgcgattaatttgttttttattgaagaaccagaagcgcacactcaccctcaaatgcaatatatctttatcaaaaacattaaaacattattgaaaggtaatcgagaacgcgatgatggaataacgattcaacttcaaacggctattacaacacactcatctcatattgtttctgaatgtgattttgatgatattaagtatttgcgaaaaaacaactcaacctgtgatgttaaagcaaaaaacctgaaatcacttcaagatgagtacaaatcagaagatgatgctgaagatattaaactgaaaaaagcttataagtttttgaagcagtatttgactttaaatcgagcagagctattttttgcggacaaagctatttttattgaaggagagactgaaaaaatattagtccctgccatgatgaaaaaaattgatcaagagtttagggctcctgatgaaacaccattattatctcaaaatatctcaatggttgaggttggtgcttattcgcaaacatttgagaaattcatcgattttatcggggttaaatcattagttattactgatattgatagtcaatatgtacgagatattattaaggatggtaatacaaagaaagagacaattaaatgtaagccttcagatccactcgctaaccaaacttcaaatgcatcattaaaatttttcttcggtaatgacgatttagctttttacaaaaatttatccattaatcaaaagttattaagaaaagatggtacccaatggattcaagatcctgatggatacttcctaatggcttaccaaacaaacgaggacggatatcatggacgtagctttgaagacgccttttttagtttaaataaagatctattaggtaagagtgcagaagcttttccttcattaacaaagagacattttgatatttatgtagacagtgacgatgcttgcccattcgactttgctgaaaaagcagtaaatagcaagccaacattagctattgaaatattactgaatagcaaaaaaactggtgataatgaatttagtaattggcaagtccctagctatatcaaggaaggattattatggctacgcaagaattag

SEQ ID NO: 72389 - DNA, 1953 bp, Pseudoalteromonas haloplanktis ANT/505
atggctacgcaagaattagatatatcgcatcttactactgaatcccaaaaagttattgggttaataagacaaggctatagttttttattaagcggtggtgctggtagcggtaaaacctactctctagttgaaatattaaaagccgttttagttgaaaatccaacaacatctattgcctgtattacctatacgaatgcagcagtcgatgagattgaagagcgtgttcagcatgaacatcttcatgtttcgactattcatgattttttatggagtaatattaagcactttcagtgtgaactgaagagtacgctaattgaattaataaatgatgacgaacagcccaaaataaaatctccagatggagagaaagtcacaaataattattttgatgatcttgatggtgatattaaatacaaagagtttgttaggattaaagatggttgtatttctcatgatgaggtgatcattcttgcctgcaaaatgtatgaaaaatatgaaaaactctgcactataactaaagattcatacccatttattcttgttgatgagtatcaagatacagatcctaacgtagtaaagttgttgctagagaacttaaatcaatcacctaaaagaaacattgttggtttttttggtgatgcgatgcagtcaatttacgaaggaagcgtggggaatttaaatggaaatactcaacctaaacgtattaccgcattaaaaaaggaacagaacaagcagggaacttacttctcagtcattaataatttaaaagaatatactttactgacaccaacagttatagaggtcaaaaaagtccaaaaccgacggaatcctcaacttgttatagatctcgctaacaaaataagaactgatggcttaatgcaggagccatcagaagatattaacgcgcctaatatgaatgcagatgggacagcaaaacaaggaagtgcacttttcctatattccaataacgatgatttaggcgcagtctgtcatcacttagcttgggactttgatagttcaattgagaccaaagaacttaacctaactcacaatctaattgcaggaaaagcaggttttggtgatttaatgcgcatttacgataaagataaaattttagaatctattaagcgtgttaaggggtatataaaaaagaatgatattaagatagatactgaaggcagaacatttaagcatgtatatgaggagttaggtggtttacaagatggtactcctaatccactcgcacctaccaaaggccaaaaagaatatatagatgctaatcccgatgtttatgaattagcattagcgcagccttatgatgagatatcaaaactctacattgataaagacatgttggttgacgataaaaaaaatacagctgatgatttaagtaagcctagttctaatcgagatgatctgatcaagcacttatttaaaattgagcactgtatttatttgtataaagaaaaaagatttaatgagttttcaagaattactgatttctcaataacatcagttgctgataagaaaaacttaaaaaaatcaatggaagaattgattaaagttgacaatagatctattgacgaagttatagctcttgcgaatcaacttaaccttgttgttgaagatgataaattagaaaggtttaaagtatctagaaattatgtttatcagcaagtatgtcaaataccttatcaacaatttagagggctatatcaatacttagaaggctatactcctctttcaacacagcataagactaagggtgcagagtatcctaatgtacttgtcgttctagataatggccaatggaatagttataactttaaaaatttatttgaaggaggaggaaaagaaagtgtacggcagaggacagaaaaaatattttatgttgttgcacacgggctaaagaaaaccttgctgtttttttccatcaacctagtgcaaatgtga

SEQ ID NO: 72390 - DNA, 2121 bp, Haliscomenobacter hydrossis DSM 1100
atgcacataacatctctctcgcttcgtaattttcggaatttcaaaaaagcaaaattccattttcaaaaagggatcaataccttaatcggcgaaaatggctccggcaagacaaatgtttttcttgctttgcgtctactacttgatgatcggatgccacgcaaaattgacctcacagacacagatttcaatcgtgttattggcaattggcgaggtcattggttggtcatttctatccaatttggagaacttgataatagcgaagattgtcaagtactttcagtacacgcgacaggtgatgccagcgggcagggaggacggctcactttgtttttcaggcctaactttaatacgaggaagcaactttttgatttttcttccaaagatacatctgaaaaaaccgacgaaacatatcaaaaaatacttgagggcattaccataggcaattacgaatctattgtcagggggagtggaactggcgatttctctgatgatgctctttataaaatctgcgccggcgattttgaaaaccgagttttccctgacccaaacgatgatgatgtagcagtgttaggcacacctgttaaccactcagagctgctcaaagatttttcatgcacttttgttaaagcaatgcgtgatgtggtggaagatttaaaaaatccaaagacaagcccgcttcttcatttacttcgcaaagaagacaaaagcaaaatcgatagcgaaagtatcctagataaaatccgaggccttaacgacgatataaatgaccttactgaagtcaaaaatttgactactggcatctcaacaagcatcaatactgctgtcgggtatacttatgcccccaatgtaaaaatcagttcggacgtaccaaatgacattgagcggctctttcaatccttaaaattacaagtcggggatcccgatgaccttgggcacttagggcgactcgaccgattaagccttggtggggcaaatcttatctatctttctttacggttgctcgaatatgaacgtatactttccaaacatgaaaaagcagcgcattttttgatgattgaagaaccagaagcacatatacatacacatattcagaaatctatctttaaaaacatgtcgcccgaaaaaattcggacgcaggttattgtttcgacccattcaactcatatttcttcggcaagtcgcattcgctcggttaatttactctctcggcgtgggcagtttgccgaggttttttatccaggaaaagatttggaagaaggtcaaattgattccatagaacgatatcttgatgcagtccgcagtacgctactttttgcaaaaggtgttgttatggtcgaaggcgatgcagaacaaatcgtgattccagaactttttttgaaagtttttggcgtgagcctcgacgaaataggcgtgagtttggttaacattggaagcacaggatttaaaaatctcgcggtgcttttccatgacgagcgagtgcgtcggcggtgtgcgattgttacggatttggatgattcacctgcgactgaagtcattgttgccaatgctgaaaaatggaaagatttcgaaaattcaaaggcaaagggggcagagcggaaggtgcaccttgaagatttcagtaacagtaattcttggatcgaactgttttttgctcaaaacacatttgaagtagattttttacgcgcaggtaatcaaaaaacaattgttgaagtcgtgaagtcgatttatacaagaaaagcagacgttgtaagatctcttgcaaaaattcgctcgggcgatacttcggtttccaacttggaaatacttcgccttgctgaaaaagaaggtaaaggctggtttgcaatccttctctccaagcatttgactcacgaaacactcataccggattacattttgcaagctgtggcgtttgcagccccatttcctatggattggcgaatgctagcgacgattgcccaatttcgactggaaaaaatgaatgcaaccagcactatcgccaatgatttgttccgaagttttccacagaatttgacggacgaaaatgccgaagactttatcaaaacttttaagtccgcttttcccgacgatcaactcactcaatttatcacagtccaaaaatga

SEQ ID NO: 72391 - DNA, 1803 bp, Haliscomenobacter hydrossis DSM 1100
atgatcttagaagacctcaatgatgaacagaaaaaagcagtttgttttgatgaccatttactgctaacagcttgcccaggtagcggaaaaacgcgagtcataagccatataatagcatatgaacttggtagactcaattccctaaaccgtcgcattgttgcactcactttcacgattcgggcagcggaagaaatcgaacgaagactacacctaatggagatagaaacatctaggctttggtcgggaaatatccacgcattttgtttgaactggatattaagaccttatgctggttttcatccgagaactcaacgtgggtttgtaattattgatgccgtgaaaaccaatgaaatcttggaggtgttgttgcagaaagatgattattctataatccgagaagatttcaaattcaatagccctattgtgaagatacagcccaacggctcgtttatagtcaagaaaccaacccacatgccgcttttcgaagcttatcgaacagagttggaaatcaatcgttttgtggattttgaacatcttctgttttactcgctcgaattgttacgtagttgcccgaaaatagctgtgacactttctggagtttttcaaaatattcttattgatgaatttcaggacacgcaagaacttcaatatcaaatcatttttgaaatcgttaccgccggccgcggtcgaacaaaggtttctttcgtcggcgactgcgatcaagcaattttcagctcgctcgggggcgttgcaaagtccaaagaagaaattgaagcgggcatcaaggcaaaagttgaatcccttgaccttagtggaaattaccgaagcaaccagcgcgtgattaattattatcgaaatttccagacaacacccattgaaatcactgcacgtagtctgataagagataaccctgggaaaatcacgttgaacaaaaccttgaaaagagaaaatttagcagacgagatagcaaaactaattcaacaaagcctcaaccaaggcatcgtagaggaagaaatcggaattttagtgccacaatggcttttgatattgccactcgctcgaaaattaaaacatttactccccggagtttcattcgacgcttcaggtatcgcccctatgtctgatagccgagacaaccttttttacaaaattgctcggctttttttaactgcaccttcgcagcgtttgtacaaggttcggcagcggtgggcgacggaaataggtctggaattggcgctttctattggctgcaaccaggaaaatccgcagttttcggcacgtcaggttttaaaaattgttaatagcatccaatctagcgaaactcaagccgatccttatttgcgggagtgtttaactaattttctctttgcttttcatgtcaaaatatcagatttccctgctctttcaatcagttttgagtcctacttcagaggcatccagcggcgcatcgaacgtgccaaaaaagaaggcgaccctttgccggaagacatcgaatcgttcagaaatttttatcgggaggcaacaggggtggtcatcagtactgtgcatggggcaaaaggtgaagaatatgaaacaattattgcatttggcctattaaaaggttttttaccacattggaatgatataattgataaatctattgacgaaaatgatgtttctcgtaaattgctttatgttatttgttcacgagctaagaacaacttacatttgataatggaaggtgggcgaacgacacggaaaggcgatccacttgaattcaataacttgctttccaatttacaatttgaatacgatgaaccataa

SEQ ID NO: 72392 - DNA, 2019 bp, Dysgonomonas gadei ATCC BAA-286
atgtacataaaaacaatttcagttaaaaatttcagattactacaagattcgactttacaactggatcaagacaaaaaacaagatttgtcattattgataggtaaaaataatagcggtaaaacgtcatttattgtattattcgataaatttcttagacccgaacactacaaattcaattttaatgatttccctatttcattgaggaatgacatcttgaacactggtacagaaattgatttaagtcattgttcaatacaaatggtattagaaattatatattcagaggaagataatctggaaaatctttctgaatttattttagacttaaatcctgatgaacatattgtgaaattactatttaagtgtgatattaatcgaagcaaattggagtctgatttatcgaaaattgaagacgaaaaatataagagaaagcatatagaaaagagtctaacggattatctcgaaacaaaaatatacacttttagtaaagatgatgatttaagcgaagacaaaaataatcaaatgattgaaaaatctatttcagatgtcaggaaagtaattaatttccaagtaattcatgcaaagagaaatgtttcaagttcagaacatcaaggaagtggcaaaaccgcgttatcagaattaactacaaattattttaataaagagaatctcttctctcaagatgctttcggtagtataaatgatactatttttaagatggatgaagaattaaataagcaatatgaagttcattttaaggattattttaccaatgtaaggcagtttgttgatgaaggaacagggcagttaaacgtgatatcagatttagaatctaagcaaatcttatctaattattccaaagtagtatatggtagctctgatacatatttgcctgaaacactaaatggtttaggacatttgaatattctgtttttattgttgcaaatcgaaataaaaaagagattctttgaacaagaaaagaaagatattaatctactgtttattgaagagccagaagctcatacacaccctcaaatgcagtatgtatttgcgaaaaaaataaaggatatattaaaaacgattcaaaatcttcagggatttataacaactcattctgctcacatcgtttctcagtgcgaatttgaagatataaggtactttaagttagataagagtaatgttattattaagaatttctataaggagttagaagttaaatatacatcagagcctgaatattttcaatttttaaaacagtatttaactctatattcatcagaattattttttgcggaaaaaataatttttattgaaggagtttcagaaaaactattgctgccttactttattaagaaatacgatcaatcaagggatagtgaatctgactatatccccttaacttctcaaaacatatcgtttattgaagctggcgctaatgcaagggtgttctgtcattttttgaacttcttagatattaagactttaatatttacagatttagatgggtgcaaaataggaatatcagatactaaaaagaaatattggggaggatgttctacggaagaagccattaatacaaccaatgttacgatcaaatattatctgaatgctccagaacttcccaaaattgaagaacgtgaaactaaaactaatgaactaaaattgtttgatgattggtttaaaaatataaaggaaaatagcgtagcgtcaattacccccaatattaaaatctcgtaccaagtaaaagaaaacgagtatcacgcaagaagttttgaagatgcatttttaagtgttaatttgaatactataaatagcaacaaaaaagatataaatggcttaaaaaataaatctgagattaaaactgaaagaacagatttttttgatttgactaaagcaattttaaagtctgatggaaaatcagactttgcctcttcaattctatacttagcattgacaaaagatgtcgagtggaatatacctaaatatattgtagatggattaaagtggatttcagaatga

SEQ ID NO: 72393 - DNA, 1989 bp, Dysgonomonas gadei ATCC BAA-286
atgagtaatacagcgttagacaaaataagagagattattgataataatcagaatccaaaaaaagaatttaagaattttgttttacaagggggagctggtagtggtaagacagaatcacttaaagaggtaatatcgtatatagcggagaaataccctaaaaagaaaatagtttgtataacacatacaaatgttgctgttgatgaaattattgctcgtgttggaaataagtatgaaatttctacaattcactcatttctaaattctctgataaaagattataaaaagaatttgaaggagattatacatcatatattttgtatttcagacgtaactgaattgactcattctgaatataaaaaggtttatgaaaagtattctgcgaaactatttctcttgaaagaagaaaactgcgataaagtaataggaaaaagagagtacgatatatctccatctatttacaatgcacaactaaatgaaaaaatagctattctcaatgagaatataaaggagattatttcgtcaaaagaccataatttgattgcatataatgaaacaagattcgattcttttaatgaactaacgttttcccacgattcattacttttattgtcttacaaattatgtgaacgattcaaactattaccaaaaataatcagtgataaatatgattttattttgattgatgagtatcaggatacaaatgaggatattatcaatctatttttaaatttactgccaaaaaataagaaaaccaccattggattatttggagattcaatgcaaggcatatatgatgatggtattggggatgtagaaaaatatattgaagaaaaaacaataacaagaattgataaagaggataattatagatgttccgaagaagtgattcgtttcattaataacattagaactgatggcattgaacaaaaattggctctaaaaaaagatgaaaatttagatgcccgaaagggatttgctaaattattctacaagaaagttgacaaaaagcctaacatattcagttctgttgaggacaagcaactgtatttagaaaaactaaatagcactataaaagcaataaaaaaagacatagttcctgaatgtaaaattcttatgttgacaaataagtcaatttcaagcgagataggattttcaaacttatataatatatttagtgaaagatattctgaagtcaaagaagagattgagaaagaattggatagaatacaaataagtactattgttgaattatgtcgattatatcaaatcaaacaatacaattcaattcttgtctatttaaagcgtaatggtttccaaatcaaaacactaaaagataaaaaaacaataatcagtcattttgattatctgctgtctaccaaacataacctgcaacaagttttagattactcttttgagaataagatactaaaaaagtctgagcggtttaacaactaccttttgcggagaagtgattttcttgaaaattacaataaaaatcaatcatataaagatttagaatcgttatatcttagtggaagtaacacaaaggttcggctaaagaaaaatcataatatagaaatttcagatgaagaattttcaacatttgagagagctctgaaaaagaaaacattttatattgatttattttccgacaaaataaagtttgatgaagtccttaattactataaatatctaaatgaagaaactggctatatcacaatgcataaaactaaaggttccggaatagagaatgttattgttgtattagatgaatttttttggagtaaatacaatttcaaaagtatatacgacgaaagtgtagatttggaaaaacggagtaaaaatcaaaaacttttttatgttgcttgttctcgtacaattaaacatttgacaataatcagattaattgaagatgatgaagaagaagcgatgttaaaaacatattttaaaaacatcgagttggaattgttgcctgccgcatcctcttga

SEQ ID NO: 72394 - DNA, 2025 bp, Psychrobacter sp. 1501(2011)
atgactttttactatggtgttcttatgcagatatctaatcttagaataaaagggtttaaatcatttggaccagatggggttgatataaatctcaaacataagctatctgcttttatcggtcttaatagctctggaaaaaccacagctttagaagcattacgaaaactattcggctcatcattgtcggaaagaatgctcgtaagagaagattttcatattggtaaagataaagacccagacgacataacagaaagtcagctttcaattgaagcaaagattctgttttctgatgatgaaagtgaacaagaagcggtcgtgctttattttggcgatatggttgttgatgctcaaggtaaagacccctatatacgcattcgactagaagcaaaatggactaaatccgaaattcaacctgatggtgaggttgaatttcaaaccttttttataaaagttgctgataatgaacaagaaactacagaagataaggtagttttaaaacctcatctaagacatcttatacagatcctatatgttcctgcgattaggaagccttcagaacaaataaagtatgcgtcaggtagtatcttatatagaattcttcgaaaaattcaatggaatgacgccttcaaagaagcttttgatggcaaaattaaggacataaatgagtcttttaaaggactagatgagtttggtgttattgatgacgttattaaaagcgtttggggtaggtttcataaagataaacgttataaagatacgactttaggattcagctctagcacgtcagatgagattttgaaaaagttagaaataacctttagccctacaggtactcataaacagttccagattcatgagctaggcgatggttatcgctctatgttttatttgacgttagtatgcgcattattagagattgaagaacagttatcaaatcagagtgaagataatactcttcaagctactcgtcctttattaaccattttagcgatagaagaacctgaaaaccatatagcccctcaactacttggtcgtgtggttaaaattcttaataaaatttctaaacaagaccactctcaagtattactctcttcacatactccttcaatcattaaacgaatagatcccgagagtattctacattttagaataactgacaattatgagtcagaagtcaacaaaataatactgcctgaaaaagaagatgacgcttataaatatattaaacaagccatccaaaactaccctgaaatatattttgcccgtttagttgtcattggagaaggcgataccgaagaggttatttttaacaaattcatggaaatagaagaagttgattttgacgataatataattaccttcgctccgttaggtcataggtttgtcaatcatgtatggaggctattggaaacactgcatattccgtatattaccttactagatttagatttagaacgaaatggtggtggttggggaagagtaaagtatatattaaaggagctaattgaaattggagtggataaaaaccaacttttagttttaaaagataatagcattctcaccgacgaacgtttaggggcaatgcatggtttcggactagatgaaccaagtatcgaaatgatgtatatgtggcttcagcgattaaatacatatgatgtatacttctctgaaccgttagatttagactttctaatgcttaaaaattatacagaattctataaaaatgctataccagaaaacggaggtccgcaaatacctgataaaacaacttatcctgacaaattccaagaaaaattagaagctggtgttaaggcaactcttaaatcggatagtgctatgggtgacacttatagtgaggaagatagagaactaatgatttggtacaactatcattttttaggcagaggtaaacctacaacgcatattcttgcgctatcaagtatgacagatgatgtaataacagaggctactcctgacttatttaagacacttttcaatcgtataaaagtgttactcgcagaatga

SEQ ID NO: 72395 - DNA, 1490 bp, Psychrobacter sp. 1501(2011)
atgcaaataattagtccagaagagtggcaacctagtgacggtctaaatcttgaagctaacgctcttattagtgtcaagtcattagataatcgtttggttttagcaggtccaggcgcaggtaaaacagaaatgctggcgcaaagggctagctatttattagaaacgaatacttgcaaatacccccataaaattctagctattagctttaaaaaagatgcttcgtttaatcttaaagaaagagtagaaaagcgatgtggagaagacttatctaaacggtttgattcttttacatttgattcttttgctaaacaaattttagatagattcaaaaaagctttaccagagggagttaatgttagtgctgattatgaattacttttaaatgataatgaggttttagagatttattctaatagaggagaaagcctgatttattctcatgaaaggaagagaatgatggctatgcataataagcaactaccaatagactttaataaatcatcgaatggtatgatatatgaggtttggttggaattaataaattctactcaatctaaattaacttttgcaatgataatgcgattggctgaattaatcataaaaaccaatcccaaaattaaaaaatacctacaactgacttatcaatttgtttttcttgatgagtttcaagatactactcgtattcagtatgatttattcaaaacctgttttcttagtagtgattctatcttcacagccgtaggtgatgacaaacaacgtattatgctatgggcaggagcaatacctactgtattcgaagactttaaaaatgatacaggtgcaagtgaaatacatcttcataggaactaccgaagtgcccctaaaattgtcaatttactgaatcattttagtgagcatatgctaggagacgtacaaaaagctacagcagatacaagatgggatgaagatgatggtgattgtaatatagtatttttcaagaatactgaacaagaaaaagtatttttattagatagtattcatagcctaattaccgaagaccatgtgaatcccagagatatatgtatattgattaaacaaagattagacgtatatgcaggcgaattaattacttatctttgtgaacatggcattcaagctagagacgaaggatatttttatgacctactctctgaagaaattactctatttattatcaatatactatacagggttttaaacaataaagactctgcgactaggaaggctacctttgactttatcagtaatttatattcagagcttgaccatcaaggtctgttaaatattgaaaaaaaactctttgagtttatcaaacatgcagaaattacatatgattttgacaatctaacaactgatacgttaaagcagttaattaaggaagcgataaaattaataaataccgaaaggttgaaagctcaattccccaagtacaaaaaccaaaaagaattaagtaggcttttaacaaagttatc

SEQ ID NO: 72396 - DNA, 2295 bp, Pseudomonas fulva 12-X
atgcgcatccagcacgtagagatatctaacttcagaaagttgctttctgtacgaattgacttcgctgatgagaccaccctgcttgtaggtgcaaacaacagcggaaaatcctcagctatgctggcactccgaagatttttgatttcgaagggttctgcctttcgacttcaggatctgactctttgtcatctcgcgaagattgacgagattggcagagagtgggagatcccgccggaaaactttgaacttcctacagccaaggactgggccgactggcttcctagcctagatatctggatctcagcagatcaaggagagttccacttcatccgcgatctcattcccagctttgcgtggcgcggaggacttgtaggaatgcgcttcctgcttgaaccagatgatatgaatatgctgtacacggactatcgcaaggagcgcgcgagggttgcagagcttgaggatgctttaggaacggaggacccgcctggtagcccgctgacgctatggccacagagccttcatgattacttgaaccgtcggctgggagataaattcaaggttcgttggtatcgcctggatccgcagcaacttaagaaacctgacaagtcgactcgaatggctcaaatgcagcaattgagtcctacttccctacctctggaaagtaatcccctcaatggattaattcgagtacatgagatcaatgcacagcggggattcagcgaccattcggatgacaatcaaggcgataacactagacccaacggtgcccgaaaactctcggaacaactcagatcctattactcccgacacctagatccaggtgacagcccagatatctcagatctcgaagcgttgcgggcgatagaagcagcccaatcggcattcgataccaggctaagtagcagcttcgaatctgctattagagaggtcgagggattgggctaccctggtcgcaatgacccacgtatcaaagtcgcaagtcgcttggcagcaactgacggcatgaaccatgaggcggccgtcctttttgagttggattcaattcaaggcgcccctggagcccctcctcttcatttaccagagaccgctaacgggttgggatatcaaaacctgatatctatgattttccggctgatgggttttagggatgagtggctaagaaaaaccagggccgccaacgcggaggtaatagaccgcgttgagcccatccacctcgtgctcattgaagagcctgaagcgcaccttcatgttcaagtgcagcaagtgtttgtgcggcacgcctaccaagttctatgccgagacgctttgcttgaacgctacccaaatctgaagactcagcttttggtgagcacgcactccagccatgtaactcacgaagtggagtaccagaaccttaggtatttcaggcgactcccggctgggatgtatggcatcggtgtaccggtatcgacggtctctaacctctctaacgtgttcggcgatggaacaaagacgaaggagttcgtaaccagatatctgcgggcacagcacgcagacatattcttcgccgacgccgtcatcttggtagagggctcagcagagcgaatgatgatgccgcattttttgcggaataagtttccattccttgaccgctgctacatcacaaccatcgatatcggtggtagtcacgcacaccgactaaggcctttaattgatgcgcttggcatcctcactctagttattacagacctcgatgcagggtttaataaagcggcaaaaccggtgcaaagaaacgctgatcagattacgaacaatccgacattgcggagctggatgaaactgatgcatctaggcaacacagtggatgagttgctcgaactgccagagaatcaaaaagagcaccagatcgacgacctgtactcagtacgcatcgcctatcaaacctctatttccacccacctgcccgctactggagaagcaatacaagccctaccaaatacctttgaaggcagctttgtgcttagcaacgctggtcactttgcggaaaaaaccaacggcactggtctgatgaaggccttcgtaaaaattttgaatgaagcgcaaacaccggaagccgttggagaaggttttttcaacgaattacgcgaaggaaagaaagcagaatttgtattactcgttttgggcgacaaaaacttccctagccttgaaatccctgaatacatcagtgaaggcctcaactggcttgagtccaaattgcgaagcaagcaaaaagagctactggtaattccgcccgagggcgcggaggtgacgccatga

SEQ ID NO: 72397 - DNA, 1848 bp, Pseudomonas fulva 12-X
atgagcgaggcagctgtcgcagatgccgacacccttatgcaggcttgcctgaatctggcaaacccgaaaagtttttttctttacgcaggtgctggctcaggaaaaacccacttactcgtcgaggctatccgcgaactcaaaagtcgcgagcgagaacgcctgacgttcgagggccggcgcattgcggtgataacctatacaaacgcagcctgcgatgaagtgcttcggaggctagagtttgatccactcgtggaagtctcgaccattcacgcgttcgcctggcgcctaattcaaggattcgacaacgagatcagagagtggctaaggatcaaacttgcccaagacattgaaaagatcgagggcgagctagcacgttcgagaggcgacaataaaacatctcgagcaaaccgacggaagctacaaagcaaaatacgcagacttgagactctagacgagattaccaagttcatttacagccccacagttgacaacagagagcgacaggctctcaatcatgatgaggtcatcaagttaactgcagcatttgctcctgaacgccctttgttggatgttctcgtggaccgctacccagttgtattgatcgacgaaagccaggacacccacgctccagtaatggaggcttttctgaaagtccagcaattagcgcaggcacgcttctgcctggggctactgggcgacaccatgcaacagatttacggccatggagtaacgcgccttgataaagcgataccggatgactggctgaaacctgaaaaggtcgttaatcgccgctgccctcgtagggtaatagatcttatcaacgtaattcgaagcgctgcagacacacatcagcagaccccgaagccagatgccattgaaggtgtagtgcgcatgtactgcattagtcaaagccaagaacaggcacaaaatcttgaggaaggtatcgctcagtcgatggctgcaatcaccgaggacggcgaatgggctaccggtcctgaaggccgaaaaaccttgatcctcgaacataagatggctggacggcggatggggttcgaaaagctgttcacgcccttatacgcgattgagcaccttcaaacaggcttgctggatgggaccttgcccgcacttcgcgttttcagcgaaggcgttcttcccattcttaccgcaaaggacgatcacttccttctgcttgaagccgtacgctctcgctctcccttactcagcaaggatgcaatgcaatcaacaggggatcaatcggcccacatgcagcgtgtagaggaagcgacgcatgccctgctctctcttttcgaaaaaaacgatccaacattgagcgaggtcgcaacgcttctgttgcaaacccagctgcttgatgttcctgacaatctggttggggctatggtgttgggtgcccctagtgaggctccagatcctgaagatacgaacgcgatgaccaactacgcctaccagctattccttgagcgtccattttcggagttggcagcctttgcgagttatgcggatggcctttcaccctacggtacacatcaaggggtaaaggggctggagtttccacgagtcatggtcgtcatcaacgatgaggaggcaggcggcttcttattcagctacgacaaattgctgggtgtaaaagaaccaacaaagactgaccgggacaacgagcgtgacggcaaggacaacgcactagcacgtactcgtaggctgctttacgtgacttgtagtcgggctgagaagagcctggcgattgttgtatacacaccccagcctatactcgccaagcgaaacgttgttgctgccggctggcttcaggagagcgaggtcgaaattctgtga

SEQ ID NO: 72398 - DNA, 1986 bp, Enterobacter hormaechei ATCC 49162
atgcatttaaaaaatatgactatcggtggttttaaaagtttttcatataatgaaccacaaaaaatttcatttgaaaaagacagaacagtattcataggtaacaatggaaccggaaagagtgcaattcttgatgcactaaataaattattcagtgtttcaaattcattccgaaccatatatccttctgaatttcatgttgaaaacgaagatgatcaaacccaaattaaaaatctcttcatagatgtcacatttgctttcggcaaaataaaagatgatgtaagtatcccttcgttaatagaacaaatgacactcgatgacggagaggatgtaatctttagggtccgacttgaagcatcattaagttatgaattttcagatgtcggcgatatagatgaaaacatctatatcattacagatatctcagaaactcccagcgatgattgcaaaataaaattatcaccattgattcgaaattcaattcaaatccattacgtacctgcgaccagagatccattaaaacaattaacttactcctcatcagcggttttgggtaagttaatgaaagcgattaactgggatgaaaatgctagggacgagtataaagagaaagcattagaactgattgccatcgcgaagaaaaacaaagagataagtttaatatcagagtccattaatagtggatggtcaacactttataaagagagtgtactttcaaatgcccaattagacttccctctaaactcgatagatgacttgatgaagttagttactttattcttaagtcccaatgaacaaggtgcaattatatcggctgaattacttagtgatggtcaaagatccctgatgtatcttgcaataatcaatgcattatttaacgtggaaataaaaataaaacacgcggctaaaggtgaatatagttttgataaatcaaaattaagactcccaatatttagcttaatttcattagaagaaccagaaaaccatttatcacctcattatctcggtaggataataaagttattttccaactatgccgagaaagattcattccaaatggtaatgtctacgcattcaacctctataatgtccagaatagaacctgaacaggttcgacatttttccttgaaaaacacttgtagtgttataaataaattagaactaccgttgaaatccgatgagaaatttaaatttataaatgaagcggtcaaatcatatcctgaaatatattttgctagtcttgtaattttagtggagggtgatagtgagcaggtaatactacccaaaatatttgaatcttataactttgacgcagatagtaaaaatattgcaattgctcctttaggtggtaggcatgtaaatcatttctggcgcttacttgagtctttaaaagtaccttacataacattattagatctcgacctaggaagaaatggtggaggatttgaaagaatcaaatatgccataaaacaattatcctctcataggaatgtaacttatttacattctgagatgcttgaccgattacctaattgggactcggagcaagatccattaacttttacaatatgttacaaagatggaaaagaagtaaatattgtcgacgagttaaaaaagcataatatatttttctctgctcctttagatatagactatatgatgattaattcgtttcctgaaatttattgtgaaatagattcagaaaacaatgaaaggggaccagaggttttgaagcaagaaaaaataattgaaaatgacataataaaacaagtccttaaagatggaaacaaagggaataaaaattataaacatgataatggttatttaacaaaatttgtttggtataattatagattccttggcagtaaaagcaaaccagcctctcacatacggcttattaataaaataaagggatcacttgtcgaaaggatgccaagcgttcttaaagaattagtagaaagagtgggagagattagccatggtagataa

SEQ ID NO: 72399 - DNA, 1671 bp, Enterobacter hormaechei ATCC 49162
atggtagataattctttaccacaatggaatccagaagaattcattgttaaaactaatgagttagaaagtattatttatgaacaagactcattatcaatactagcagggcctggggctggtaaaactgagatgcttgctcaaaaaaccatttatcttttagagcatgatatttgcccttggcctaagaaaattcttttcctaacattcaaaaacgaagctagtaaaaatgtcaaagatagagtattaaagcgctcacctgaggcaaatgacagatttctatctaagacttatcattcctttgctaaatctatcgtcgatagattcagattatcacttgatgaaaacataagacctaatgcaggatatgatgttatattcaagggtaagagcgataaaaacaaagttcatattagtgatgtaattaaatatgcgtcagcaataataaaaaacaatggaaaaattccgattttatatcaggaatgttttactcatatttttcttgatgaattccaagataccacattacagcagtatgagcttatttcattattattcttgaatagccaagtaaaaattatttgtgtaggagatctaaatcaaagcattatgctttttgctcaagcttatcctgaaatatatcgactagtagagacagattttaaacctaaaagaaaattactaattagtaattttagagccggcgttaaaataaaagaattcctaagccactttcaaccttttgtcgaaaaaggagtatttaatcagataacaccacataaaaataataactgcacaattcatcattttaatgatgatatcaatgagtcggaattcataactgactatgtattaaataaaattgcatctggattttcaccagaagacatatgtatactcacccgacaaaaatcaagcaactacagtgctaaattatgtgatcgattaaataataaaggcatcagtaatattgtttatgatacttttcaggatgcgatagcagatccattaggaattatctttagtttaatcctcgaatgtgcattgataaaatcacctaaggcttggtctgagttgttaaatctatatatagaactgaacataatagatgagaacaatgactctgataataataagttaataacgtttattgattatttttcaactactaaaaaagctacggctttcaacgactataagaatgttttagattttataacaaatataattgatcacataggcctcaatctaataaagagcaaatggccacaacacaaatcagttgaacatacaaaatacatttggacggagttagctaaacaacttcataaaatatactcaaataatattgacagagaaacaattgtgatgaatttctgtgggaagcaatcattaaaaataatgaacatacataaatgcaaagggcttgagtataaagccgtgatactaattggtttcgaggacgaggctttctggaattattctgatgataacttcgaagagcgatgcgttctgtatgtggcgtttactagagctaaagaagagatattaataacacaatcagattatagagactttatatctggtggcagaaaaaaaaccagtcaagaaatcacttcaaaattaagggataatttaatcgacaaatgcgggtttatactccacttacattag

SEQ ID NO: 72400 - DNA, 1683 bp, Amycolicicoccus subflavus DQS3-9A1
ttgagccgaatcgcggtcaagaacttccgcaatcttgtcgacatcgacgtacccctgacccgccacactgtgatcgttggcgagaatcggtcaggcaagagcaacctgttgcacgcgatgcgccttgttctcgacaacacgctttccggcgaccaccgacggttacggccggaggacttctgggatggcctcacgaccgcagacggagatccgaccgccagcggcgagaccgttgaggtgtccctagacgtcacgaatttcgaagacgaagcttccgtggtcgcaactctcggcgatgccctcgtgactggaagtccgttgaccgccagactcacctatcggtgggagcccgatccgttggttaatgaggacgtggtctaccgagcgcgcctgtacggaggcctcgacgaacagcccatttcctccggagacgtgcgtgatcgtctgatcactgtgttcatgcacgccctccgggatgtcgagagcgacgtcaagagctggcgccgatcaccgcttcgagcgcttctcgaagcggcgtcccagaacgcagcccctgccgacctcgaaaatgtccacaaggcgatgaaggcagcaaacgactctctgaacaatctgggcccgctcgtcacgctgagtaacgacatctccgccagcaccgcagccgccgtcggggcgaatcaggggctggaagcgaccttggccgcggcaccgccggacccgcgaaggctcatacgggcaatgcaactgttcgtcgacggcaacgctcaacggcaattaaccggcacgagtcttggggcattgaacgttctgtacttctcgctacttgagctgcagctcaagcaacgattggagagttcggaggtcgcgcatgtactacttgccatcgaagagcctgaggcgcacctgcatccgcatctccagcggctgctgttcaaacacctgcagcaggatgacgtcaatcggtccacaatcgtcactacccattcgccgcacatcgcgagcgcgacctcagcgcggaacctggtcatgctgcgcgcgacacccgacggtaccgttgcacacgctgctgccgaggcggacttgacccaggacgagtgggacgacatcgaccggtatctggacgcgactcgctcggagctggtcttcgctcgacgggtgttgctcgtcgagggcgtggccgagcagctcatggtcccctccctcgcacgcacgatcgacgtggacctggacaaggtcggtatttctgtgtgcgccatcggcggaacccacttcaccgcctacatcaagctgtgcaaggcgctgggaatcccctgggctgtactgaccgacggtgaccccaccatcaaggtcaccggtgctcgccgcaagcagctgctggaacagggaatcggtgcggacacggacgccatcttcgtcggcgcgaccacgttcgagcacgacatcatcgtggcatcggactcaaaccgctccgcgatcgtcgcggtgctgaccgaccttctcgacgacactgaggacatccgaactgtgaaaacctgggagcaagcgactccggaggtgaaggagttcctcgacatgatctctacgatcggcggcaagggacgattcgctcaaaggctggcgaacacgcaacttagcccgccagcacatcttgcagctgcactcaagtatctgttggagcagtaa

SEQ ID NO: 72401 - DNA, 1758 bp, Amycolicicoccus subflavus DQS3-9A1
atgacgggcctgcggcgggcgatagccgagctggagacaaaccccagacagcgggaagcattccaccatgagggccactgtgtcgtcctcgccccgcctggcagtggcaagacgaagttgctgaccacgaaggcggtctggctggcgaacaatgccgtcgcgccggatcgcgggctggcttgtatcacgctgacgaacccggccgcagcggagctgcgcacccgaatcagacgcctaggtcaaacagcgggacgcacagtcttcgtcggcacagtccactcgttcgcttggtcgcacatcatccggccattcgcttctgcagccgggtacccgaaattgtcaaagtacgcactggcaccacgcggagaggccaatgccgcgatgcgagaagccatccgtcgagtgttcagctcgcacgaggacacccgatatgtggactcgacggtaaggcgccaccgcaagctctgcctgaccgaggaagagtggaccgccaccggcccaggcattcgcgcagtcgccctcgagtacgaacgcctattgcggggcaatgactacgtcgacttcgacgacgttatcgccatggcggcacgcctggtcgaggagcatctcttcgtgaggacggttcttcacgcccgctacccatacctaatggtcgatgaataccaggacctcgcaccaggactgcaccgcatcgtcaccgcgctctcgtttgatgccggaaacacgacgctgttcgccgtcggtgacccggatcaggccatctacggatggaccggcactcgaccagaactcctacttgagctcgccgggcgcgagtctgtccaccgggtagacctgcgcatcaactaccgatgcggggcactcatcgcggcggcgggacggcgaatcctcggtagcgacggccccgaggccgtgacatcccgagagggcggctccgtcaccacccgatgtgaacctcgcggattaagcgcacaagcgaactacatagccggccggatcctggagctacaggcagacgaggtcccgctgcacgagattgccgtgctggctcccacccacgacgactgcgacgagctcgtcaccgctctccgaagtcacgacattccggtggcctggcgagcagacgcctactcgtcaacgccgctgacgaccacgctggagtcgttcgccgcgtgggcttcctgtggccgtgaggacagcggctacaagctaggtgatctcctggaccagtggcagcaacttggcgactgggaggtcctacgagtcggcaccgatgacgtcgtcaccgttcttctctctgcggcggcggacacttccgcaggcgagttcgtcgagaccgtcatgacgattatggagtcaacgggcgctctgaacgctctcaggtcggacgacgccaacgaacttgtccatatgcgcgaagcgctggacccttccggggagatgtctcacttttccgtgcgcgacctgggtcgccttcgccttcgtgacggacgcgtcgaggtatcgacaatgtccgcaagcaaaggactggagttcgaccatgtctttatcgcggcgttggagcagggcaaactgccgttcttcaactccgctcgcggctcggcagcgtggaacgaggatcgacgcaagttctacgtctcgttcacccgagcacgagaaacggtcgaggttctctactctggctggtacatgaccaaatggggatctaggaagagcaacggaccgagtgtgttccttcgtgaatcaggcttggtttag

SEQ ID NO: 72402 - DNA, 1821 bp, Methylomicrobium album BG8
gtgagaatcacaaaaatcaatgttcgtaattttaggggcattttcaacggagaggttcttctaccggagcatgcagtacttgttggtgacaacaacataggcaagtcaaccttattggaagctatagatcttgttcttggtcctgagcgactcagtaggcgcccagtcattgatgaacacgatttctatacaggaaaatatattgatttagaaggaaatcctgttccaatattgatagaagttgttgtaacggacctatcagaaaatcaagcaaggcatttccgtgatcatcttgaatggtggaacgagcaatcacaaaatctacttgaaggtccaccgcctgaagaaacagatatcgtacacgtaaaacccgctttacgtattgggttcgagggtaagtatgataccgaagaggacgacttcattggatcgaccttttttgcatctcctaccaaagaagacggcacccacgatactttccgaacctcggataagcgattgtgcggattcctatatcttagaacgttacggaccggaagccgtgcgttaagccttgagcgcggctcactgctagatataatactccgccttcacgatgataaaaatttcaagatctgggaggacgtgttgaagcaacttcgcgacctccctgtcgctgaaaatcccgaattaggtattactgacatcttgaacagcgtccaagtggcaatccgcaaattcatgcccgcggactccgtcagcaacccacacatgagagtttccgacctgacccgcgaagccctgcgccgaacgctaactgtgtttatggcgacaggagtcaaacgcgaagatggctcggactatgccgctccgtttcaacaccaaggtacagggacgataaacaccctggttcttgcgttactctctcttattgccgacctaaaacagaatgtgatttttgcaatggaggagcctgaaattgcgatccctccccacacgcagaagcgaattattgatggtgttcgaagtagatcagcgcaggcccttttcacctcgcactctccctatgtgcttgaagaatttccccctgagcagattgtcgtcctcaagcgacatgagggacagctgacagctgtccaagccacatatccaccagcagtaaaaccaaaagcctacaaagaagagattcgtaagcgtttttgcgaggcgcttcttgctcgtcgagttttaattgctgaaggccgaacagaatatgacgcctggcctgctgcagcgcgacgtctccatgaactataccctgaagagtttcgcactgttgaggccatgggagttgccatcattaatgctgcaacagatacccagatcactcctctgggaaattacttcagcatgctcggtaagactgtatttgccgtattcgacaaacaaggggcggaacaaaaaacgctgattgattcttctgttcaatatcctttcgaagcacaagaaaaaggattcgagaatatcgttttaaacggtactgctgaatctgcgctccgtcgattcgctatgcagatcgtcgatgggggagagtggccaacacatctaactgctcaaaaacctacatcaacaactcctctagctgatcttcgtgaagcattgagatcatatttctcttgggcaaaaggcagtggcgatgccgccgatttgcttgcgatatgttcaaaggaagaaatgccagagttcatcgttaatactctcatttcgatacagaagatcatcgagcctcccgaggccacagatctgtctgttgatgaggatgatgccgaaactctacctgagggcgaagcttttaccgtatga

SEQ ID NO: 72403 - DNA, 1779 bp, Methylomicrobium album BG8
atgaggatgatgccgaaactctacctgagggcgaagcttttaccgtatgagggcaaagtcttggaactgactgagcatcgtcaagctcttcttgcaaccgagggaaatatccttgtccttggtggaccggggtcagggaaaactacgattgctctgcttaaagctgatcgcgaaattcaaaccggcaatcttaaaaccggacaacgaatactgttcttgagttttgctagggcgactatagccagagtggcacagcaggctggtaaattgctgacgatcgaaggtaaagagagactcgagatcaatacgtaccatggatttacatggaatcttttgcgcagtcatggctacctactgaggaaaggtcgcggtattcaattgctgctacctccagaagctgcagctcgactttctggaatagaaggggatgcgcgttcccaagagaaatatagattattttttgaagagggcctgcttcacttcgatctgtttgctgaaattgcaagctcgcttctctctcgcagccaatctctatgtcgcatcatttgcgatgcctatcccatcattattctcgatgagtttcaagataccaataaagaagaatgggccttaatacaatcgctgggtgagcacagtcggctgatcgcactagctgacgccgagcagcgaatttatgaatttcgtggcgctgatccaatgcggattagcgaattcatcgagcgttatagccctacatcattcgactttggtaacgaaaatcatcgcagtaggggaaccgatatcgccatttttggaaacgaccttcttacaggagctaataaatcaaagacatacaatgatgtaaacgtttccaaatatggattctacggcgggtgcaatccgcattatcctgtaaagacaaccctgatagcgagcctcaagcggcagcttaaatccggaaaggatgactggtcgattgctgtacttgttccaacaaaaaaattgatgcttcaggtttcagactacttaggggcaaaatcagacaatttaccctcgttgcaacacgatgttgctcttgatacggaagccccggccctggctgcggtattaatagcgtctcttttggagggagctcccacagcaagcgaaattgctcagcgccttctgaacgatctctgcactcacataagaggccgcaaaggaaataccccgttaaaccaaagtgaattggccttggtgaacgcgctaggcgatttcctgcaatccgggacaattcggggcattaaaagaaagcggattgtagaaacggctaagttgctcggggaacagaggttcgagttgaaactatccggtgatccgggtaaggattggctgagcattcgagatatgttgcacgtctgcaatgcccaggagttcatgcagatagcagacgacgcaaaataccttcgcttgctccataaaggggcagtgctacgatctcggctcaatgagttgtggaggaaatcgggtagctatattggcgctgccgccgccgttcgtgatgctttagtacaggagcatttttctgcctcgttgaaagagtggcggggcctccatgtcatgacaatccacaaatcaaaaggtaaggaattcagtgaagtcatcatttatgagagccgccatcatggaaaaatcgtatggcagggagccgatgctaaagctcatgcacaggctaagcttacgctcagagttggtgtaactcgagcaatggaaaaaactacaattttgactcctggatcagatccatgtttgtttctttaa

SEQ ID NO: 72404 - DNA, 1977 bp, Delftia sp. Cs1-4
atgcatgtcgagagcatcgtcatcagcgggtttcggtgcttcggccctcatccgacgctgatacatctgagccaaggcctcaccgccatcgtcggtccgaatgcgtccgggaagacggcactgctgcatgccttgatgcgtctgttcggtgtcacccgcgcgcagcgcaccatcgtcccctccgactttcacatcccattggccgagggcgaacagccgaaatcccgggccctcacgatcgacgtccggctgagcctgccggagttggcggacggctcggcgacagccgccacagtcgcgccggtctttcgccacatgcgcatcgaacggcccggcggcacgccgatctgccgccttcggctgagggcgcgctgggacgacgatggcacggccgagggcaccgttagtcaggacctgtgctggatctccaccgccgacgaagctgtgcgcgacgatcaggcggcgccggtggcccccggcgatcggggactgatccagctcctttacaccccggccagccgggacgccgccacccagatacgagccagcacgggcgcactcgcggcccgcctgcttcgggcgatcgagtggtcgcctgacacgcaacgcgtggtggatgccgcgaccgagcaactgaccacggcattcggcagcgagaaggcgatcaaggccatcagcgaatctctttcgaagcgctggggaacactccacgatggtgacatcgattgcgaccccgagctcagcctgatgagccggcgcttcgaggaggtcgttgcccgcatcggcgtgctgttcaggcgcgggcccgccggcaaggatcgcgggctcgaggcgctgagcgatggccagcagtcgcttttctacttcgcgctggcggccgcggtgttcgatgtcgaacgcgcggccgtcgcggggaccatcgaaggtttcagggccgaggagttgagcattcccgccctcacgctcttcgccgtcgaggagcccgagaaccacctcgcaccctactacctctcgcgcatcgtccagcaactgcgcaccctcgtggacacgggcgccggccaggccgtcgtgtccagccattcgccctccgtgttggcgcgcgtcgtgcccgacgacgtccgctactgccgccgcgacaacgcaaccggcacatcctcggtgtcaccgatcccgctgccgacgggagaggtcgaagcggtcaagttcgtgcgcaacgccatgctggcgttcccggaactctatttcgcccggttcgcgttgctggtcgaaggcgactcggagcgcatcgtgctgccccgtctggccgaggcattggatctcacggtcgacccctcgttcgtggccatcgtgccgctcggcggacgccatgtgcagcacttctggcgcctgctcaaggggctgggcattccgtacgccacgctcctggacctcgatctcggccgggaaggcggagctttcggccgggtcaagtacgctttgcagcaactcgttgcgctcggcgtgccccgcgagagcatcctcacgacgggaagcggctcggtcttggacgaggcggaactggaagccatgcacggctgggttcccgacctgacgaatcttcagggctggctggcttacctcgagcggtcttcctccgtattcttctcatggcctctggacctcgaccttgcgatgctgtctgccttccccgcggcctacgcagcaaccatcgagggcaccgggccgcgcatgaccaacgaggccgccgccgaggtcgtcctcggcacggccggcccggggctggcgagctacatcggcaccgcggaagcgttgcgcgtgcacatggccgcctaccgctaccacttcctgacccatagcaagcccgccacgcaccttcgcgcgctgacgcacatcgatgccgaggcgctcaaggcggggatgccggacaccttgcggcgggttctgaaccacatcaccttgcagctctcggggctctga

SEQ ID NO: 72405 - DNA, 1911 bp, Delftia sp. Cs1-4
atgcccttgcctgcgcgccgtatccgctccgaggactggcggcccgtcggtctcgacggcctggagcacaacgccctgacggtcgtgcgctccgcaaggaaccattcggtcctggccggccctggcgccggcaagaccgaactgctggcgcagcgggcggccttcctgctgcagaccggcgcctcgccggcaccgcagcgcattctggccatcagcttcaagcgcgatgccgccagaaacctggcacggcgcgtgcgccaacggtgccatccggaacatgcagcgcgcttcgattcgttgaccttcgatgccttcgccaagagcctggtcgaccgcttcggccaggccctgccggagcgctggcggcccacgcccgactacggaatcctttttcccaaacgcgcgcattgggaggattttctcgatcgcgcgagcagctcgctgaccaagccggaatcccaggcggcggtccgggccttgtccgtcaaggacttcgagcgacgtcacgtgcttgcggaaccaataccggaagccggatggcccacgaatacggccgggcgctgggccggccaacgcttctgggacgagcagctgcgcggcgccgcgcgcagctatctcacgtttccgatgctcagcaggcttgccgagctgctggtacgggtgaacgcggccgcgcgcaatgcactggccctgacctattcgcacgtgttcatggacgagttccaggacaccacgcaggcgcaattcgacctggtgcaaaccatcttccacgggacccgcaccgtaatgacggccgtcggcgacaacaagcagcagatcatgcgcttcgcactggccatggatgatccgttcaccgcgttcgaggaagcctacggcgctgagcgtatcccgctgcgcagcaattaccgctcctcgcccgagctcgtgcggatgcagcacgtgctggctcggtcgctcgacgccgaagccgtggaaccccaatcgaggaccgcttcgagcattccggatgcctgctgcgcgatctgggactttcgcggcgcgaacgaagaggcgcagcacctggcgcggttcatcgctgcgcaaatgcgggagcatgggctcaagcccaccgattttgtgctgcttgtgcgccagaaggcggacgactatgcgggagttctggctcctgccttccaggccgctggcatccccttgcgcaatgaggcggcgcaagtcggggcgcagatgctgcaggagctgctgaccgaaccgctttcggacgcggtggtcctgttgctgcgcttcgcaacggcggccagcgcaggacgggcctggagtgaatcgctgcacctgctgagcgagctgcatggcgtcgagcatgcggacgagcgcgcacggcggcggcaggcgagagcgctggatgccttcgcgcagcagttcctcgagcgcttccctctcccgccgcagacgcttgaagccgctcgtcccatcgtccaggagatcgtcgccttcctgggacgcgaacgtctcgtcgccgcccatgatccctacgcgcatggcgactggttgcagcaggtggagagcagtgtcgcgcagcatctgtggtccagttccgtcggcaagacgcgctggcccgccgcgctcgacgactatgaaggcacccatgcgcttgcgctcatgaccttgcacaagagcaagggactggaataccacacggtgatcttcctcgggctggacgactcggcatggtggagtttcaagtacgacagcgcggacgccacggcgggcttcttcgttgcgttcacgcgggccaagcagcgcgtcgtcttcacctacacggccgagcggggcgcccggcgcgagatcgccccgctctatgccatgctgcatgcggcaggcgtacagacactggccgtgcaggccgcaccttga

SEQ ID NO: 72406 - DNA, 1935 bp, Delftia sp. Cs1-4
atgtacatcgaacaggtcacgctgaccaacttccggtgcttcggtcccgaagggaccaagctttcgcttgatgcttcgttgacggctctggtgggagccaacggaagcggcaagaccgctgtgatgcagtgcctgcagaggctgttcggcatcaccgctgatcagcgcaggctgcggcgccgcgattttcacgtgccagcgcacgagaaagcggccccgctgcagcgcgagctgagcctcgaggccattttggtgttccccgaactggaccacggcatggacacaacggcggttccagagttctttcagcagatggccgctgacgacaaaggcaatctgaaagtcaggttgcgcttggaggctacatgggttgacgacggcacggccgaaggagcgatcgaggagacctacgtagcggttcggtccttggccgactacaagactgaagattgtgtgaacttgaaaggcgcggaccgttcgcgaatccagttgctctacatcccggccacgcgcgatggtgcctcgcaggtgtcggcgctgctgaagggtcgactgtggaaggccatccagtggtcagggaaagtcaagaccgcgctggaaggcgccggcgcgacgttgaacaccgtcttcagggaagaacctgcggtcctgcgaatcgaggagaaggtgaagcgccgttggcaggaccttcacgatgctggcactgatgcgtttccgatgttccgtccggtggacacgcgctggcataagttcattggccaagtggatgtcacctttcagcctggagatgacggacgcgaccgtgacatcaacgaactcagcgatgggcaaaagtcgctgttccatctagcgctgacggctgccaccctggacgctgaagcagaggctgcaaagggcgacgcgacgcacggctttgttccaggaagcatcgctatcccggcgctaacgctcatcgcgctagaggagcccgagaacacgctggcgccgttctacctgtcgcgcatcctcgcccaggtagaagagctggtcggcacggcccaggctcaggcgatcatctcgagccactctgccagcatcctgtcccgcgtgaagcccgaggcggtccgccactttcgcttgaccgaaaacaggacagcccgcatccgtgccgtggagatgcccacagagctggaggatgcgtcgaagtacctccgcgaggccgtgcgcagctatccggagctctactttgcgaagttcgtagtgttgggcgagggcgccactgaggaagtggtcatcccgcggctgtcgaaagccatgggtgtcgaaatcgaccgctcgttcgtggtcgtagttcctctgggtggtcgccacgtgaaccacatgtggaagctgctcaacacgctagacatcccgcacgcgacactgctggacctggattggggccgtcagggtggtggatgggggcgagtcaagacggtcttgacgcagctaatagctaacggcacccctccatccgcgctattcaatgacatcgcagttgacgacccccaagccgagcgaaaccttgccagcttcgacacgatgttcgacacgggcaacttggctgcatggctatcgtttctacaagggtacggcgtgttcttctccgtgatgctggacttggactacacgatgctccaagcatattacggcgcgtataccgcactggaagacggaatgcgcggcccgcgcgacggcgttgacgcgcgggatgcagttcttggggaaggcggcaatcacaccgcatacgctgccgaccaggacgacgcgcttcgctggtacaggtatctgttcctgggtcgaggaaagccaagcacgcatgtgcgcgcgctcagcaagctttcagacgaacagctgaaagccactgcgccgcatttcctaattacactcatcgacgtgatgcgaaagaacctctga

SEQ ID NO: 72407 - DNA, 1896 bp, Delftia sp. Cs1-4
atggacttcgctcgaagggttacagcggacgactggacgccgcgtggaattcccggtctagagcccgcagcatggacggccctacgtagtacagggaacacgtcggtcgtggcaggcccgggcgcagggaagaccgagttcctggctcaacgcgcggtctatctgcttgagacaggcatttgccggccgccgcatcgcatcctggccatttcgttcaagaccgacgcggccgccaatctcgctaaacgcgtgcaggaacgatgtccgccagagctggcgaaacggttctcttcgttcactttcgacgcgctcacgaagagcttggtcgatcgcttcgccaacgcccttccttcggtgtggcgaccgaccagaccctacgacgttctgttcccagacaaagattacttgagggagttccaacgtggggcgattgcagtagcgcgcgaggagtggcgccacgagattggacggctggacctgttcagatttgaagcagacgtattggggaacagcaagctgccactggttgcagcgaagccagcgagcgcccgagagctgctgctgaactattggtgggcaatgtcgcttaagcacgcgcagccttccaaactcaccttctcctgcttgaaccgcctggctgagctgctgctgagatgttcgcccaacatcctggcggcgctgcggtcgacgtactcgtttgtattcgtggacgagttccaagacacgacattcgcccagtacgacttcctgaagtcggccttcatgggcagctctgcgagcgtgacggtggtgggtgaccacaagcagcgcatcatgctgtgggccggcgctcgttctgatgccttcgagcaactcgaggcggacttcggcgcgcagcgggtgcccttgctgttcaacttccgctcctcgccggagctggtgagggtgcagcatgttgttgccacggcgatggatgccggcgccataccgacacagtctcaagccgtagctgagctggacaaggacgtggtgcaggtctggtcgagttctaaccgccagggcgaggccgagtatctggcgacatggattgccatggatatggcggcgcgaaagaagcaaccgcgcgactacgcgctgctggttcgccagaaggcagaggtattcgagcgggagctgctccctctatttgctgcagccggtctggtcattcgcaatgagagcaagttcgttggcaaggtatccatccaggacttgctggtcgatgacatagccctggtcgtgctggccatgctgcgccttgggacgcgggtgaaggcgccgacagcgtggcagacggcttcgtccgcagtggagttcctatcgggcgtggactcggcggacgctttgggtactcgcagtgcggaggccgcgctagagaagttcctggccgagcttcggacattcctgagcgcaaatcctccgacgcaggcctccgctaccgctgcggtcgacaaggtgtacacgttcctaggcatggagcgcatcgttcgctcccatgtccgctatcagcgcaacgatatggctcagctcattcgggaggggttgaccatccatgttgccgagtgcgccggcgccaccggtacctggcctgcctgcctggacctgtatgagggcgcagaccaaattccgcttctgaccgtgcacaagagcaagggcctcgagtacgacacgattgccttcatcggccttgacgacaagtcgtggtggagccacacgcctggcaaccccgaagggctggcaacgtttttcgtcgcgctatcgcgcgccaagcaacgggcggtgtttatgttctgcaacgagcgaggcaaccggcaaaaggtcgctgacctttaccaactgcttacctatgctggcgtcgtagaaacggttgtctgctga

SEQ ID NO: 72408 - DNA, 2070 bp, Streptococcus oralis SK255; identical to SEQ ID NO: 71808

SEQ ID NO: 72409 - DNA, 1728 bp, Streptococcus oralis SK255
atggtaaagagtgaggagtggtttcctaaaggagatatcattttagaagagactgcattaggagccgtcaaagatgtgactaactgtttagtcattgctggaccaggtgctgggaaaactgaattactagctcaaaagttagactatctattctctacaaataaatgcgtttctccgaaaaaaattctagcattaagtttcaaaacggatgctgcatcaaatttgaaagaaagagttaagaaacgttatggtgatgaatatgcttctcgttttacctcattaacctattcggcttttgaaaagagaattttagaccaatttagagatgttctacctgaggatatacggccatcaagagattatttgattgaagattggtatactataaaagaactactctctatgaatggaattaatgttaatggatggagaatgtcagatataagaagatatgtcgaaaacatcatacttaacaatggggataatcacaagtttaaaactgacttactaaaaggaacacaagataataagccggtcctcttgtataggcaaataacaaagttgagtactcaaataatagatactaacgaatacatccgtaaagcacttcaaatgacatacgattttgtatttctagatgaatttcaggatactacatatgcccagtatgatttattaaaaacttgttttttaggttcgtcttgtaaattaacagcagttggagatgataagcaagccattatgagatgggcaggtgcaaagcctgatatttttccagactatattcgagactttaatccaaatgaatatcaattgttgatgaatcaccgctctgtacctaagcttgtagaatttcaaaaagaggttcatcagatattaaatagtaatcacagttctattcagacaaataattatccagaatttcaagagggtgaaataacattatttgaatttgaaaatgaaagtttagaagctaagttaattgcaaatgatatagaatcaaaaattcaaggaggtatacgaccatcagaaatttgtatcctagcaaaacaaaaggttggtatttatagtttcgaattgatatctatattaaatagcaaagggattaaagcaagaattgaaaatgaatatcaggatattttaaaagatcctacgtgtaacctattattagatttaatatcatgcagtcaaggaaaacgagatcctttaatttgggaaaatattagtaatttttatggaaatatcaatggaatagatgagttaactgatgaattaattttagcaaaatcctataaggagattgacaatatagttagtgatattacttacctaatttcaaattttattcccaatgaagaaagtatgctaaaattaattgattgtattattgaaaaaatagatgaaaaaagaattatttccaatttttcaacatacaatggaaaaagtgacctagatatcattgtcaagaacttttcaaagttattatacatagaatattctcaaacacaaggtgaatggctagatacagtctctagtttcaagggtgaaaactcaattccaattatgactatccataagagtaaaggattagaatatgaggtagtctattttctaggcttggaggattctgcattctggagttttaataatcagccggaagaagataaaagtgcattctttgtcgcactttcaagagcaaaaaagtcacttaatattcacatattgtaa

SEQ ID NO: 72410 - DNA, 624 bp, Vibrio anguillarum 775
gtgcctgttgacgcatttgggattactgtggctccacttggagggcgacatgtaaaccatttctggaggcttcttgaagggctaaacattcctcatattacacttttagacctcgatgtaggaaggtaccaaggtggctggggacgcatcaaaacaaccaatgatcagttaaaactacataaacctgctcttcagttaactgatggatacaaaagcatcccaacatggaatgatcctcagcataaaattagagcatttcctcattatctaatggaattggaaaagcgtagagtgtttttctcttatccaatggacttggatttcgcaatgctcagcgcttttcctaccgcatttaatatagaagcagatgatcaagttgaaccagaactcccaaatatcaaagcggtactaggtaaatcttgtactgaagcttcagagtatagtgatgatgagcagaagttgtttattacgtatcacaagttattcaaagttgggagtaagccagcggagcatattacagctctctctagattatctgatgaacaactcctagcacatattcctccgtcattgggacggctagtagatgctgcaaaagaaatattgttggtatccgccccatga

SEQ ID NO: 72411 - DNA, 1647 bp, Vibrio anguillarum 775
atgattagagtcgagagttggcaaccagctgatggattagtattggagcctaacgcttatagagcagctaaagagcgtgaatacagcttagctttaaccgctggtccaggcgctggcaaaacagaaatgctcgctcagcgagctgactttttacttcgtacaggctcatgtcgctaccccaaacgtatacttgctatttcatttaaggtagatgcaagtagtaatctaaaagaacggatcaagcgtagatgtggtgctgagctttcatcacgttttgacagctatacattccatgcttttgcaaagcgaataattgaccgttttcgtccaatattaactggggatgaagccttagagcctggtttcacaatcggtcccaaaatccttcacaagcaaattgattttacagatctagttccgcttgcaataaagatattaaaagaatcccctgttgctagaaacgcattgaggcaaacctatacagatgtttttttagatgagtttcaggattgtacaaactatcagtatgagcttattaaggtagcctttcaaagcacagacattcgccttactgctgtaggcgatacaaagcaaaaaattatgggctgggctggtgctcttgacggtatttttgaggcatttaaagaagacttccaagctgttccactcaatatgtaccgaaactttcgttcacagcccaaacttcttcgattgcaaaatgaaatcgtcaaaattcttgatcccgcatcagtgatgcctgaagagcaaatcgcgggagaagaaggccatatacaagttcacccttttcagaactgccaagaagaagccgattatctttcagagcaaatccaaaggtggatagatgaagaaagtgttcctccttctgagatagctgtgttaatcaagaaccaacctgaattatatgcaatgaggcttatggttgctctacgtgatagaggtataccatataggaatgaacagcagttgcaggacataactgttgagccagccgcacgcctaattgtagacttcctattaagcacttttggcaagcaggaaccttcagcatgggttcgcttaatggaaaagttagttcccttcactgatgatgacgatgaaaagggtgaactggtccaaaactggcaacgtttcattctagaagagaaaaaggcgattaatcaaaatcctatagttcctgaaaaccccaaaaggtgggattgcttgaagcgtttcattgagaaagtagggttccaagaattaatgtctctgtcacatgattatgaaactgagtcacgtttacgtgaggttctcaatgatacttgttcacagatagatcaattgatgtctactggactcgatctccaagcgtccctgaagcgttttgaggatgatcaagcagttagaatacttacagttcataaaagcaagggactagagtttgattctgtcgttctactaggcgttgaaactgaaagctattggggaaacccagatgaaaacttatgtgcattttttgtaggagtttcaagagcaaaacgaaggttgttgctaacacatgtcggctttcgctctaggcctgctggtcactatggaagatgggatacccaaaggcatagacaagaaaggtttttagggtgtctgatataa

SEQ ID NO: 72412 - DNA, 1818 bp, Methanosalsum zhilinae DSM 4017
atgttcctaacaaaagtccagattgaaaattttcgtggtgttagttcattagagattgaatttgatcatgacattaccgttctgattggggaaaataacagcggaaaaacttctgtactagaggcattacgcataggtatggatttaataaagtctgatcgaacttttaatttttcagaatatgatttttaccgtgacaatgaaataaagaagaaagagcagtttttaccaataaatctcacatttacatttgaggaaacagaagaacatcaatggaacgataaaatcgtacaatcattaaacgaggtaattgttggtgatgattactcaaagattaaattgcgtataagtggttggtttgatgaagaagatggtgaattaaaacaaagttattgctttttagacgatgctggtaatgaaatggtaggtaagcagtcttttcttaaagaaataagaaaactacgtcctttttattatctttctgcacttagagatgcaaaagaagaatttcgtagccaagctacattttggtcagcttttttaaaaagtaaaagcctaaatgatgataccagaatcgaattagaatctgaactagaagaagtaaataaaaaaattgttggttctcacttgtcatttcaggacgttgttaccgaagtaaagcagctttcaactcttatttctgtaggagatgctaataatgttagcatagatcctaaaccagctgatttttataaaacaatacgatacacagatgtaaacattcctaccgtcactaatacaaaagttcctatctataaccatggagaaggtactcagagtctttgcgtgcttcttctttttagtgcatatttaaaaacccggataaaagtcgatgtaaatcgtttagcagagccaataattgcgattgaagaaccagaagcacacttgcaccccaatgcaatccgtgcaatttggcctattttaggtaatttgccagggcaaaagattattgcaactcattcaggtgacattctgtcggaggtgcctgttgaaaatcttagaagaatgaatagaatgtcaaatgtatgcgaatgcaatataattcaaaaggattgcttgactcctgaagagttgaggaaatttaatcaccaagttagaagaaatcgtggagaattactatttgctaaaaaatggttacttgttgagggtgagactgacgtttctgtagtgtccgaatgtgctcaaatattagaaattgatatacatcaatgtggtctgcgaattgtcgaatatagtcaagcaggtggtcctggtttatttatcaaagtggcagattcccttggtattgattggcatttgttagcagataatgatcaagccggagataagtatattagaagtgcaaagaatttgttgaatggaagagacgagtctacatatattacaaaactttctgagtcaaacatggatgttcttctttgtgttgcaggttacggagatccttatttagatggaataagtactaatactactacttatccaactgctacttgggaacaagtattagaagaaataaaagaaacttttcccgagaaaccaggtcaagctttgaatgtagccagaaaactagaagacagatctaatcctgaaattacagcagaagaggaaactcctgaatattggaatcaggtatatgcttgcctcaaaagacacttttcaaagcctgctgcttcacttaatgcaattatgttaattaaagatagaggagcagatggtgtcccagaagaaataaaacagattcttgaaaaagtcaatggtatttctggaggtgcccaatga

SEQ ID NO: 72413 - DNA, 1860 bp, Methanosalsum zhilinae DSM 4017
atgatatcagtttttcagctaaatgaaagtcaacgccaagcagttgaatggggagagaaatcccttctcgtacttgccggaccgggatctggtaaaactgctgttttgacgatgagaatcgcaaacattataaaaaacagtcccgatgaaaatttccgtatccttggtctaacattcactgtgaaagcagccaaggaaatgaaagaccggataaatatgctgcttgggaatatggataatagagttcagctgcgtacctttcatgcattttgtactgatttattgcgtcaacatgggagtcatctcaaccttaagccggacttttcagtgataactgatgaaaaggatcgaattgccatccttaaggaacttgatgttgataatcctgaagatatattaagcagaatagataccatgtttactcacgggatatctgttgaggaactaccaaagtatttcactcctgaaaatcaaactgagtgttacgatttacaaacaatatttaatcaatacattcaagcactttcaaaggaaaatcaactagattttgggtctatgctctacttcacaagacaacttcttgaaacgaaaccacgcattgctcgacaactaagaacagtgtacaagtatatctgtgtagatgaattccaagatacaaatctagctcaatatttaatactcaaattgttagctcccaccgaaaatgcaaatctttttattgtcgcagatgaagaccagattatcttccagtggaatggagctgatccaaaaagattggaatctcttaaaagcgattacaatatagaagtcctgcaacttccatataattatcgttgccaaaaggaaatcgtagaaatagcaaataagctcattgaacataattcctatagaatccatacaaaaaaacctggaattccgtttagtgatgaaagtggtacagttaaattaacatcatatgaaaattttgaccatgaactttcaggtttagttgatgagattaacgtaattcctctaaaaagtagagataaatgtttattgatagcaagaagcaataaactacttactgctgcaaataagtacttaaatgaacatagtataaatgcagaaatcgtcagcaagaatcaagatttttcaagtcctattctactgacaatgtatttttgccttaaattggccaatgcagctaactctcgtagtgttctcaacaagctttgtgcatcagcaactgacataaacggtttagtactatcagctgaagacatctctgcaaaagcacatgttgaaggtagttctttgcttcgtgctttttttgatactgcttctcaaagtgaaatattgaatccagtttgtaatgccggaatcagttatctttgtgatacaatccaatttcaaaaatttattgagatatacattaatcatttcgattacttgaatactgacgatgaaaaagatgatttatttcctgattacaaagacgataaagaaaattggacgagaattgcacaggacattgaggatacttatgaaggaaatgttggactccacgtatttctccaagaaatggatttaacgcccaagttgaagtcaattggaaaagattgcgtccgattacaaacagttcactctgcaaaaggaatggagttcgatcatgtttttattataggattagctgaagagcagttcccaacttattttgcaattagaagtggaaataaatcaatagaagaagagagaagaaactgttttgtagcaattactcgtgcatcaaaatctctgtatttgagttatgcaaacgaatattttggatggcataagcaaccttctcgttttttaaaggagatggggttgctaaatgattaa

SEQ ID NO: 72414 - DNA, 1794 bp, Sinorhizobium meliloti SM11
atgaaaatttactcagtagaggtcgagaatttcaggggcattcggttcgcaaaagtggtcttgcctgaccatgcggtcctgatcggagacaacaataccggcaagtcttccttgcttgaggccattgatctcgtgttgggtcccgacaggctgagtcgacgcccacccgtcgatgaacatgatttctatgaaggcaaatatcgtgcgattgctgtggaggaaggcggcgacggagccgggcctcccgtggcaccaaagatcaatgttgaggtgacgataacaaatctctcggatgagcagcaggcgcgcttcggcgaccatatcgaatggctgaacaccagcagtggagcactatatgacgcacccgaccctgcgggcgttgatgccgccgacgttactgccgctctccgattcacgtttgtcggcgaatacaaatccgacgaggacgacttcgacggtgcgacctatttcagccgcagccttgacgacgacaccccaacatccttctcaaaaaaggacaaacagcactgcggattcctgttcctgcggtcgctgcgaacagggtcacgagcgcttagcctagagcatgggagtcttctcgacatcatcttgcgtctaaaggagattcgcccacagatgtgggaagacacgatctcggcactcgccagtttcgacgttgcaagcgatccgacgctgggcatctcgggagtgcttgagagtatcaacaattcgctgaagaagtatgtcccccgagaatggggtgtgaagccgcacctcaaggtttcgagcctaacccgcgagcatttgcgcaaggttgtgacggcatttattgcgacgggcaacggcgaccatgccgcaccgttctttcgccaagggacgggcacgatcaacatgctggttctggcgatgctatcccaaatcgcagaggataagcagaacgtgatatttgctatggaggaggcagagacggcgattcctccctacgcgcagaagcgcatcgtccatgaactgcgcaagctctccgcgcagtcgatcttcacctcacattcgccctatgttctggaagaattcagcctcgacgaaaccgtcattctgtctcgttctgacgatggggtcctgggtcagtctaggatcacacttccggatagcgtgaagcacaagcgctatagacaagaatttcggacgcgtttctgcgagggcctgctttcacgtcgtgtacttatcgccgagggagccaccgaggcgacatccttccccgtcgctgcgcggagattggcggagttgaacccggcgacttacgcgcccatcgaagcgctgggtgtctgcgtgatcgacgctggcacggaaagccaaatcgcggatctcgctggtctctatagaagtcttggcaagcgcacgttcgccatttgtgacaagcaaacggaagaggccaaggctgccatcgaggctcaagtcgagcatcttttcatgcacgaggagaaaggtattgaagacctagtcctgaacaacaccactgccgaggcgctagaacggttcgcggatgcacttccatggccgcctcatctgcttgcgaaatttcccaatccgaaggcggaggccgctgccgccttgaaggagtacttcatcaaatcgaagggtaattggggcatcgccgaattccttgctcaatgcagcgaggacgagataccggaatggctacgcgatgcctgcctcacgctgaagaatttgtgcgatcctcctccgccgccacccgacgatgacgaggaagaccagtttgctgatgtcttcggttag

SEQ ID NO: 72415 - DNA, 1824 bp, Sinorhizobium meliloti SM11
atggttgacctcaccgaagcgcaaaaggaagtaatccgcacggacggttatcagctcgttaccggaggaccggggtccgggaaaacgacagtctcaatcctaaaagctgccaaaatcgcgcgcgaggcgctacgtcccggacagcgcgttctctttctgagctttgcacgcgcaacagtctcgcgtgtgctggaggccatcgacgaagaaaacgaaatctcaagggaagagaagcagagcatcgaagtcgatacttatcacgctttcttctggcgcatcctgaagacccacggttatctcgtcggccttcctcggcgcatgacgattctgacgccgccaaacgaggcgattgctttgtcctcagtgcgtaacggctacaaggcgcagtcaagactctcgcccgaggagaaggtggagaagaaatcacgcgaagaagctgagcgtatgcggcttgcgacggaaggcaagatctgtttcgacctgttcgcagatcgggtggcaaccctgctgcatggatcacagaaggtgcgggcgctgatctccacaatgtatccgtttatcattctggatgaatttcaggacacgagccgcgaccaatggcgggtcgtgcatgctctcgggatggaaagcacgctcatcgcccttgctgaccctgagcagcgcattttcgattttatcggcgctgatccggcgcgactggaccatttcaaggcagccttcaatccgtctattcacgatctcgctggcgataaccaccgcagcaaagataccgaaatcgtgttgttcggaaacgacatcttagctggaagatttcgccaaggcgactaccaaggagtcgaatgcgagggattcgaatcgaacaacaaccaggcgttcgcgactttggtgacacaggtgctccaagcgcgtagacgcttgattgatagcggcaagcgcaactggtcactggcgatacttgtcccaaccaaacgcatgacgcgcctagtttctgatgtgttgcgcgagccttttggcaacttgccagcaatcagtcatacagcttccgttgacatggaagggccgatcctcgcggcggacattctcgcttttctgctgcaaaaaaggctcgaccccggcagctttgacgaactcgtgcggctcttgtgcagctatttccacggacgcggtggtaacgcgccaacaaaaacggacatgggcgaagcagctcgccttcaaggggcattggtaaagtggaatgaacgtctgaccaagggaaggtcggcgcctggaaatagtgtgttgaacgcgactgctttggtctacgaagcggcaatggcggaaattctaacgggcgatccggataaggactggcgagcgctgcgtgcggtgctggagagcggcgcatgttcccgcttccaagaggtcgccaaagaggtgcggaatgtgcgcttgcttgagcgtggaacgcaacttcgacaggggctcgctcaggactggcgagactttgggagctatcgcaacgccttggcgataacccggcagtcatttatgcaagagcactttgccacggcacacaagcccgaatccggagtggtcgtgatgaatatgcacaaggcgaagggaaagcaattcgacgaagtaataatcttcgagggctggccgaggcgcgtcaagcgtaagatcgttgccaatccagatcgcatcatcacctcgaacgtgcgcaatggcgcgatgacccaagcacgtcagaattttcgggttagcgtgacgcgcgccaagcaacggactactatactcaccccgcaagatgacatctgtgtgctgctcatagcggacgaagattga

SEQ ID NO: 72416 - DNA, 1722 bp, Lachnospiraceae bacterium 5_1_57FAA
atgtatataagtgagatattggagattactaactatagaaatttgacaggaaagagaataaaatttaatgaaactttaaattttcttattggagaaaataatattggaaaaactaatatgttggaattgataaatatatttctatcagtcggaaaatttatagaatctgattttacagatgtcatgcgaccaattagaattaggttgagaataaaatattctgatgaagaagttggctatttcgaggataacttcgatgtggatgatagcaggtctattacgttgcttgcagtacaggattctgtcgatgaaagaataaattattatcatgatacaccaattcaaaccaagattagtatagcaactataagaaggatgaatgtattgtattattatgcacagagaatgccattaaaagaggttgattttagaaaaacaagtggttctggaaaagtattaaattattttattcagtatagcttgaagaaatccggagtacaagaaaaggatattcttaagaaaacaaaacttaatagtattgtaaaagatgtaaataagcagataaagaatttgaatacaattacaggggataatgtaagtgcatatattgatactgaagcagataaacttgtatgtaggttacttggactaggggatgaaaatggacgagaattaagttcattgggagaaggagtccaatatgcatttaacattcttttgcaaattatagaaataattcataatattaaagtaacaagaaaaccagaagattttgaagagcggttaattgataaagaggggaagaagctatttcctctgtttttagtgctagatgagccggaaatacatcaacatccatacagacaacgtagtttgattaagaaaatcgaaggacttgtagataataaaaatcaagagtttttgaatttgttaaaagagctatttgatatagatggactaactggacagatatttatagctactcattctccgaatattttgttaaatgattaccggcaatttataaggtttcatagaaaccgtgggaacaataatctattagaagttgtttcgggtatgaatattgcaattgaggataaattgtataaacatatgcttcataattttatatatttaaaagaagcgatgtttagtaaatgcattatatttgtggaaggggataccgaaaatggggctattccagtatttgctaaacggatggactgtgatatggatgagagaggaatcggggtaattaagcttgatggagcagatagcgtgaaaagatgcatgaaactttataaagaatttggaatagaatctattgcaataatagataaggataagaaaaatgattatggttcagaaactggaatatattttacaaaagcgaatgattacgaagaagatgtttataataattttaaattaaatgactatttaagatgttgcaaagaaataacaggagttagtcattttattcctattttaaggaataaaggattgacatttaatccagcagattttgttgcagatcctacaattcttgaaattgatgatgagacacaagaaaaagtaatgtcagaaaatagaagcagggaacttgaaaaattaaaacaatccaaaaatgcggccaaaggtgcaatattagcagagtatgttacagttatcccttctgtctttaaaacagttattaacaagcttataaaagaggtgaaatga

SEQ ID NO: 72417 - DNA, 978 bp, Lachnospiraceae bacterium 5_1_57FAA
atgattagagattcctactccgctatagaaattaaattctgtaataattataggtttaaagaaaatgctcagatgaaagcattagatctgtttataagagattgtgtggaaaattttcgaccatcccatttgaaatcgacaattcatttgaaacatttagcaaatgatacagaggaagataaatttattgtacgaggaatagaaagaattatttcgaatagagatagtaaagttgcggttttagtacgagctggatggcaaggagattcaattgctgaaatattaaataaaaaggggattttgtattttaatgctttattcagagaaactgatccagaatatatatctttttataatgtcgcattagaggaatttcataatgtggcattaggtaaagtagttcaacgagatttaaaaaagtgtttgttagcgattaaaaggagacaacacgaaatttatcaacaggatgctaaaaagtatatttttgaatcaatgtataaattgttagaaatcctatttgcagaatctaagaaggtagaaggaacctcaaaggataaatatgaatatattgattttactttagaaaataaaggtttaaaacacatgatggaatttatagatgagcaaatagttttgactactatacatgccgcaaaaggtttagaatgggaatatgtaattattcccaaattaaatggttttgcttttccaaattcgtatatgtgcaactcttgtcaagatacaggaagttgtaatagaggatttgattattgtgagtttacatatagacaaacaatggaaagtaagttcaaggaagaaatgagtattttttatgttgcaattacaagagcaaaaaaggatgtcttttttactgtaaatacaggggtcaacaaatggaattatgtgaagactataagttgcttgcttaatcttgaaggacttacttctgaagattatgaatgggaaaatgtaatttaa

SEQ ID NO: 72418 - DNA, 1848 bp, Oligotropha carboxidovorans OM5; identical to SEQ ID NO: 71828

SEQ ID NO: 72419 - DNA, 1704 bp, Oligotropha carboxidovorans OM5; identical to SEQ ID NO: 71829

SEQ ID NO: 72420 - DNA, 1848 bp, Oligotropha carboxidovorans OM4; identical to SEQ ID NO: 71828

SEQ ID NO: 72421 - DNA, 1704 bp, Oligotropha carboxidovorans OM4; identical to SEQ ID NO: 71829

SEQ ID NO: 72422 - DNA, 2076 bp, Fusobacterium nucleatum subsp. animalis 21_1A
atggttttaaaagaaatagtagtagaaaattttcgtttattaaaaaattttaagttagagcttaaagaggacttatctttaattatagggaaaaataattgtggaaagacatcagttcttgttattttagacaaaatgttgaattcatctgaaattgcatgggaagatgtaaatttagtgaaacaaaaagaactatacaatgaaataaaaggatttaatgggagtgttcaagacggtaataagcttcttgaagcaataaaacttcaattgtatattgaatatagtgatattgattcttatgaaaatattcaaaattttataatggatttagatccagaaaataatattattcttttagagttcatttcattaataaatataaaaaatattttagagttaaaagatataataaaaggaagaaagataaaagatttttcaactttttcaagatatatgagtaaaaattttacaaaatattttaaaataaaaaaatattctaggtgttatgataaaaaaactaaaaaaataatttcagatatgatagaagaagtagataataaaaatatacaaaaagtgctcaaaattgtagggataagagctgatagggcagtttctaataatgagaaaaaccatgccctatcaagtttaacaagtagatattatgaaacttatagaaaaaatatagaagataaaagtaattcaatatttcaagagcttgaagtagagttagaaaaggcagataaggcactatataaaatttataatggagaaaaaacaaataatgggcaagattcagaaggaatatttaagagtattatagatgttgtaaaaacttatggaggatctgataataaaattaatatttcaatagaatcttcaatctctgaaaagaatttattaacagacaatactagcttgtattataaacatggtgatggagatagttcttcacttccagaaacttataatggattaggatatttgaatttaatagggatattatttgaaattgagactaaactacaagaattgtatgaacaacctgctgatataaatattttgtatatagaagagccagaagctcatacacatccacaacttcaatatatatttataagaaatattaaaaatcatattaatagtcatagaaataaattgaataaagaaaaaaataaatatcttcaaataataattacatcacattcatctcatattgtctctgaatgcaattttgatgatattatttatttaaaaagaatagataataatattttagctaaaaattttaattctttaaaagatgaatacgaaggagataaaaaaagagaatttaaatttgtaaagcaatatttgacattaaatagaagtgagttattttttgcagataaagttatttgtattgaaggagatacagaacgcatattaatgccagcaatgatgtataaagttgataaaatgcaaagttcaaaaaatgaatcaactactccattgttgtcacaaaatatttctataattgaggtgggagcatattctcatgtttttataccattatttaaatttctagggataaaggtcttaattattacagatatagactctgctataaaaaataataatggtaaatatgaaaaatctcatccagataatgcaactcatacaagtaatgcctctataagagaattttttaaagaagatggtttagatgatggaaataatcaatttaaagaacttatagaaaagaaaggcaaagataaaataaaagccagaataagaattgcttatcaaattcctgaaattgataaaggttaccaagctagtagttttgaagatgcttttatatcactaaataaagattttattttaaaaaataaagataatctttatgactatggagcattaaaaaattttagtaaaaaggaaataaataaggatttttatgaattttctttaaaaaatattgaaaagaaatcagcgtttgcatctgctttattatattttgatgaagaagatgatgataaggaatggaaagttcctcgttatataaaggagggcttactatggatacaagaattttag

SEQ ID NO: 72423 - DNA, 1902 bp, Fusobacterium nucleatum subsp. animalis 21_1A
atggatacaagaattttagaggatgaggtaaacactgctttacaatgtatagaaaaaggagaaaattttatattagaaggtggagcaggaagtgggaaaacatattctctgatttcattaatagaaactttaattataaaattacctgaaattaagattgtatgtatcacatatacaaataatgcagttgcagaaattaaatcaagaattgataatgaaaatctttgggtttcaacaattcatgagttcatttggtatataattaaaaaatatcaaaaagagataaaaaatgagttagtacttcttattaataatgaaacaattaaaagttttaaaaagccaaaagacttagaaaataatttgattacaatagattattttaataatatagatgttgaatatgatgaatattattctatgaatcctaatgaaaataaagttaaaattagtcatgatcatattttaattctggctgaaaaaatgtttgataggtataaaaaactatcagatattttaaaagatgtagctaattgtatttttgttgatgagtatcaagataccagcccatatatagttaaaattttattagaacatcttaaaaaaagtaaaaagaaaaatgttatagggttttttggggattcaatgcaatcaatatatgatgaaggagtaggagatttaaataaatatggattaaaaaaaataataaagaaacaaaatcggagaaatccaaggatagttatagagattgctaataaatttagagatgataaaataacacaaattccttctaaggataagaatgctcctaatatggacgaaaatggagttattattgagggtaatattaaatttatatatggaaaagagcaagaggatataaattttcttaaaaataaagctctttttaagtcatggaattttttaaatggtgaacagactagggaattaaggctaacacataaatataatgctgaaatggctggatttaaaaaattatatgatttatacaatgatgatttaataattaaattaattgataatattcaaaaaaatattgataataatgaaaataaagaaagtgtattagatgaattagtactagaattaagaccaatttataataaaaaagatttatttgaagaaattactggtaatgaaatatataacttaatttaccaagatataaaaaatttattatggaaagatgtattagaaaaatgtaaaattagtaaggaatcattgatgtcttataaatttaatggaataaatggaagatacgagactaattcacatagagataaaattttaaaaaaattagatgttttaaatgaattaatagaattgtatgaatctaaaaaatttaatgaatttttaaagaaaacaaatttttctattcaaaataaaaatgataaaagtaaacttaaagaattaatgaattttttaatatttgaagatgaaaagacaatagaagaagttttagagttttcaaaaaaacaaggtttgataaaagaagatatggactttgataactatattagtgttaaaggtttttatttatgggaaagaattaaaaaaatatcttttaaggaatatagaaatagtatcctttatttgaaagagttttcaccaatttcaactcagcatagtattaaaggaagtgaatttgataatgtacttgtcatattagaatcaaattggaataaatatgattttaaaacgctattcggaaaaggttcagaaaatgaaaatgttataaaaagaacaagaaaattattttatgtttgtatgacaagaacaaaaaagaatatagtgatatatatgcctactgaagatttagaaataataaattcagctaaagaatattttggagaagaaaatgttctttcaatagattcaatttaa

SEQ ID NO: 72424 - DNA, 1746 bp, Acetonema longum DSM 6540
ttgaattttgaaagtataaaaatagagaacttcagaaattttctagacttagaattgaaattgatgaacaaaaatatactttttggattaaatgatataggaaaaactaactttctatgtgccattcgatttttacttgatagaaactatagaaggcttggtttggctgattgtgacttttttcaaaagaatatttctaagacaatcagaattacccttaaaatagatattcgcgatagcaacgatgatgataccaaaaagatttacaaatatatgcgaggggcaatttctagtacaacagagtttgtatatattcaacttattgctgattataataaagaaaagttatgcgctgagccaaaactttattggggcaatgatattgaaaatttagaagatattccaagctaccaggctaattatgaattagataatatatttaatattgtctacatagactcttcaatacagcttgaatcagcatttagaaaatatactcgcgaaattttcagagatgagaaaagtcttagtgaagaagaacgggaaaagattaaaaagacaattgaagggttaaatggcaatatagcaaaactagcaaatattaaaagtctcgaaaacgaaataaaatcacaatatcaaaactatcgaaatgagaaaaatctttctattgcaattcgctcggaaattgaattagataatattcactcaaaattaacgccatatatctgctacgaatcggataaaacatatccaacatcaggagatggtcgtagaaaaatcttagcctatacactgttatctctagaaaataaaaagcttgaagaaaaaaagattaatgttttcttaattgaagaactagaaaatcatttgcatcggtcaatgcaaatatcattatcacatcaattatttacggataaattatataaacatatgtttatgacaactcattcttcccttttgcttggtcaaatggataacgtaaatttgattaaactatttaaggatgggaaaaccgatgggaaatcttactcttaccgagtccccgatgaatataagaaattaaaacaaaagctaaatcaaaatcttgctgatgcgatatatgcagatttcgtattattagttgaagggccatcggaaaaaatattgtttgaaacaattatgcaaaataaatgcagtaattacgaatcttttgggggatatattcttgaggtagatggaatcaattttgctgaatattacaatgttttaaaacctttagggattaaggtaatagtaaaaaccgataatgatttgaaattaaatgagaagaaaaaagaatataacttgctaggactgaaccgttgcctgagtctgatcggggaagataaaatttgtaatacaaataatgttgattgtaaaaattttgaaaccaataagaaagatatacaaagagatatttttgataaccgatataaaatagaatgtaatttgctaagaaacaacaaaattttcatttccagaatagatttagaaaacgatttatacgaaataatcccaacaaagatggatgatttagctaagaatacaaagaaaaatgctgttgattatttgcaatccgcaaaaatgattaacatgatagagttatgcaaaacgctaaaaacaagaaatattaatagcatatttgaattatcaaagaaaaaggattcctttgtaaattcaggaataaccactataattttgcctttcaacttgcccttcaaattctaa

SEQ ID NO: 72425 - DNA, 1044 bp, Acetonema longum DSM 6540
atgcataacctctttatgtatatttgcaaagaaataggaattcggctttttattgttggtgatataaaacagtccatatatggatggagagggggctatgtcaaggggtttaagagtattattgctgacactaagttattcaaggaatttaaacttaaacataactttaggtcaaatgttccaattcagaattactctaatttgtttatggatgatgtacgagataattaccagaaaagtgaatttaataatgaaattataggttttgcatatagagaaagagactttgcatcaagttttatttctaaatggctagatttaacaaaaaattgtgcatttttagttcgaaaaaatgatgatgctgatgtatggagtcagcatttgcaatcgaagggaatcaattttatatatttacctgcatcaccacttgacaatagtaatttagaaagtgaacatatttggatagcacgcacacttgctttttacttgatacaggatagattctcagagtatgacgttatagctgaaataccatcttctgacgcatttagttttaagaaaattaaacaaatgctctccgacttaaaaagcaatacttcaaatctagatgagtttagtaaacaaactgcaaaattctatgaatatttaggctatacgtgctcagaaaagacttctaatgaaattcaggagcttttttcggttattaacaatcctatttatattcctacctataatccgcaaaaatataatcatgttataacgactattcattccgccaaaggattagagtattcccaaataattattcaagctggcgattttaatttagcaaatgttgatgataaatatttacattatgttgctgtgtctcgaccagaagataaattattggttctaatagactattctttaaataatggaagaaattacataagggtcatgtctcaggaaatagaaaaaacaaatttacttggatttgacataaagcgtgatgatgttattaaaggtattaactcatctgaatttattactacaaaaagctga

SEQ ID NO: 72426 - DNA, 1803 bp, Acetonema longum DSM 6540
atgaagcttgtatatattcagattaataatttcagaggaataaaagaaagccatctccttttacctggaaatgccgtattggttggggataataacaccggcaaatcaacaattttggaagcaatagatttagttcttggacccgaacggctatccagacatccagtaatagatgagcatgatttttatgcagggcgatatttagataatgagaaaaatccaattgatattttgattgaagcagtaattattgacttaactatagaacagcaaaggcattttcgaaatcatcttgagtggtgggatactgataacaatgtattaattgatggtcccccacctgaagcaacggacaacgccggtgtagttgctgcactgagaattggtttcaaaggaaattatgatgccgatgaagatgattttgttggagctacctttttcatgttacctaaaaaggaagacggaacgtatgatagttttagaaccagtgataaacgattttgtggcttcctttatctacgtacgcttcgtaccggcactcgtgctttaagtcttgagagagggtcattgctagatgtaatattaaggttaaaagagatacgcccacaaatgtgggaaaatgttctggaacagctacgtaatatttcggttgctaacgatcccgatctaggcatatctgatgttttagagtccgttcagacagttgttcgctctctagtgcctattgaatgtgcggacgcaccagcaatgcgcgtttcacaactaactcgagaacatctaagacaaatacttaccgtttttttgggaaccggttcgtgttgcgatggtggaacggaatatgctgcgccttttcaccaccaagggacaggcacggttaatacgctggttttatcattgctttcgatgattgctgaacttaaacaaaatgttatatttgctatggaggagcctgaaatagcaatacccccgcatactcagaaaagaattataaacagcataatttctaaatcagcacaagctatttttacctcacattccccatatgttctagaagaatttaatccctctcaaattgttgtgattaatcgtaacaacggtatcctgacaggaattcctgcgcaatatcctcctaaaataaaaaaatataatatgtaccgagaggaagtcaaaagacgattttgtgaatccttattggcgcgccgagtattgatcgctgaaggaaggaccgagtatgatgcttttcccgcagcggcaaaaagattacatgaattatttcctaatgaatacacctcacttgagggtctaggtattgcaataataaatgctgagactgattcacaagtcgcaccactaggaagctattttcgtcaattggggaaaacagtatttgctgtttttgataaacaaacagatgaatccagacgtaatattctttcgtcaactgactatgcatttgaggcttcagaaaaggggtttgaaaatgttcttgtaaatggttcaaatgaaaccgcactaagacgatatgcctcttttctcgttgatggtcatgaatggcctacacaccttaattcgaagccaacacaggatatggcaatagaaaatttaaaaacatctttaatggaatattttaaatgggcaaaaggttcaggggcagcagcagactttcttaatcaatgcagtaaggatgaaatgcccggtcatattgttaacgtactaaaagaaatctgtagaatcttgaatccaacaaatcaagtagaattgtcggatgatactcttgatgacgttgcgattccaggatcttaa

SEQ ID NO: 72427 - DNA, 1767 bp, Acetonema longum DSM 6540
atgacgttgcgattccaggatcttaaaggtgtatatatgtttgatctttcagaagaaaaacagaaattgctagatgcgacaggcaatcttcttgtattaggcggtcccggctcaggaaagactacgattgcattattaaaagcaaaaaaaattatagagtctggagtgcttcaaagtgggcaatgtattcttttcttaagttttgcgcgttctacaatatctcgtgtagaacaacatgccaatattgtttttatgaagtctctaaccaatcatttggagattaatacttaccatagctttgcttggactatattaaagagtcatggatatctattgtgtaaaaaacaacttcgacttttgcctccacatgaggcagcagccttattagcaaattatgataataaatctgctaaagaagtagaaataaacagactttttgaacaagaaggcctaacgcactttgacttatttgcctgtatgtgtgcaaaactgctttctagaagcaatgcgctttcaacaatactttcagaaacttatcctgttattatattagatgaatttcaagacacgaatgcagatgaatgggcattaataactcaacttggacgaaaaagcaatttaatcgttttggctgacgcggaacaacgaatttatgactttagaggggctgaccctgctaggattactcagtatatcacgacatttcatcctatctcatttaattttggcaacgaaaacaatcggagtaatggtacagatattgtacaatttggaaatgatctacttacaggtaacaacaaaaataaaaaatataacaatgttgaatgcagatattatccaattcgtgaaaaaaacaatcaactcattttacttaaatttgctataatagaggcctgtaaaaggctacgtagtgaaaccccaaaagaatggtctatagctgtacttctgccatcaaatagtctcatgttaacagtatctgattttcttgaaaaaactcataagcttaaaaatggtacaatcatacctcgtattcaacatgaagtcgcaattgaaacagctggaccttctattgcagctttagttattgcacgattaatggaatatggatcaattaaacaatgcaatattaatcaatttcttattgatctttgcgaacacattcggggccggcgtggtgataaacctccaagtcaaaaagatcttatactttcaacagctttattagaatatacaaaaacagggaaaataactggtaaaaatagaaaggttattattgatgaaagcaaaagaattactgaaagatgtaatagcctagattttacaggtgaagtagcctctgattggataaaggttagagatatcatttcggatgccacaactgattgtattaaacaggttagaatcgatgccacctatttacgattattgcataaaagttcaattttgaattctagtttaagcgaaacttggcgtcgattcgacaattacaaaggtgcaactgaagctgtcagaaatgctttaactcaagagcattttgcaacttctgcaaaaacgtggactggcgtcaatgtaatgacaatacataaagcgaaagggaaagaatttgatgaagttattatttatgaaggcaatttcccagggcaaagatttatttacgatgtagaaaaaatagatcaagcacgcctgaatttacgtgtcgctattacacgtgcgaagaaaaaagcaacaatatttactccagaagggaatagttgctgcttattatga

SEQ ID NO: 72428 - DNA, 1683 bp, Lactobacillus johnsonii pf01
gtgtatttaaactctagttcgttgataattggatcaaataatgttggaaaaaccaattttatttatgccttgagactattgtttgatcgaaatctgagtgaaaatgatttagatttattagatagtgattttaatgcatattcacattccgataaggtagaaattactgcatatttaaaagatattaatgaggaatgtcttctaagtgaatttaaggggaatataaatgaaggaaaattgattctaaaatatactaaagaaaagaatcaagattacattctacaggctggtttttcagaagatacaatgcaggaattaaaatcccgaagttatctaagaagattaagtatgcagtatgtagatacaaatagaaatttatataaatacttgagaaaagagagacaaaatttattattgaattctcaagaattattatctgaggaacaaaaaaatgatgacaaaacaaaaacaatagaaatacagaaaaacttaaatagtataaatgaaaagataagttcgttaaactatatcaaaaatgcgcttgaaaatgtaaataaagaactatcctctttatcagttgaaaatgaagatcaaaatattcaatttgttgccggacataatgatgctgaaaagatgttgtcagatgtggctttgtcatattcaagtgaagaaggtcctttaacgttgggtggggatggacgaaacaatcaaatttatttagcaacatggagagctaggcaagaattaaaagctggaccagatcatgtaacattttatgctatcgaagaaccagaagctcatttacatcctcatcaacaaagaaaattggcacaatatttgactaagagtttgaagggacaggtaattgtaacgtcacattctccacagattgcagaaatatttaaggctgaaaatatagtaagattatattttcataacaagtatactgaggctgcttctggacctaatgatgcacaaattaagaattcttttaatgcatttaattatcgacttaatacattgtcggctgaagtatttttttcttacggtgtttttctagttgaaggagtttcagaagttatattctataaagcactagcaaaagaaaacggtattgatcttgatagattaaatatttctatattagctgtggaaggtattggttttaaaccttacattaatatttgtaacgccttgagcataccgtgggtattaagaacagataatgatatatttaagaatagagaagaaaaatactatgctggaattaaacgagcagtaggtattattaaagagtgtaagttagattataaaaaaccatcggaatgtgataaggcctgtgaaaaatggcattgtgatacaataccgaatgatattaagaacaataatgaagcaatgagaaaatcattaaagaatatagggatttatatggcgaaagtagacttagagaacgatatagctaatagcaatctaagtgaagcgctatatgcacattattgtatttttgacaaagacttaaaaagtttagtctctaagatgcagaaaagcaaagctaaaaatatgtttgactttgtagaagaaatgcatagtaagttacaaatgttaaatgatgatgaattaatcgaaccaattgatagtattgtaactaaagtaaagagtcaggtacagtataatggaaagtag

SEQ ID NO: 72429 - DNA, 1596 bp, Lactobacillus johnsonii pf01; identical to SEQ ID NO: 71689

SEQ ID NO: 72430 - DNA, 2298 bp, Pseudomonas putida S16
atgcaaatccagcatttggaaatcgcaaacttccgcaagctcctgtctgtacgaatcgaccttgcagccgagaccacccttctagtcggcgccaacaacagcggcaagtcgtccgcaatgctggccttacgcaagttccttctctctaaggcatcgattttcagattgcaggatttgaccctgtgccacctcaccaccattgatgcaattggtgaagcctgggaggcagctgatggaagctttccaatccctgtcgctaatgactgggctgactggctacccacgttagacatctggctcgaagccgctcagggcgagcttcatcacattcgggatctgattccaaacttcgcttggaaaggcggccacgttgggatgcgattccggctggagccggatgacatgcaaattctattcgccgattatcgcaaggaacgggaacgggtaagggagctccaacaggagatccaaaaacaggcagcagaaggtactgaaccgccgtcgctcccgctctggccacagagcttacatgactacctgaatagacgaattggtaaaaccttcaagatccgatggtatcgactcgatcccggccaactccgagctcctgatccagggactcggaaagctaaccaacagccgcttacggccacggcaacgccactcgaccgcaaccccctaatagacctgattcgagtccacgagatcaatgcccaacgcggctttggcgacagcgcggacgaaggtgccttggaaggtggccatggctcgggtaggaagctctcggagcaattacgagcctactacagcaggcaccttgatcctggtgacagccctgatgtctcagaccttgaggcgctccgagcaattgaagctgcgcagactgcttttgatacgcgcttaagcactagctttgcgccggcgctacaggaagtggctggccttggttatccgaataactccgaccctagcatccgtgtcgccacccgcctagctcctacggacggaatgaaccacgaagctgcagtgctatttgagctggactctgtgggaggagcgcctggcgctccgcccttgcggcttcctgaaacatctaacgggctggggtaccagaacctcatctcaatgattttccgtttgatggcatttcgggacgaatggctgaaaaagtacagaagccctgaagaacaaagtgcggcaggtgtcgaacctatccacctagtgttgattgaggagcctgaggctcacctgcacgttcaagttcaacaagcattcgtgaagcatgcctaccatgtgctgtgcagtgaccccctgctgagtaaatttccaagcctcaagactcagcttgtggtgagctcgcactcaagtcatgtagcccatgaaattgagtacgagaacttaaggtacttccgaaggctcccgtctggcatggctggggtacccattcctgtttcgaccgtgtctaacctaagcacagtgtttggcaagcctaatcaaaccagggacttcgtcacacgctatcttcgagctcaacatgcagacctcttctttgcggatgccgtaattttggtagaaggagcggctgagcgcatgatgcttcctcattttttgaggcagcatttccgcttccttaaccagtgctacatcaccattctcgacatcggaggtagccatgcgcatcgcctccgacctctggttgatgcactgggcatcgtcacccttgtaataactgacttggatgccggcgttctacaagtcggcaaacctgtagaacgaaataaaggacagtcaaccaacaatccaacggtgcgtcattggatgcaagcgactggcctgaaacatgacgtcgactcgctgctcgatcttgacttcgaaagcaaagctcagcagatcgacgaccttttctccatcaggatcgcttatcaaacgcccatcaacgttcgcctacctaaaactggtatgaacgttgaagcactaccgaacacctttgaagacagcctcgtcctcagcaatgcagagcatttcgctaacaaatcgggacgaggactggtgcgatcattcgctaaggcgttgcgcgaggctgacacctctatcgagctaggtacgcagctgttcaacaagctcaaggatggcgacaaagctgagtttgctctgcacgtgctgggtgattcggaattcgccaaactgaccgtccccgcttacatccatgaaggcctggtgtggctgcagtccaagcttgagagaaagagcaaggaactcttaatcattccatcatcaagtgtcgaggttacgccatga

SEQ ID NO: 72431 - DNA, 1872 bp, Pseudomonas putida S16
atgagcatccagcgggaagccaatatggatgaaatcccagacgcagatgaggtcatccaggaatgcctcaatctcgaccgcccgaagagttttttcctttacgccggtgccggctctgggaaaacccattcgctagtcatggcggtgaaaaacctgaaggacagggaatggcagcgactgacgtttgaagggcgtcagattgcgatcattacctatacgaatgccgcgtgcgaagagatcgctcgccgccttgagtacgatcccttggtggttgtgtcgactatccacgctttctcctggaggatgatccagggcttcaacgacgacattcgtgactggctgagagtcaagctcaccgcagacattgacgagctaaatgacaagctcggaagggccaaagggaaaaacaaaacctacctagccaacgaagcatcccgagacagcaaatcccgcaggctcaactcgctggacgagatcactacgttcacctacagccctaccggcgacaatcgaggccggcaggcacttaaccacagcgaagtcatccagatggcggcggcgttcattccacgccctcctctgttacatgtcatgaccgaccttcatccagtgcttctcattgacgagagccaggatacctatggccctctcatggatgcgtttctccaagcacaggcactggttcctgagcgattctgtctgggactactcggcgacatgatgcagcgcatctataacgacgggaaggtgcgccttgaggaggcgattccgatggattgggcagttcctgaaaagcggataaatcgccgctgcccaacgcgggttgttgagctaatcaacgtgatccgcaagagtgctgacactcatcaacagacacctaaacccggcgcggtgtctggcacggtacgaatgttctgcacccaacaaacgccagggcaaggcttcggcctagaagacgatgtcgcccagcgcatggccgaaattaccggtgatgaccaatgggctgtgggtcgcacggggagaaaaaccctgatcttagagcacaagatggcaggacgccgaatgggattcgaaggcgtgttcacaccgctttatcaggtagaacaccttcgaaccggattgcttgatggaacactgcccatcctgaaactcttcttcgaacgggttatgcccattctacaagctgccaagactaacgatttcagtctcatggaagctgtgcgacttcattccccacttctcgatcctaaatccatgaaagtggcacctgaccagcttgccctgcttgagacagtagggggcgctacccgagcgctgtgtgaactgttcgtcgaaaaagatccgctgatcagtgatgtagcccaagtcttgtttcaaacaggcctactcgacctccctgaccgccttgtggcagcgcttctgttaggttccactacagatgacccgcctgatacaccggatcgagatgcactggaaacccatgcgtaccaagctctgatcggacgcccattctcagaaatgcaggcgttcgctgggtacaccgatggattgtccccattcgacacccatcaaggcgtgaaagggctcgagttccctagggtcatggtgatcctcaatgacgaagaggcaggtggcttcttgttcagctacgaaaaacttcttggtgttaaacctgcgtctgacagcgatatcaaaaatcaacgcgaggggaaagacgactccttggcacgaacccgccgcttactctatgtcacctgtagtcgtgccgaggaaagcctcgccattgtggtttataccgctgagccagaactggctcgacagcgagtgatcgatgctggatggtttaaggatgaggaagtcaaagttctataa

SEQ ID NO: 72432 - DNA, 2040 bp, Streptococcus sp. oral taxon 056 str. F0418
atggaaattaaaaaaatctatattcaacattatcgtttattaaacgatttttctttagagttgaaaaatgatttatccttaattgtgggtaagaataattgtggcaagacttcggttttatctgtgttagaaaaaatattcaataaaaattccaatcgcaatttggtatgggaagatattaatttaaatcataggagggaaatctttgagaatataaagagagtctctgatattcctgattcggaattatcgtctattttagggattaatcttcaaatttggattcaatactcagaattagattcttatcaaaatatccaaggatttatgatggatttaaatcccgaaaataattttattattcttgaattttcgtatataattcctactcaaaagcttcgcgagataagtagtttgacttgtgattttgcagatgatttttcaaaatttgaatcatttatgaagaaaaatctgaataaatttttcgaaatacagatttattcacgtggatataatcctattactcaagcaatgacagaagaaaagtctgatttacatgaaatgaaagatgttcataaaattattaaagtaagagggattagtgctagtcgagaagtatctaataaagaaaataaccattcattatctaagacatcaaatcgattttataaattaaataatggcgaagaaattaacagtaaagcaaataatttactgcaatctgctattttaaaggcagatgaaactttaaccagagcatatagtggtgatgatagcgtcgaaggaatttttacttcagtctttgaacgcgtcagaagatttggtggaaatgatagtgaagcagagttagcaattcattcatcactgtctgagaaagatattttaagtaataatacgacactgtattataagcatgacgatagtctattacctgaagcatataatggtttgggatatttaaatttatatggaattatttttgaaattgaaactttaatggcagatataaaaaacgaacctgctgatattaacctaatatatattgaagaaccagaatcacatacacatccacaattacagtatatttttatcaagaatattaaagatttgctaaaggaacagaatgatgaactaaaagaaagtggagattttagttgtattcaaactttaattacaactcattcctctcatatagtttctgattgtaactttgatgatctaatttattttaaacgtgataacggtacagcagtatcaaaggcttttaattcattgaaagaagaatatggtgatgaacaactaggatataaatttgtaaagcagtaccttactctcaatagtagtgaattattttttgctgataaagtcatttgtgttgaaggtgatacagaaaggattttaattcctacgatgatgaaaaaggtagatacaatcaatccaataaatcaagcttttaatacaatgccattgctttctcaaaatatttcaatcattgaaacaggtgcccattcacaagtttttaggaagttatttgattttttaggaataaaagtattgataattacggatattgatccagcaaatagaaatgaaaggaatcgcttgacttcttgctcagcagtagatgctacctctacgacaaatacttcaattaaaaatttttttgatatttctggagatgaggttttttcaatagtagcccaaaagagttttgcagaaaaaacaacatcagacgatagaattcgtattgcatatcaaattcccgaagatgaaaatggttatcagcctgctagttttgaggatgcttttatcagtttaaataaacaattcattattgatcaaaaagctggttttattcaatttgaagctttaaaagactttgatgatagtgaaatagaagatttctataaatttgctagggataaagtaaacaaaaaatctgcatttgcatcaagtttattatattttgaaggtgaagaaaatacttggaaagtacctaactatatttcggagggattattatggttgagagaaaagtag

SEQ ID NO: 72433 - DNA, 1926 bp, Streptococcus sp. oral taxon 056 str. F0418
atggttgagagaaaagtagaaccagaggtagaaaaagtatttgaagtaataaaacaaggtcaaaattttattcttgagggtggtgctgggagtgggaaaacttattcattaatttccgttattgaaaaaatatctatggaagaaccaaaaaaatcgattgtatgcatcacttatactaacaatgctgttgcagagattagagctagaatcattaatgataatttacgggtttcaacaattcacgattttatatggcatgtcattgaaaatttccaaaaagagattaaagaatgtcttgttgagttaataaatgatgatgcacaaatcttatttgttgctccaaaggaagtattaggtgaggaacttatttcgcttgattactttgatggtgttcgtgttgaatatactgaatggtattctatgagcataactgagcaaaataaagttcaaataagtcatgaccatattcttatagttgctgaaaaattgttttctacatatcctaagttatgcgacattttgatcgatatagctgagtatatttttgtagatgaatatcaagatactagtccgttagttgtaaaaattttattggaatatatacagaatagaactaagaaaaatattgtaggattttttggagattctatgcaagccatctatgactcaggagtaggagacttaagttcgtataatctaataaagatagcaaaagctcaaaatcgtcgcaatcctaaaaaagttattgatttagctaataaatttagagatgatggattggttcaaactccgtccaacgatgatacagcacctaatatggataatgggagtatcattccaggaatagtgaaatttgtctatgggaatgatattaatcaacttgaaattcttagaggtagtcaactttatagaaagttagaatttaatgtaccctcaaaaacaaaagaattgcgcctgacacataaacttaatgcagaaatggcaggtttttctaagttatttaagttatataatactgatttatttgtaaaattaattacaggtataaagaaaaaaatcaatgagaacaagatagatgataatggaaaattatttaaagatttagtagaagaagctcaaatagttgttataaggggtggccccttaatagtcgatgagattaaatccaattcagaactatcagctttttatgatgaaattaaaacgtgctcgtttgaagaagttagtagtaagagtaaagttaataaagaatcgctattatcttataaatttaatggattaagtagtagatatgaagcgggcacagatagggataggattcttaaaaggttggatttagtctatgagctagtagaactatataaaacaggtaagcataatgaatttttacgtattactaagtttaaaataacttcgtccaaagataaaattagtctatcaaatgttatgacagaaatctctgctgatgatatcacaattggaagagtaatagagcttgcagaggaatgtgaactaatttcaaaggatgacttatttactaattttattaaaaatagaggacattatttatggtcgcgacttaagataatgccatttcaagaatatgtaaatagtattgattatctcagagaatatgtatctgttataacgcagcataaggttaaaggcagtgaatatgagaatgtcttagttttattagataatgggaaatggaatcaatataattttgataccttgtttggaaaaggttcttctaatgagaacgttcaaaatagaactaagaggttattctatgttgcaattactagagcgatgaaaaatttaattgtttacatgccgagtaatgatcgtcagattattgaaaaagcaaaagattattttgaggagagtgatattgttgatgttctgtcattagttgatgagtaa

SEQ ID NO: 72434 - DNA, 1593 bp, Bifidobacterium breve UCC2003
atgaagatatcttcggtgattgttagaaatcacagtaggctaatcgactgcaccctggatgttagagagaacctgatactcgtagggcctaacggaagcgggaaaagctcattaattagatgtcttgatctgctattgggcaaaaccatgcagcaactgtattacagtatcagcagtgcagattttaggaacatggaacgtccgctcattattgaagcaaagctaacaaatcttaatgagaatgagttctcatttttcccagacgaagttgatgcttccgacggatctttgacaattcgactggaagcgatcttcgatggcgaggatcttacgattagccgttattgtcctaaaggtgtaggcaacggcacattgagttcatcacagctcaaaagtattagatggaacctaattccatcggatttttcagctaagtctctaaattcagggcggaggactattgtcgatgattatcttaaggaaattaacgcgtcgggtgataagacgaaaatagaagaagccatcagcgcgctctgcaatgcaattgatacttcaagtgcctttgatggagctttaaaatccttggcactgcagttgaacccggcattggcaggcggcgtggacgctactgatctccgtttcattcccggagcagcaattgatggaaatctgctgagcgatgtgagattacaaataaagagtagatccggagttgtacgacaagctactgaacagtcagacggtacaaaggcgttgattgccttcgccgtatttaatttgctgaattcagacggaatcatcgccattgacgagccagagactcatcttcacccatctgcccagcgtaatttgatgcgtattttgttgagcatggggcggcagctagttatcgcaacgcattctggagttgttgctggcgagtttaatcctgacaatatagtggtaactcgggatggactcattcccgtacagccgcgtcaggggttccttcagggagatcaaaaagcgctagcaagatggtggataagcagtagaattgagcttttgacagcaaaacgcatcattgctgttgaagggcaatcagacagaatgctagtagaaaaagtcgctgagctaaccggacggcatttggaaagagacggcatagagctccttgaagccggtggatgtaaggaaatgcctcacgtaatgagcatctttggagagaacggtttcggcatgcaggttagcgttctgattgacgaagatgccgaagcttatacagcgagatcattaggtgttcaggttaataatctcgcctcgaaagccgtatatgtctcaaggattgaccttgaagatgaatatgtctccgctatcggggcagctaaactatgggacaaacttggtgagtcgagtttgtttagcccagaggtgctgcagacttgtgccattactgatgatgcaagcattccagatgaagatcagcttgcatcattctgtagacacaagagaaataaaattgcttgtgctgtaattgctagtgaaaccttgactaaagattccgcagaaaaggtttctagcgttatcgaggtgcttcaaaatgacgtccactga

SEQ ID NO: 72435 - DNA, 1704 bp, Bifidobacterium breve UCC2003
atgacgtccactgagtatgtcatgacgcaagagcagcaggggattttcaactatcgaccgttgaacatggtgattactgcgccggcaggatgcggtaaaacggaagctctcgcttatcgcgcaaagggtcttattaatcgttatgattttgcagggaacgggaggaagctgctggttgtatcttttacaaatcaagcaaaggataatatcagcgaaagaattaagaaacacattggattgcaaaccatgcggcagcatgtcacagtatgcaatttccatggattgtctgcgagaatcattaatgcacacagagaaatgattggacttgatgacgaatggactgttgcgagttttgactggattggaagattcatgcaatcccttaattgcgatagaaaagtaaagatgcaggctagggaggcacttcaaaaaatcaaacttgaatgtctaactgacaaagaagtgaaagcaaaaattcaaacaatttatggacaggtcggcaatcttgcacaaattatcgagaaagaacggattaaagaaaaaattattacctatgatgatcaaatcagaactgctttatggattctgcagaataagaatgttgcgaaactttatagaaatcatttttttgcggcgctagttgatgaatttcaagacttgactcatcaacaactacgtcttgttcaagctctctgcaaagatagagttacgtttgcaggagaccttgctcagggtatttattcattcgctggaggcgacgcaagattcgtatttcacgaaattactaagaataccgaaaaacaagttaagcttcttaaatcgttccgttcttcgcctgccattctcgatgccgtcaattcactctctccgcgaactggtagcgagcatctaagcgccgctttcccggaacattggggcaacggcgggctctcttcatatgcttcattcaatcgcgaggatgctgaagcggaatgggttgttcgaatgtgtcaattaattttggaacgttgtcctgagcatcgaattggaattatctcccgaactgctttccgagcggaatccgtcaagagcactcttaaatctcataatattagctatgctgactggggaaatggcttattcagacctgaaacggcaaaaatattgcgaaacatctgtgatgaattatcagtcgagtcatgcaaagagcctgaagaattaatgtccttcatcaaaaagaggtataccgcttttcatggaaatttatccgaagaacacgaagatgcatgtggatggttgtttgatcggctagcacaatctgatgcatcctcaatagcagaagtcaagagatgtattaatgcgaaaaaaggcaataaaactatcgcaacgcgcaaaggaatacattgtttaactgggcacgctggaaaagggcagcaatttgattgggtgtttatcgtaggacttgaagaaggaaccataccgttttataaggctaaaagtgaagaggctatagatgaggaagcgagagttctttcagtaatgatctctcgtgcacgaatcggttacgtagcaacttcatcttcgactaacccacgtttttggtattcaagaaatgcctcatctttccttcgttatctgcagcatgctccaaattttttgtttggtaaagatcaaatagaattatggtgtgccgaagcggattggacagcactgtcgcagatgtag

SEQ ID NO: 72436 - DNA, 1743 bp, Neisseria macacae ATCC 33926
atgggaaatgatgtaatgcttttaactaaaattcaaattagcaattatcgtggtattaagaatcttgatcttgatctagcaccaacaacagtattgattggggaaaataattgtgggaaaaccacagtactgcatgcgttacgtgcctgcctacagacattaaaaaattcaggtcgttcaactccttttgatgaatttgattttcactttgatagtcagacagcagatcctacaacagccccaaaaattgaaattatattaacttttgaagaatcaaagcctggcgagtggtctgataaagtggaacaaaagctaggtggtgatggaggagtaatttctttcataccaccagatgatagaggtcgtgttcaattgcgtgtgaatgctgaatactctatggctactcaggatattgatactacttttgatttccttgatgcagcaggtaatccactaaatacaaagaatcgtagtcgtttaggtagcttgcaacagttacggccgctgttctatttgtctgcactgcgtgatgcaggtagagagttttctcgaacttcacagttttggtcgccctttgtcaaaaactcccagatagatgagcctaccaaggctgatattgaagaacaacttgaaaaaataaatgccaaaattatagaagctcacggcacctttaaagatgtgcgtgagcatttgaacaaggtacaggaactcgtcgccctagggaagcaagatgtggttagtgttgatgcagtacctgcaagaattttcgatatactcaatcgcacccaagtcagtatctcgtcaactacaggtgcgcgattacctattggcagacatggcgaaggtacacagagtctaaccgttttgatgctctttgatgcttttttaaagtctgaacttgctcgcaagcaaggtgtgcaggagtctaagcccattgttgcgctagaggagcctgaagctcacttgcacccaaatgctgtgcgggcactatggaaaacgatcaatgatattgatggacagaagttgattgcgactcattcaggagaccttttgtcggaagttgatttgacagcaatccgtcgaatttacaagtctcggggattggtaaaggtgggaagcattgcccccgatttattaaatccacgtgagcaacggaaatttgattttctgatacgccgggcacgtggcgaactattttttgcgcgatgttggctattgggagagggtgaaacggaagccattttattttcaggtgtggcggaggtgctggggttagatcttgcgcaggagggagttcgctgtattgaataccgattaggcgatattgactactttttgaaagcagccaatgctctcggtatttcttggcactgcctgacggacgccgattcgcaagggcttgtggatgcaagtaaagcgcaaaatcgtattccggatatgcctaaacgcaaagatcgtcacatatctgtgttgaccggagcatcatcaatagagccgtatttagctaatcatggttttttagatgtttacgagagtattgcagtgccagcaaagaaggccgtgaaactaaccgcttctcaaggtgcccctgaatatgcagaccagattattcagtgcatcccggacaaaccgagtgccgcttatgcagtagtcgaggccatgcgtgagcgtggtgtaggttcagttccaaaagcactagctggagcggtcatgaaagcagttgcgctagcaaggagacagtga

SEQ ID NO: 72437 - DNA, 1494 bp, Neisseria macacae ATCC 33926
atggcagcaatagattttctgctcagaaatgtagtgtctgatgaacaagtgctcacgctattgaaagacgaggaagcgggaagacaactacagttactttttgtccaatacaaagagagcttgaagcagcaaaactgcttagattacggggcaatcctttatttttgcgaagagctattaagagcaagaccgcgtgtcagtaaacagctacggacggtgtatcggtatatttgcgtagatgagttccaagataccaatgtagcacagttcagaatacttcttgctattgcgccagataagaattccaatatttttatcgttggggatgacgatcaagtcatttaccaatggaatggtgccagtccaaaacgagtgaaggagttggaggaacactacgatctgaccaccattcagttgccagaaaactaccgatgcccgtctgaagtagttgaattggcgaattcactcatcttgcataatagtgaacgctcaccggataagaggcctttactttcgatgagggtaggcactgattccaacccaatcgaattgctttcatttgacgatgagcagcaggaagccaatggggtcgcagagcatgtggctgcacggttgcggaatagcgtgcatccatcagacattgtgatcttggcgcgtaccaccaaactcttggagcgagtacagcaggcactaagcaagctgtcaattgaaactcacatacagcgacgaaaatctcaatttgaaagtgcaccatttaggtttttggtgtcggcattgaaactggcgttagttcggtctgacaaagacttagctgcgacagtcacaaaagcactttccgactgtgtaaagcaagaaattagcagtgagaatttggctgaattttcgactgtacttaatggagatcaattagaagcgcttggagtgttggttactactagcaatgcggtgccacaagagctgtgtcaagctgttcaatcgcttgttcagggacagtacgcccaatttgttcaattaacactatcctactttgatactgtagagaaggagagtgaagacgacggtaatgagcagtacgccgagtatgaggcagagagagctgtatggcagaaaattcttcgtgatgatatgggtggtgagaatgatgcttactcattgtctttgggacagttcctgcaagaacttgcgttagcaaacaagacaccagaggcaccatcaagcgctgtgcgatgcttgacgattcacagttcaaaaggcatggagttccagcatgtgtatttagtcggcatagctgaagatcaactgccatcttttcagagtaaaaaagcaggcgataacagtcgggaaatgcaggaagaacgtcgaaactgctttgtagcgattacaagaacgatgcaaaccctgacattgagctatagtcagaagtacaacgggtggcataaagagccttcaagatttttgtttgaaatgggcttgttagaacacaagaataactaa

SEQ ID NO: 72438 - DNA, 1743 bp, Neisseria macacae ATCC 33926; identical to SEQ ID NO: 72436

SEQ ID NO: 72439 - DNA, 426 bp, Neisseria macacae ATCC 33926
atggattacttgaaaaaactaaaccctaatcaacttgttgctgctcagtggaatgaagggccgatgcttgttctagctgggccagggtcaggcaagactgcaacattaaccgcacgtgttgctcgactgattgagcaagggagagatgaatctttccgcattctatgtttgacgtttacacgcaaggctgctgcggaaatgcgggagcgccttttgagtctggtgcctgatgcgaaagaacgggcattgctgacgactttccattcttttgctactgatattctacgtcagcatggtagtcattttaatctgagcccggattttgaaattttggaagatgctgagcgtgtcggcattgttaaatcagtactggagggggggaatttacgaaatttgtttcagcagaaaaggcgatggcagcaatag

SEQ ID NO: 72440 - DNA, 1755 bp, Streptococcus agalactiae FSL S3-026
atggaatttaaaaagttagtaattgaaaactttcgtaattttagttctattgaaattgacttatcaaataaaaatgtgatattcgggatgaacgattcgggaaaaacaaatcttttatttgcaataagatatttgttagatagaagtatcagaaataaaggttttattaaatcagattatcataaacatgatattagtaaacctataaaaatacagcttgaaattgatttgtctgatagggaagaggatgatgaagagtcactaaagtcttcacattcacgtttattaatttcaacagttgctggagcaagaaaaaatgcaagtttagatacattcctcatttccttggaggcgatgtatgatgagaaagagttgtttggaaatccggtattaagttggggctctactttagatgatttagtggaagtacctcaatatggtacaaggagtgatattgataagattttccaaatagtctatgtaaatcctgcgatagagttggatgcattttttaagcgaaatagaaaattattgttctcagatgatactaaaactgatgaagatgtagcacttgagaaagagattgagagtagcattattgatttaaatacaaatatttctaatctaagtttaattactagtgttcagtcacaactgacagatgcctataaaagctatcgtaaagaagatttagagataaaaatccaatcagaaatttcaatttcgggttatttggataatcttactccgtatataaattggaatggagacactcaaaattatccaacatctggggatggacgaaaaaaacttttatcatatgctattaatcatctgatttcagaaaaacagtacagtagtaaagtgataatttatctaatagaggaaccagagaatagtctgcacagatcagtacaagtatcactttctaaacagcttttcattcagaatatatacgaatacttcttcttaacaactcattcagcagaagtgctttatgaaatgaataatactcagctcataaagataactaatcaacaggaagcaacaggacattcttcatactacaaggtcccaagtgagttttcaaatttaaagaaaaaattaaatatttcattagcgcagtctatcttctatgatagagttcttttggttgaaggtccgtcagaatactacttattttcttctatttttgaatatattagccctgattttgaagcagaaggaaaatacttgttacaagttaatggtataaattttaaaccttatgcaaagctgtatagagaattaggtatagaattttttgtgaagacagataatgatttaaaggctagcagaggtgataaacatgaattttctccgatagggttcaatcgatgtattgagattcttgatgacaatatcgttgctaaattaaataattatcgtatagatttctcttcaaaggaagaaagaaatcagaatataaaagctaaaaaggaagaactgtatactatggaatattctttagtatctcaattgaattcaaagagactatatatatcagagattgatttagaaaacgatttagctaaggtactgtccgaaagtgagagaaatggaatgaatgtatcagattttgtgaattggttacaaagtagtaagcagtataatatgttggaatatattgagggggaccttactccagaaattgcacacaaaattgtgaaatcagagtattttaaagttttagcggagtttttagactatgagtga

SEQ ID NO: 72441 - DNA, 1542 bp, Streptococcus agalactiae FSL S3-026
atgagtgatattgctacacgagatgaaactatcaaaaaagagttattagagtatcaaggaaacattctaattttagctaacgcaggttcgggaaaaacaacttttttagctgaaaagctaaaaagcgattctaaaaaactagataattatcaaaaactagcagcgataactttcactcggaacgcaactgaagaaataaaacagaaattagttgaaattccagaaaatgttgttgtatctactattgattcatttttagataatgagattattctccctttccttgatcaaaggtataaagttgcaacgtcgttacagtttagttttcagcaagaatacaagtttaataatttcgacattggactaagtcaaataatgcaaaatggtatttttgctacttatgataatccgaccgctcggcaaggtaagaattttaaatgtgaagttgctttagatatactaaaaaatattgtgtctgcatcagagtatctaaagtataaattcaattcactttatatcgatgagtttcaggattgtgatcaatctatgaatgatttattcatgtatttaaaagatgaactgggaattcgattatttattgtaggagatgataaacaatcaatttatcaatggagaggggcttcgcctagatatattaaaaatttatgggaaaacgaaaatgatttaaaaaaagagaggtttattggtaattttaggagtttacctaaaattgtagatttttcattagctctaactccagaagtaaaaattgattctattaatgaaacaggttctattttatatatagagactaagcaatttgctttaaaagaagatgttatcagatctctggtagataatggtgatataattttagatgaaaaaaattattttttaattggaaacaatcaacatattgaagaaactgtaacacaattaggtggaatattcccaaatgaatttgattatgtcagaaaaaatccttttatagagtgtaccaatggtcgttttttacaatctttagctcaatattattttcttgaaagtttttctgagtatgatgtgttgaacaatctttttcctgattataatgacgattttaggaaaggattattaaaaaaattgaaaatcttgcgtcaaaatcctgagcgattacttatcgaagatatagcgtcatatctaggtgtacccattacacaatttggtgataaattagaaagtcaaatattacttgaagttttaattgatgtagagaatagaatcttatttgatactagttcattgaaaaataacttattaatgacaacacataattcaaagggactagctgcagatacggtgataatttttgttgaatatttgattgacagatataaaaatacattaaagttcgaggaccattatgttgcaatcactagagcaaaatcaaaaataattcttattgataacaagacaaactatgttagcgaaataaatagattattatgcaacaataatggtaatttttcatttgataatttcatagaaagaaggaatttatga

SEQ ID NO: 72442 - DNA, 2172 bp, Bacillus amyloliquefaciens XH7; identical to SEQ ID NO: 72356

SEQ ID NO: 72443 - DNA, 1323 bp, Bacillus amyloliquefaciens XH7
atgcaacaaatatataaaaactatgatgggtcatttgaaaaagaattaaaaactctaaataatgaaattaaattagatactaatcatcggtcaataccagatatcgtttctatattaaataatatatataatgataaggaattcaaacaaatctcatccgataaaaaccgagctaataaaccagaccatccaccaagagtagtattgtgtgataacattcaaaaaagaataaaaagggaacaattaatttatccgaatgctttattgttatttttattaaatcaacaaaggtttgattcgataggcgctggagaattttacagacaatttaatagattggatagatattcacaagtaaaccaactaaatgctagtgatgtcttatctgataatacaaatgaaaataaagatcctcttttaaagttgctttttatagtagataaaattctaagttattatgaggattttaatcttggcagtataattcaaacccttaaaaggaatcaaaaaatatttgatactagaattggtacaattactagtcatcaggataaagttaacttaaacaatctattaaaacaaatatatgatttttatcagaaagacagctcaatatatgaatttttaactttattaagaggctctagagttataaaagaggaatatatagataatatatctaatgaatatattggagtgttagcagttacattaaacgaattcaaggcactgtcaaactatttgaaagacccgaaagtttcgacacaacatggtgtaaaaggagagagtcataatactgttttcttcattgcggacgattcctttagaacaccgctggttcatatgtataaattcttaaaactatggactattacagaactatcgttagattctctagaatccttttattatgattataaaaagtggattgaagatacaattgaccatttagcatgtaaaatatcagatttgaataaagaaaagtatgaggcacatgcaacttatctaaaaacaagagttgaagaattatgcaaatatttcgagaataattggatatttaaagatctttgtgaagacttttacaatgcatatcttctaaaacctaatgttacaaactttaaaaaatgttttaaagagagtactgtgtacggagttctgtctgcgtacagacttttttatgttggttgctcaagagcaaaaagcaatttaactatttttattgataagtataaggtaaaagatttttctgaggatttgatttttaagttaaagagaacgggatttagtgttgaaattgaagcaaaagaattgcagaaattgtga

SEQ ID NO: 72444 - DNA, 2037 bp, Vibrio splendidus ATCC 33789
atgttattaaagaaactagtagtatctggctacaaaagcatatccataagccatcctcaaacaatagagtttgatcctcagctaacagtttttattggtcacaacggaacaggaaaaagtgccacgttagaggctctaaataagttgttttcaatcgaccattctttacgtggtattgtaccttctgattttcacttacctgacgatgtggatcctgtaacaccaagaaatttaactatagaggcatggttcagtcttgcaaacggaaatccatcgattccacctttaattaatggacttacagcatctagttcaacaggtgaaatcatatttagggttcgattggaagcaagcctaagctttgactacaaccctctaggggatgtagacgaaaatatttgggtaatcgatggcgatatggaagaacctgaagacgataataagcatcgtttgtctgcaacccaaaggaatgcgattcaagtcaactatgtacctgccaatagagacccattagttcaattaaagtactcatcaaaagccatattgggtcgtttactcaaggcgattaaatggtcagagggggagcaagagtcttttgaagcacaagctcagcaactgaaccaattagcatcagacaacccagctttaacccaaatcacacgcgcgattaatcacaattggcaagagatatacaaggggcgtcacctcactcaagctgggcttaattttcctgtcggtgatgtggatgaaatattgagacttatacagcttcagtttatgccagatgcaactggaaacaaggttgatactagtcgactaagtgatggccaaaaatctctagtttactttgctctaaccaaagcattatttgatatagataaagcgacacgacaagctgttgttagtaatcaaccatcaaattttgatgctgataagatgaagttacctatttttagcttgattgtgcttgaggagcctgagaaccatttatcaccacactatttaggtcgaataataaagctagtaaaagattatggtgcgactgaactatgtcaatcagttatttctacgcactccgcttcattggttgggcgtatagaaccaacacaaatacgtcattttcgactagacaatgagaatatatgtaccaagattcaagccttattattgcctgaagatactgatgagcaagctaagtatattagcgaagctgtaaaggcctatcctgaaatttacttttctaaactagtgatactaggtgaaggcgatagtgagcaggttgttcttccgaagttgctggaacactttggaaaagacatagacggtcattcaatatcggtggtcccacttggtggaaggcatgtcaaccatttctggcgtttgcttaattctctaaagatcccttttgttacactattagactttgatattgatcgtaatggtggtggttttggccgtatgaagtatgtcgtggaacaattacttttaatggatgaaataaagagcaattatattaacgaaaacattattccttatatccccgactggagtagcgagcgaaacgctgattcattttcaatacattatgaagatggaaaaacaagggtaattacagatgaattagaagcatgtaatgtttatttttctagtccactagatatcgattattcaatgatttgtgcttttcctgagatcttttgtgaaaaagatgaagcctatggagagagaggtccctctgatggcaaagaagatgaggaagaagaaaatactttaaaaagagaggcggcgctaattaaagctgtactcaaaaaaggaaatgttggtaaacggtttgattttgggtcagattgggaaaggaacttcttatggtatcgctatcgtttcttatcgaataaaagtaaacctgcatctcatgttcgtatgtttactaaacttgaggagcaatatacatctcgagagatactagaaaagttaccaccagagttaacacgattgatggaacgcattgttgaattatccgaacaggtagttgagtaa

SEQ ID NO: 72445 - DNA, 1680 bp, Vibrio splendidus ATCC 33789
atgactgattggaagccatcagagaacatagaagctacaactgaactaatggatattattacctgtgatgcatcggttgctgtactagcaagtgcaggtgcaggaaaaacagagttgttggcccaaaaagcaaattatttgttctttacagataaatgtgtttggccaaaaagaattttatctcttacgtttaaaaccgaagctcagttaaacataaaagagagaataaataagcgttgcggtcataaagctacacgttttgactcttttacattccacgcattcagcaaaagtatcgttgatagattcaaaaatattcttcctgaaaatgagcgtccgatagacaattacgatatcgtctttcgtcgccaagatgccaatggctccaacaaaatattgatgggcaacttgctagctttggcactacgcatcttgcgagcaagagaagatctacggacaatgttttcttattcttatgcatatgtttttgtggatgagtttcaagatacgactaatgagcaatacgagttgttacaattgttgtttcagaactccgatactaaaattttaactgttggagatattaaccaaagtatcatgttatgggccggagctcgtcaaactgtattcactgactttttaaatgacttttcggcacaaaaaaaactcctagttaagaactaccgagcatctagtgaaatacaaaatgttctagcagtagtattgcaatttgtacagaacccaaaatctacaatccaagaagtatcaaaaattccggaaaactgctctctacatgctttcagtgatgaacatcaagaagcctcattcattgctcacagtataaatgaagcaatcagaagtggtatcaacgcaagcgatatttctgttttaactaagcagcaaacatcacagtacactgaaatattgagagctgagttaacgaaacttggtataaacaacctcgacatgaccgacctacaagatgcattaaaagaacctcttgggcaattattctcgcagtttttaaaagcgttagtgcatcctgaacccaaagtcatgactgagctatttaaagttaatttagccttaaacaaggttgaatccgatgatgataaagaagaagcattaactacttctttagttaattttatctctctaaaacaagagttaataacaacagcaacaacggctgatgacttattatcttatattcaaagctttattcatgagattggtatgtcaaaaataaaaggaagatggaaacaatataaatcctctgcttattttagtcatgtatggcaagcgcttgaagtacatttgagaaatatgtgtaatcagaccaattcattagaagatgctgcaaagctatttagtgctgagaatgctgtacatttaatgaacatccacaagtgtaaaggtcttgagtatcatactgtatactttatggggttagaagatcaggctttttggaactattccgaacaaacatttgaggataattgtgcaatatacgttgccttgtcccgcgctaaaaatcacatatgcgtaactattagcaaacgtagagaacatagggttcattggcagcatgataataggacgtcaacatttggtgccgtaaagcctgttataagtttgttgaaagataaatgtaagtttgctgctatgagccatgcttaa

SEQ ID NO: 72446 - DNA, 2058 bp, Vibrio tubiashii ATCC 19109
atgccattacagctagggcttaatactctagtcggcgagaatgatgcgggaaaaacagctatcatcgatgctattcgcatgcttttaggtactagagatcaggagagtatcagacctagtattgatgatttccattactctgactcaaaagaccaatctaaaagtctttctattgcggttactttcttaggtttaacacttccagagcgggtgagttttgctgaatatctcacttatcagcctgagaatacggagaatcctgtgatcttgaaggtcactttacgagcagtgctacagaacgataaagttcgcacgactatattttctggtaatccgacaggttcccatggtcttagagaaattgatattgaaacaagggacaaactgcgttcaacctaccttcgtccgttgagagatgctgaaaaagaaatggacgcgggaaggagctctagaatttccaagatcttaaaaaggcaatcagcgattgatgaaggagaatcgatactagatatttctgccgtgtcagaagataaatttggcgaagtagtagagaagttaggagtcgttggtattgctcgactagttaaccaattattagaaggtcatcctgctgtaaattcaaccacgaatgaactaaatgttaactttctaaaacccctacaaatgttgggtgataaccttcaagcaaatttggggattggtccaaacgccgatgatgaaatgttaaagaggcagatgcttgagaaaataggcatagctttagataacgttggcggtaagcgtgggcttggctcgaataatttattatatatagcatgtgaaatgctattactgtctgagtctaaagatgaacttgcattattgataatcgaagagcctgaggcgcatttacaccctcaaagacaattgaagttaattcaatatctacaagataaagtgaacaagcataagcaagatcacgagattcatctacaggttttattgtcaactcacagtcccactctagcgtctaaattaccgataaagtgtatggtaatggtacataaaggtaaggtgttacctcttagcatggcaggtagtacagacggtgactatacatttcttgaacgttttatagatgcgacaaagtcgaatttatttttctgcaggggtctgatgattgtagagggggatgcagaaaacctcttattaccatcggttgcgaaaatactaggtctcgattttacagaaaacggtgtatcaatagtgaacgtaggtcacactggccttagtcgctatgctaatgttttttcgggcacaagcgagtatccaaaccctggaattaaagtggcgtgtttacacgatttagatttaattccttatcaagcagcacgggaacttaatctggagtcggtgaaagacaaaactgaactatctgacttgtgggatagctttaacacatccttaaaagcaggtgaacaggttgactttgaacttcttaactcgcaattgccccaaaatgttatttctggctttgagctcaactccttcgaccaatctaaggtgaccagtgccaatagggagtataaaggggactttgttaatggtttttactctagtccttggacattagagtactcgcttgcatttcatggtttagcgaaagaagttaccatcgctgcttgccttgccaaggccgaaccatccaagcgctacgatcaatctaatcatgaaaaaatagtttcagttgccgaagattattatgagtacttgaatgggacgtacagtgaaagtgaagtcttggcaggtaaggtttatgaactatttctatcatctgttaacgtttcaactcatattgaaaacgaacatgctggtttagttcttagcggtaaagcatctaaagccgcggctgggcaacaccttggtcggttgctcgaaatgatggaccaaaagttagaaagtgatggatacacacaaagggatcgaatcgaacattggaaggatttacttccaattgcagtggtagaagcagttgagcatgtaatcccatcaatgcttttggagaccgaaagtgactaa

SEQ ID NO: 72447 - DNA, 2220 bp, Vibrio tubiashii ATCC 19109
gtgactaatattcgagagcttttaagctgcaatcaagacttagacgctaatccatttacggatgatgatatccagtgggttgaaggtattctcgggctgaacaatggatttgacgagcatcagttgcttgttctgcaaaggcttgatgatttagatgtagaggcatgccctgggagcgggaaaactacagtattagtcgcaaagttagctttattagctaggtactggaactcaaaaacacatggcatttgtgtgttatctatgactaatgccgctagagaggagattcaggagagacttggggaaactgaagagggccaaaagttactaagtggcccccattttattgggacgatccacagttttttcagtgagttcttagcgaagccgtatttgaactccaaggggattgcgattgttaatattgacgatgatttttgtcgctctcagcgacttagaacacttcagaaggataattatagtgaggtggcagactatctagtagctaagcaggttgagaagaagactaacatagtcacaactaaaggagagcatactccggatcatcaaaaagctgctgcatggctagcggagtacgaagcaaaatctttggaagaacggaggtatggaattccttcaagttggaaaattaccgatgagtcgtacaacttgattcgagttaacttcggaaaagaatattctcttgatctaccagagccaatggagagcttgctgaaagagtgtattaaggaagtagctcataaagggatattttgcttcagtgatttatttgtgtatgcaaaagcacttatgaagtcttcgagtgatgtattccaaattcttaggaaacgatttccattgctgtttatcgatgaagcccaagatacatctagctcacaagctcttattttatacgagttattcatgtcctacattgatgatctcgaaccggttacaagacaacgatttggtgatgcaaatcaaacaatttatacatttgaaccaccaatggctgcggatggaatagatccatacccatcatctgatattgaaaggctctcacttccagtgagtcatcgatttgatatgagtgtgtctgatatagcatgtaagttcgaaactcaccctcttagccctatgatgcaaggagtaagacaggatgataaggggggaagagggcattgtatcttggtattcaatgaggactcaagaatggctgtgattccggcattcgcagaacttgttgctaaggagatggaagagcttgaccttgacctagcaaaattcagaatttgttctcatatacagaaagaaaaagatacagaagtttctgaaggtaactacgctagaacgattagagattactttaccccttatatagcggacaagatgacgaaagattatcagcaacataaagctctgattagttacttccgtcatgcccgatatttggttagagagactaaatgcttaagttctggtctcgaaaaagtatcggaaggtatcttaaaagggtgctatttggtaagtgttgatagtgaacagaccaaagggactcgttacgcaaagattaaatcagctcctaacaagtacagagcgatcgttagagagatcaatgacaagtgtgcaaaagatttttcgaataaagttgttgacacacttacaaataatgcgggtataactgaaacggaatggcctgccattatctcaattgcgactgatgttattcaatcgctattagggatagaagaagttgactcttctttcgagttcctaacatggaaaggtgaagatgtcccccctcagagcagtgatactggagacgttgatagaaccaacatctatagacatgagcttctgccatcaaggaaaaagttagattttaaattaggtactatccactctgttaaaggacaaacccatacggccacattattgttagattgtacaaatagaggacctattttaggccagctcaaaccattctttcttggttcaaaactcacatcagaagcaaccactcagcaaaaaagttggttaaacactctatacgtaggcttaactcgccctacgcatttgatttgtgtcgcgattcctgagtcccataatggctttagaggaagtaccctttcttggacagaagatgactttcaggaactaaaagctaagggctggaaagtagctagagtgaaagagtgttcgtctttggaatatctataa

SEQ ID NO: 72448 - DNA, 2076 bp, Ketogulonicigenium vulgare WSH-001
ttgaagctacacaatgtgaagattgaaaacttccgattgctgcaggacgtcgagattgggttcgaagatagaaccacgctgatcgtgggacgaaacaatagcggcaaaacatcgattgcagagcttttccgccgactcctctcagaaaagactctcaccttccgtctcgaagatttttctctcggctgtcacgagaagttctggaacgcatttgaggcgttcagcgccggagcggaggtttcagacgtactggatacacttcccgtcattcgtataataattgatgtttcgtacgacgttgacatgccggaccttggagctttgggcgactgcatcatcgacctaaatccagattgtacatatgggcgtcttgtcctgacttttggccctcgacccgacgcaactacatttctcttcgccgatctccctgcaccagaagaagatgcagagaatgccagaagtgcgcttttccgtgctctgggagcgcgggtttctgccacctacatatcgattttagaagcgattgatcctaacgatcccacgaataggaagccgctcgaaacgaaagtgctcactgctataatacaaggcggcttcatcaatgcgcaacgtggattgggtgacgacacgaaacgcgaacgagatgttctcggaaaagtcgtagaaatactttttcagtcggcactaagcgatccgaccgaccctgaaaaacggactaccgccgaacagttgaaaagcgctgtcgaagacattcaaagcgatctgcacagcgacttcaatgtcaagcttacatcgctgctgcccaccttcgaactgttcggctaccccggactggctgatccaggactcatcactgagacgagctttgacgttgagaggttgctaagcgatcacaccaaggtccgttatgtcgggaagaacgggataacacttccagaaacctacaatggtctcggcgtgcgtaatctcgtattcatgctgctgcaactcttgcgcttctttcgtgagtatcaggcaacaccgacggcggctggagtgcatctaatattcatcgaagagccggaagcgcaccttcatccccagatgcaggaggtattcattcggcaacttgatcagatcacgaatgctttcgtcactcaattgaacgataatcacccttggcccgtccagtttgtcgttacgacgcattcgccgcacatggctaacgaggcccgctttgaatccatgcgctatttcctgtcgaaagcggacgaaaatggcgtccggcggaccatcatcaaagaccttcgccggggcatgggaactgcgcccgagcctgatcgggagtttctacatcagtatctgactctcacccgttgcgatctgttctttgccgataaggccgtcctgatcgagggaacgtcggaacgcctcctccttccgacaattattcgaaaaacggacaatgcggcacctggagcaccgcagctcggcagtcaatacctcaccgtcatggaagtaggcggagcctatgctcaccgcttcttcgatttgctgacgttcctcgaactccgcacattgattattacggacatagatgcggttcgtcccaatgcaaacaacaagcgcgaggccgtacctgtcgcccaagggcaattcacgagtaacggttgtctaaaggcattgtatggtgccgatatatctccggctgccttgctcatcaaaacaccagacgagaagattacaaatgacaggcgcatcgcgtaccagattccagagcaggatggtggagcgtgcgggcggagcttcgaagatgcgttcataatcgcgaaccctggccttttcgcgcttggagaggaagatgttgcaacggcggcgtatgaactcgctgcggaacaaaaaaagtccgcctttgctctgcaatacgcgatcacaaacaccgagtggattgttccccattacatctctgaaggtttgagatggttggcacagggtaatccggcccctgtgcctcccccagtggccgtagcggtcgaaatcctcgccgaagctgccggggtcgagatagcccccatccagggaggcgaacatggctga

SEQ ID NO: 72449 - DNA, 1761 bp, Ketogulonicigenium vulgare WSH-001; identical to SEQ ID NO: 72141

SEQ ID NO: 72450 - DNA, 2106 bp, Corynebacterium glutamicum S9114
atgagggttagcgcgatctatatcgatggttaccgtcgattcaaagaacagaacatcaaatttgagaatgaggtaactgtcctcgctggtgccaacaactcaggaaagacttctttgattgatctcctacgcgtcgtgcttggaggagaaggaagcttgcatgccgaggacttcagcgcgtcagatcgttatcaatggtttatggctctcgttgaagcagcgattaaaggcgaggaagagttttccgatttcgtggagcataaaaaccttcttgaaaaggctccatcgattgatgttcgtcttgaagttacgtacgacccagttgctgatgacattcgccagttcgcagattacttgatggatctggattcagctaaaagctcgttctacttccagtttcgattctcagtgagagttgatcgcttgatagctgcctgcaatgacctctataccgacatcgaaaagaccatagctgattgtgggtggacgtctgcgagtgagatcaacccgggttcatcagagttccttgtcctccaggcgaaaatcgatgcttcactcgttgattgctccagaccagaagtattctttgcagatgagaactataccaacatcttgccaatgggaacgcataagaacctcaagcatctgttcaattttcgggcagtaaaggcgtcgcgcgccctcgacgacatcaatgaagataaatcagggggcttgaatcagcgccttatcgaggttgtgaaagaggatgagaattggttacagctcttgtctcagtttccggaccaggtggtatcagctattcatgggctaaaaattcgtgaagcaacgaccgacgaagccctcaaaagtctcaatactgtcatcgagtcaatctcgagcacgaatggctcgaaacagcatgacctcttcctcgacttccacgtgaccgaggatcatgccgtccagatgattgcacgcgcaatgcagactcgctacctcggcgaaggcgttcctttaggtgaagcctcacagggtttgggttacagcaatctcatctatttacatcttgaagccgagtcttttattcgctcgaccgctcaggaagagaactgttatctcgtaaacctgttagttctagaagaaccagaatcgcacatgcacccacaaatgcagaatgcctttatcaaacatctcctatcgagagtgagagaggttggaggactccaagtggccgtcacgacgcactcgagtgagatcgtgaagtcaagcggaatcgaacagctacgggttctcaaatctgaagatgatgggtgcaggatcgtagatttgcgtgactttcacacagccgaggttgcacggaaatcaaccgaaacacagcggttatttaactttctgtatgcgatcaatttctctgacctgctcttcgccgacaaagtcatcatgtatgagggggacaccgagcggatgtacattcaggcgctaattcgagaactcccagaattatctggcctccgatcacagtacatttcatacgtccaagttggtggggcttatgcgcatgtgtacaaaccgcttattgtagacgaacttcgcctaaagacggtgataattaccgaccttgactatgacaaggcaagtacgatttcaagcgtcgaggacctcaaattgcttcactcgaccaatacaactctgaatgccttcttcaagaaaaaagacagcgaggctgatcccgctaacgcaaaggcactaacaatcggaaatctaatggagaaagttgcttctaccccaggcttggccttcattcctggcaccgagttagcagccgttgctttccaatctgaacccgaaggctatgcacgtactttggaagaagcgatccttgccgttcagttgggaactgatgtttggtcctctcggacgcaagaagactggaaaaattaccgcaagatttcagagttaaaattctcgattcctcgagagccggagtctccgacaattagacagatcgtcttatcgacgtcaaaccagaagacggattttatgtactcgttgctacttaactctgaactgctgaagacagttccgccatatatcctctctgctctccggtggctggactcatga

SEQ ID NO: 72451 - DNA, 1914 bp, Corynebacterium glutamicum S9114
atgaacaagatgcaacttatcaatgcacccgcaggcagcggcaaaagcacggagattaagcgtttagttcgagagtggtcggtagaacgccctctcgacagactgttgtgtgtgacgtacacgaaccgagctgctgacgagcttaaagcagacatctcttcgccatatatcgaagtatccacgatccattcgttcttgagcagattcgctcaatctttattctcggcacgcgaaatcgttgcttattattttgagatctatggtgatgcaatcaagggccgaatcgagaacgcagatgaaaacaggaagatagaagaaagcaacgctagatatcgtgaggaactcggtgatcctctaacctttgaattggtgagagagtcagttgaatttctttactacaatgaacggccatttaacacgctttatcgtggtggcttatctcacgctgacttattatctttcgtagcatcctgtgcaaagcgatatccgaatatttatcggcgagttagcgcgaagtaccgccgggtgatcatcgacgagtatcaagacacggacgttaatgtactcgagttcttccttaatgcattacacggttcagacactgagcttcatctgtacggggatcgtatgcagcagatctataaaacagacccagaacgtttccaggatctgatcaatgccttcgacgtgccaaggcgcgaggttgttaattaccgttcaacgaaagcgattgtctcagtgctcaacaccatctacaacgatgagagcctgcgacaggttgccgattctaaagtttacggtaccgttccaagggtgcactttagtgcaacgcctgatgatgctgtagatcagattgcagatacagatactttaattctgagtgtccacaactcatcgatcttcagcgctatcggcagcctggagctcttcaatgctttaaaagatctgcctgatcacggctacaattctcgctatccagcagctaccgtgctaactgagccagattgggagaaggttcccagccccctacttcgactcctatatggtctgcttaatctagaaggcgagcatacacgtggccatatcggaaccgtaatctcaacactacgcgcttactcaaaggagttcggcgagttcacgctccacgttcacgaggacaaggcgctacttgcgactcagctcgatgaactgtttgaagtgatgcgtgacgataattcgaacgttaaagatgtactcgaaatgctctcaggtcttccagtaacccgggctgctgatgtcagcggctatttggagagcgaagattacgacgcgctcattttagttccattccagcaggtgcgccgactctttgattttcgattatcacctactcgatcgactcagcacggagtcaaaggcgagagtcacgaaaaagttgtgttcgttgcggagacgagctattcgccagtggtgggtatgaagaccctatttgacctctggccaaagtacgagttgaacctcgattcccttgaagagcttctaggaaaactgtctggggtattccgctcagcaaaggaagcaattggcgtagacatagccaaactgaataaggaaacttttcctgcgtctgcagaagcaataaccgcccaggctcggagcaccgcggatgccttgagtgagtccgaattgttcatcgagctttacggggcgacatatcaggcatatcttaaaaaacctggagtgacgcatgcgaagaagctctttaaactttcgccaatcgaaggtttactagcttcttatcggcttttctatgtcggctgttcgagggcgaagtcagagcttgacgttgtgattccgctaaaagaagtgagtgacataaaggctacatccgagaagcttaggaaactcggattcgaggttatcggaggagcctaa

SEQ ID NO: 72452 - DNA, 2046 bp, Prevotella sp. C561
atgtatatcaaggagattaatatattaaacttccgaagctttaaggaagctttaataccctttcatgaaggagtgaatgttataataggtcataataacaccggtaaaagtaacctgctccgtgcaatggggttagtgcttggctatagtaatggtcatagattaggtaccagtgacttattttatgagacagatgtggcagagcttcaacggcagtcaccacggatccaaataactcttgtcttacgtagaagtgcagatgaaaacttatattctgcagatatggcgctgtttgccaatatgatgacagacccagcattaagcgaagaggcagaattaagatacgagtttaaactggatgatagccaagagcaaaactataaggcagatgttactaacgcaattacagccaaagaaatatggaagattatagagcaagattacatcagactctataaaagtagtcgctcgggaggtaatcaggctgctggtatcaacatcaatgagacgttggagcagattgacttccagttccttgatgctattcgcgatgtcagtcatgacctatacgcaggttataatccgctccttagggatgtgctgaatttcttaattgattactcagttaagaatgatgtcacaaagacagaggatgagataaaggaacaattaaaagctttaagagatgattttgtccaacagtctaggccattgatgcaaactttacaagataggttacaggatgggaaaaacgtatttctgaagtacgcatttgatacaggtgcaacatttaatggagccgaaccagattttgatggaacggtgacagagaatgagatgttctctgtattgagaatgtttatcaaatacgctgttggtatagaagtgcctgctacatataatgggctagggtataacaatcttatatatatgtcgcttttgcttgcaaagatgcaggcagacggaaacattgcctacatgaaacgcaatgccaaggtactctcattccttgctgtagaggaatgtgaagcacatttgcatccagccatgcagtacaagttcctaaagtttctgcaggacaataatttgaataggcatgtacgtcagatattcatgacctcacattctacccaaattgcctctgcggtaaaactggatgacttaatttgcttaacctcacctgcgttgggacagatcaatgttggctatccacgtgccatatataaagaagagagctctaatgatatggtatccaagcaatatgttcagagatttttggatgcaacaaaagcggatatgttctttgccaacagattgatttttgtcgagggcattgcagaggagttgctgctcccagtctttgccaggtatttgaataagaaccttacagatgagcatgtgctagtggtgaatatgggaggtcgctatttcaaccactttctaaagttatttgatacgaaaaatccatataccatcaacaagaagattgtctgcttgactgatattgatccctgtcgaagaaagaaagaagacaacggaaattatgaggtctgctacccatatgagtacaatatagatacagacaactacgactataagcatcatgctgatacagaagtagatcaatatgtagtccatcctaacattaggttctacagacaagatgtaacgtatggaaaaacgctggagtatgacctaatgcgtgagaatcccaattgtgaactgttgctgacagagtctgtttccaattcaagtgagataaaagctatgatgaaagaacaggatgtgaacgagatgatgactaaaatgcgaaacagcgaggccaatacccgtatcaaaagctctatagaagcatcggagtggacggatgaagaaaagcgaaaagccttacttgcatcgcgttatttgaattccgtttcaaaaggcaacaatgcgctggaattaaacgtggctcttatgaataatctggataaaccagaagaagatagagacgagttccacgtaccccgatatattgttgaggcattaacatggctactatcataa

SEQ ID NO: 72453 - DNA, 1698 bp, Prevotella sp. C561
atggctactatcataacatcagaagaaactatacctataaacgaaccgtttaaggttactgctgggcctggtgcgggaaagacgcattggctgataaatcatatcaagaatgtggtgtcaaatagccacaaacttgatgtggtgagaaaggtagcttgtatcacttataccaacgtgggtatcgatacgatcacttcacgtttgaatatggggaatgacctggttgatgtatataccatccatagtttcttgtatgcaaatgtaataaaaccctatattcatctaattgctgaggacttcgggctgaagttagataaacttgtggttatagatgactctaattttaagtcagaaggaatagctgcactagttttaaaaagagttggcaaatcatggttagataccaaaatctacctgaaaggattggagagggcaatgtggcgttatgaaaaccatgagtacaaacattacaaacctgatcacccacaggtttataagataaaaagtggtaaacgatatgtgggcaatgattggtatatggagttcaaaagacaactatggagtggcggttatatatcttttgatgatatcctatatttctcttacatcctgttttcaagatatcccaatatatacatattgataaaggctagatacccatatatttttgtggatgaatttcaagatacaataccttttgtggttgacttactagccaagttaggcaatgagggggtaattgtgggagtagtaggcgataaagcacaatcaatctatgattttctaggtgctacagtgcagcaatttgacagctttactattccagaaatgcaggagtatgaaatacgagggaataggcgtagcacgaagcagataatagacttgctgaatattgtcagaactgatttttcgcaagattggctgaatggatcagaaggaatgatgccagaattgcttgtcggtgatatgcttaactgttaccaacagtgtatagaaaagagtggaactgacgaaatacaatcgcttgcctttcaaaacatacttgccaattccatgtgtgaaaagaacggggtgcgagaggtagagaatatattagagatggattttgatagcaatgcagggcgtcagatggtgataaaagcgttgataaaggccgtggaatatacaagaatgaatgacttgcgaaatgcttggtatcagttagatataatcgatagcgataggactcaaaccatcgtgcttctaagatacttgctggatggctataaagattacaaagacggaagtctgatggatttctacaattttctggtaaatgatttacatgtcgaaataaccaagattaagggcacggcaatcagggatttctaccagaaccacgcgtacgcagatgctgcccttggagtgaagtatagtgattcaaataacaagcataaaaccatccataagtcaaaaggagaggagtatgataacgtgtttgttgttctgaaagaggaaaaagacttagagttcctgttgtcaccaaacctaaatgacaacaatgttcatcgggtgtattatgtggctgctagtcgtgcaataaatcgcttgtttatctgtgtaccgacattgagtgcagaaaaacgtatccaactggaaggcatgccaataaacatacttctccccaataatagccaattgggttcggggcagatttga

SEQ ID NO: 72454 - DNA, 2034 bp, Ralstonia sp. 5_2_56FAA; identical to SEQ ID NO: 71858

SEQ ID NO: 72455 - DNA, 1758 bp, Ralstonia sp. 5_2_56FAA; identical to SEQ ID NO: 71859

SEQ ID NO: 72456 - DNA, 1743 bp, Pelagibacterium halotolerans B2
gtgctcgttggtgaaaacaacggcggcaagagtaatcttattgacgccatccgtcttgtttcgacgccattgagcgggcgccgggaactctattgcgaacagacagacatacgctttgggaccgcgacccgagcgttcagcattcaggcaatctttgaggacctgacaccgccgcagcagggacgcctcatctcggcagcaaccgacgatacgctgaacgcggcctgcttcggcctcacatatgaggccaccggcaaacaatcacatattcgccccaacctgtgggcaggccgcttcaaaacgccgccggaatccggcgcccatgaaatgatcaggcatgtctatctgccgcccttgcgcgacgccaaacgtgctctcgcgtcaggcaatccgacccgtatccatgcgttgctgaaccactttctcggcgaccgcgatcccgacgagattgccggaaaactggcccgcaccagtgacgatcagcttcttaaagacgtggacctcgccgtggccggtggtctcgacattctgaccacaggagtcaggcggcaaagcgccagcctcggcttcaatacggacgaaaagctgatcgatattgcccgcgacctgcgattcaaactcgccgatcacggcatcgccccggaggaccttcaatactccgggcacggctttgccaatcttctctacatggcgacgatcgcggtcgagctggaaaagaccgacaatgccgaactcaccttatttcttgtcgaagagcccgaagcccatcttcatccccagctccaggcagcagtattgaattttcttgaagagcgggccgcgcagtcgctcaaaccgaaggaagaccaaaacgcgccggcgggccatctacaggttgttgtcgctacgcactcgccgaatttgtcggcctgggtcccaagcaagaatctggtattcgtgcggtcggttgcgcccatcagcggaaagaacgaaggaacggcgcaacaggggagcgaacaaaccgaacattcggaaacgccgcacgcggtggttgcgccgcgtgcgcagtctcgctgcattccgctttccaagcttgatttgagcgatccggaacgccgcaaaatcgaccgctatcttgatgtgaccaaatccgccctgctcttcggtggacgggtcctcttggttgaaggtattgccgaggcattgttgctgccggtcatcgccaaacaccatgtcctgaaagatatcccctcggcctttcgcacattccggtcagccgtcttcgtcccgatagacggcgtggatttcagcccgtatgcgaaagcgctgctatcgccctttaacgatgttcgtattgccgatcgtcttgtgattattacggacggcgataagcagaccgttaccgccgacaaaccgcttcccggcggcaatcgcaaatccgcgctcgacgcactggccgccgaaagaggcgccggcgcggtgttggacgtcttcacaaacacctattcgctcgaaaccgaactcgtggcagcaggcaatgcagactgtctgaaggccgtgtacctgggtttgcatccgcaatcggaagacaagtggaacgaggctgtggcgaagacgggcgacgaccgggcccgtgcgatacaggacctctttaagacaacgcccaagggagattttgcgcagcttctagcggagaaggctgccagcccgtcttttgtcgtgccagattacattcggcaggcgatcgaggcgcttgtgaaatga

SEQ ID NO: 72457 - DNA, 1749 bp, Pelagibacterium halotolerans B2
atgagaccgcaagcctttcagcccacccgggaacaacaggaaattatcgatcatgacggttccgcctttgtgacggcatgtcctggcgccggcaagacgcgggttatgactgaacgcgcgcggcgcttgttcgctgacatgccggcgggccggggcgtggcgttcctgtcatttacgcagggtgccgttttcgagctggaaacacggctccgggaagaagggatactgccttcgcccgtgtttccgagcttcatcggcacgtttgacagtttcgtctggcagtttcttgtcgcgcccttcggcatttcgaattgcgatgttcggccgcgcctgatcgccgatatcgcagaccttgccgtgacgcccttcaacggcgcccatcccttgccgctatcctgcttttgtccggttaccgggacaatattcgcgcaggcagcgaaacagcgcggattcgacctttcccaaaagtccaaccagcagatccaggcctatgtcacagcggcggcgagtatccgcgccggtttgcggacgcgcggacaactagggtttgatgaggcgcggggcgttgcgctcgaacggcttagagacgcggcggccgcgccccgcatttcggccgccctggcggcccggttcagcgaagtcatcgtagacgaagcgcaagactgtaatcctgacgatctgcatatcattgcatggctgcgggattcgggactgccggtgaaagtcgtatgcgacccgcaccaatcgatctatgaatttcgcggtggtgttacagaccagctttttgcgtttgccgagacctttgacgaagagggccgcaaagctctgaccggaaacttccggtcggcgcccaatatatgcaagaccacggcgcagttacgcccactcgcatcgcgttccgcaccggatgaaccgctcggtcgccacaaggacgacgccacaccggttctcatcctgtcctatcccggcgccgccgttccggcggcgatcgggacgaccttttgtgaacaggtgacacaagcggagatcgaccttgccgagtctccggtcattgccgcgaccaaagccagcggcgccgccgctgcaggacagccgcgtccgagcaaaagacgggaccggtccgtgcgcctcgcccaggccgtgacggattttcattttgcggccggcttcaacgatatgaagacggcgatcgaccagatgcaccacatcctgctggagctagagggacgcctgggtgatctctcctaccggcaatatcttgccgacaacgagatcgaacaggcgagctggcgtccccaggtcctgtttctcctgcgggcgctgcgcttcgacccttcaaaacatgccgatgccaaagcgtggcatgccgctaccaaggaattgctctcccggcaactgaccttgaacgacgggccgtcgctgtctcaaaggcttaaatggaacaacgcggtttccaccgtgcttgcggccgttccggcggcgacggcgatgccacgcacaatacatgcggttaaaggtatggagtttcccgccgtctgtgtcgtgaccacagcctctactctcaaaagcatactcgactacctggataccggggagcccgcagataaagccgaagatgcccgcaagctttatgtcgcggcttcgcgtgcggaagagttacttgtgatcgccgcaccccggagccaatctcaacgactggctacccatttgaatgcccaaggagcgttagtggaagtccttgaactatag

SEQ ID NO: 72458 - DNA, 1782 bp, Mycobacterium rhodesiae NBB3
atgaagctgactcacatcaagctggccaacttccgaagctttctcgacgagcacgagtttgagctcgcagacggtgccaacttcttcgtcggaccgaacaactgcggaaagtccaacttgatttcggcactcgagctgtcgatggaccccgagtcggtcttcgtcccggagcgagaccgtccagtcgctacccagggcaaaggtcccccgaagcacacccggatcacatttactttcaggagcacaaacaagagcagcccccaaacgactctccttgatcgcgcgcggaaatacgaactggcacttcgcatgaagcaaggccgggatcctggccgcagggccaaaacgtacgccgacgatggcgagatccgtagggtcgtgacgttcggagcgcagggtgcacgccaagtcagctaccaagctaaggggctcggtgcggtttccctcccgatcgacagcccggaacacctcgcgctggagagtcagtttctcaaggtcgttcgcttcggcgtcgtccacagtggcgaggatctcgagtcagtcctgaacgggaaatttagggaggtactgcaactcgtcattaacgaccacctgtcaaaacaactagccgacaccgagaagctgagagagaagtacgtcaaaggacttcgtacggtgctgctcaaaccattgcgggagcgagtctttgagcgggtctcgtccgtgttttcggagattaagatcgtcgatcttctgcccgatgtaccgccgctgaatgacaccctgtcgtcagttggcatcacgctcgctgacgctgccagcacagagctgaaaggcaagggcacgggtctccgcggagctgttctcatctcgatgcttcagtatctcgcggagcagagcagacgatctctggtgctcgcggtcgaggaaccagaggctttcctgcaccctggcgcgcaggagggcatagcactgcagttagagaagctcgcagaacgtccagaagtaactctcctagtcactactcattcaccacacatcatctctcgacgagctgacgcgcgggtgacggagctccgaaagagcaaagacggtaacactcatttagcggctacggcgcgcggagatgaggatcgagcggaactacttggctcgctgttcactgaccggggcctcgcacgcgttctcgagcaggccacgtccgcgcctgccgggacgcgggccattgtggtgacagagggctacaccgatggactgttccttcgttacggccttgaggccgccggacgctcagatctccttcaaggaatccacttcattagtgcgggaggcgccaagaaggtcgtatttcaagcggtcctggcggactcggcgactcacctgccagttatcgccatcttggatcaggacgcacacggccgttcagcccgcgaccatctaaaagactttggttggaccgcgaacgatcacatcatctatctcgggtcatggccgaaggcatgcaacctaggggaacatcctatcgagatcgaagacctgatacccctcggcgctgcaagtgcggtcagtcaggtactaggtgatgacgcccacgatgcaacgcagaaatgtaaaggtagaactcactacagctacagcaaggcgtggaaggagttagcgatcgtgcagcttccgaaagaactcatcgggagaaacctggatgattttgtctggctcggtgaggagatttccaaacgcatcgccaagatcgccgagcgccgctcccgtgtcacgagcatcagcgacgctgcagcatccaaatga

SEQ ID NO: 72459 - DNA, 2772 bp, Mycobacterium rhodesiae NBB3
atgacgagctacacgccgtctcagcaagaagccatcggatgcctagatgagactctgcagatcattgcttgcgcgggatccggtaagacacaagtcatttcgcagcgcatcgcaaacatcctcggcgaacccggggtcgagccacggaacatcatcgcatttacctttactgagaaggccgctgcggagctaaaggaccgagtgcttcgcctcgtagaggaacagcacggtgaagttgtggggatggccgagatgtacatcggcaccatgcacggttactgcctagacctcctgcaacgtctcgttccagacactttcaagttctccgtgcttacggagataaccgcgcggttgctcgttgaccgcaacagcaagaagtcgggccttacgacctgcccgacgtcttccgcgaagacacctacactgcgacgcttcatccactctcggctgtaccttcagatcgccagcatcttgcgcgaagacatcgtcgacgaagacctcgtcgaccagcgtgtttgggagtgtctggactcgtacctccgccttctcgtcgagaaggcggagttcgacttcaccgaaatgatcaaccttgccgtgtcatttctcgaagcggatcctgacgaggacgaggacgcccgcactattcacgatcatgtccagaacgacatcaagtacgttgtcgtcgacgagtaccaggatgtgaacgcgctccaggagcgcctagtcgtcggcctcgttaagtacggcgccaacctctgcgtcgtcggtgacgatgatcaaaccatataccaatggcgcggcagccaggtcgccaacatcatcagcttcacggaacgccatgaaggagttcgacaagtcactcttgccgagaactttcgctcaagcaagggcatcgtcgaattgggacggtctgttgctgaacggatttcgccctccgaccggttagcgaaaaccatggcgtcggcccaaactcagccgtgggatcgtggcgacatacttgctctgacgttcgacgacgagaacgccgaagcatcctggatatgcgaccgcatcggagacgtgcgcggtgtgcccttttccgatgctccaggtagcgtcgcccgaggattgtcgtggtccgatttcgcagttctcttccgttcagtcgcgaaggacgccggaccgctagtggaggaactccagcgtcgaggtatcccatacatagttaaagggctcaacaggctcttcgacagtcccgaaataatcgcggtcgttggtctgttccgattcatgacacgtgagatcaacgccgataccttgagccagctttgggtcgatgccgatcttgtaccagacgtgcagctctggcccggtgccgtagcgatcctcgaagagggtcgaaacttcgaccgcggcgatagatggggtgtctacaacatccaacgtgtctatctcgattttcttgcagccttagaactccgtgaagagtcggtgcctgggctaccgggccgcggcgaacttgtgttttaccaactcggaaagttcagccaggtcatctccgacttcgagcagatctacttcaactccgcacccgcccagaagtacgaatccttcgtagcgtggctcacccaccaagcgcccgactactacgcagagtctgacgccgacgttgggtacgcttccccagatgccgtcaccttatccacagtgcatcaggccaagggcatgcaatggccagcagttttcgtcccgtgtctgcgtcggaatcgctttccgtcgaagcgccagggcgggctgagtgtctttcatgtcatccccgagaacgcggtcacagatgctgaccgttaccgcggcacggtggaggatgaaacccgcctcttctacgtagcaatcactcgtgcccaaaagtacctctggctgagctactccccaggccctaatcaactgtataagaaccgatctgagttcttcgaccactgcaccggccagacttgggtgtccacgcgaccgagcacgaaaccactgccgaacaggatcgagcagcaaccgagacacgatgttccagaagttaccttctcgttctcggagctgaagtacctcttcgagtgcccttactccttcaaactccgtttcttgtacggatttaaccctcccctgcacgaggcgcttggatacggcaaagggttacatgatgcgttgtcggaagtgcataagaaggctgttgcaggcgagatcctcgatgaatccgttgcccaggatttggttgatcgtcatctgttcacgcccttcgcctatcccgagcttcgcgagactctccatcgatcagcggtcgccgccatcaagcggtacttcgcaacacacggcgacgacatcccgcgaactgtgcattcggaaaagcaaattcaggtacatgtagcgccgggcatcaccgtcgacggacgaattgacctcatccggagactcgacaccgacgaactctcgatcgtcgatttcaagtccaccgaccgcgctcaacctgaagaagtcactcgggatcagttgcacgtgtatgcagtcgggtacgaagagctaactggcgagaatgccgatttgattgaggtacttaacctcgacgaagccgggaagagcacacgcgaggaagtcgagagtggcctgcttaccgacgttcgtgagcgcatccgtgaagctgggggatcgctgcgagataaccaattaaaccgactcgcttcgtggtgcatgcaatgcgagcgatgtgacctcgccgggatttgccgtgatcgcgcgaacgtgtga

SEQ ID NO: 72460 - DNA, 1335 bp, Shewanella baltica OS625
atgaagcttagctgcgtacgcttatccaacttccaaagttttggacctacttcaactgaactaaatctcgaaaatttaacctttcttattggctctaacggttcggggaaaacagcagcattgcaagctctctgcagaatgtttgctcttgacccttcagtacgtcgaattaaaaaatctgatttccatgtaccatacgacgaaatcgaaattccggacgaacgaaacctttggattgaagcagattttcaattttccgaacttaatgatgaagcagggaatacaactgtagcccctcactttggtcacatgaggcttgatgatggtgacggaattccgcgagttcgctttaggttagaagcatcaattggggttgatggtgacatcgaggagtcttttgtttatgtacacgatctagataagcatggacatccactctctacagcaaaagttagacgaggtgaacgcaatctaattcagcttcattatctaccagcacgtcgtgatccagctgagcatatcaccttcgctacaaatgctattttaggacggcttctaagagccgtaaattgggaaggagagagggaagctataaaagagcacacagagcaaataagccaagatctcgctgcaaatacttccgtaaatgctcttagtaatagcataaaaagttcatgggcaagcttacacaaaggtgagttttttaaggagccaaaaataacttttgttgccagtgaaattgaatcacttctgcgtcatctttccatttcattcacccctggacatgatgaaactctggtagacttttcgcgcttgagtgacggacagaagtcgatgttatatttatctctcgttttatcatctcaagtcattggccgcgcggccttgaatggtgataactcctttgacccagataagttacgccccccagttttcacgattgttgcggttgaagaacctgaaaatagcttatcaccacatttcctcggtagaattgtaagtgctttgaaagaaatgaattccaatggagatgctcaggcattgattgctacccatgcaccttcaatgctaagaagaatcgagccaaagcaaattcgatatcttcgactaaatacaagtagacacactactatttcaaacatcagtcttcctgattccgagacttcaggagacgcacataaatttgttacgcaagcagtaaaagcatttcctgaaatttatttttctcgacttgttgtgctgggtgaaggtgatagtgaagaaattgttcttcctagattaatggaagccaaaggagtacctgttgacgaatttgctataacggtaagcctttag

SEQ ID NO: 72461 - DNA, 1671 bp, Shewanella baltica OS625
gtgattagacacgataactggaaacctgcggatgggctaactcttgaaccaaatgctgaacgagcagtaaaagaatgcgaaaaaaatttagccctaacagcaggtcctggtgctggtaaaacagaaatgcttgctcagcgagctgacttcttactccgaacaggcacttgccgctatccgaagcgaattttggcaatttcatttaaagttgatgccagttcaaacctaaaagatcgggtaactcgcaggagtggagatgaattatcatctcgatttgatagttacacgtttcatgcatttgctaagcgaattattgaccgttttcgccccatactcacaggcatctacacgttagattcagaatataccattggaagtcctagaacgcctcagaagcaaatagaatttgcagatttggttccattagcaactcgtatcctccaaagttctgctgtagctagaaatgccataagacaaacatatactgatgtgttcttggatgaatttcaggattgtacagatattcagtatgagtttctaaaaatagctttccaaagcacaacaattcgattaacagctgttggagatacgaagcaaaaaattatggggtgggcaggtgcgcttgatgggatttttgtcacttatgctcaagattttcaagcattaccattaaacatgtatcgtaacttccgctcaaagccacagcttcttcggttacaaaacgaaatcatccggacactagatcctgcctcggtgatgccgaatgaactcattgttggcaatgaaggagaaatacgagcatttcaatttgaaacaagccaacgtgaagctgaatatctagccgaacaaattcaaaattggataatcgtagataatatccctccaaacgagattgctatactcatacgaaatcaaccacatttatatgcccaacatctaatacctgcgctgcgaaatagacaaataccttttagaaacgagcaagaattacaggatataactgtggaacctgctgcccgcctcattgtcgatttccttctttgtacttttggtaaacgtgaacccgcagcttggttaaggctaatgaaccaattgatcccatttaccgatgacgaagaagagcaggataaatatcagcaaatctggcttaacttcattcaacgccagcggaaaagaattagggaaaacccaataacaatagataaccaaagtcgttggcaaagtgttcaaagttttattgaacttgtcggtattgaaacaatgacagcactttcacatgactacgaaacagcctctcgtctaaatgaagttctaagggcaacatttaataagttagatgaaaccttggcttcaggcctgacactacttgaagcactttgccagtttacagatgatcaatcagtaagaatattgacctcacacaaaagtaaagggctagagtttgatactgtagtacttttaggcatcgaaaatgaatgttactttggggcccctcaagagaacctatgtaccttttttgttggagtttccagagctaaatgtaagctattgttaacatttgcaaaagagcgaatacggccagaaggcttttctggtcggtggagtgaacaaagaacacttgttaatgagtatgctggttatgtcaggccatttttatctaacaataactaa

SEQ ID NO: 72462 - DNA, 1944 bp, Shewanella baltica OS625
atgtacttaagtaacttaaaaactgaaggttttcggtgttttggaaaagagtttaacgtccaattagcaggcgggttaaatgtgatagttggtgaaaatggcgcaggtaaaacggcaataattagcgctattaggcagctttttcacgattctgaatcaggtagatatagcattactagcgatgattttttcagcccttttgtcgctggaggcaaaaatgcttcatcgctctctatcagcgctgagtttgatgggttagacgcagcagataaagttgcgtttcttccctgggttggagcctctaatactgcgctgttaaacctgcaagctgaaaacaaggaagttcgggggcgattcaaaaaggttatttggggagggatatctagaagctcccagtttgatcctgagctactagatcttgttcagtgtatttaccttccaccactaagagacgctgaggcaaacctatcaaatggacgccaatctaggctatcaaagcttctaaaagctctaaatcgtaaacagttaaaagagtgtaaaagagacactaaacttcatcctcttgaatctaaattgaaagaattcaatgaatcattggctgatgacggcaaattagggattaaagaagctagtaagctaataaatgaaaatttgaccaaggcagttgggcattactttgggcaaaaaaccaacatccaatttgcgaaaagcgattttactaaaattgctgaaagcctgaccttactcttcttcccggacttatctgtaaaagatcaggaactgttccgtgagctcagtcaaaatagcttgggctataacaacttgctttatattgcgtcaattttggcagagctaacgcttgatgacgaagatgaagaccaaccacttttcaagctattacttattgaagaaccagaagcccatcttcatcctcagctgcaaataaggctgttaaatcatttaaaatcagtggcggaggagaataaaaatgttcaagtaattgtaactacacactctaccgttttagcctcttctgtagaccttgaatcgatcattcatttgtccaagtcaccagccccagtagcaactcctctgcgtacctgtggacttcctaaaactagcggtcagttcataaaccgatggttagatgtaactaaatcaaacttattgtttgctcgtggtgtaatccttgtagaagggattgctgaacaaatgatcattccagccttggcagaaatagtactgaaagaacaagaagtaggacgccaaaaccttgaagatttaggcatctcagcaattaacctaaacggaatttatttcaatcatttcatgcagttatattgcaacattaatggcgagaatgatgaagaaaggagctcctggaataacattcctattagatgtgctggcatcacagatttagatccaccgaagaagcaaacaaggcagattcccgatccgaaagatacaaataaaacaaaagaaatcgaagaggatttcatgccctatgaaggtcatatgaaagacgggactaaccatgccatcaaactagttgattccatcaataaatcaaccaatgctcggctatatgtgagtaattacaagactttagaatatgacttagctatggaaggaaacaatgctgcgttaatgtctgaaatcatcgcttctctgtggcctaagccaaaaaatggaacgagcaaaatagttgaacattttacacagctagcttcgatagactggacaaaaaaatctccagaagatgtcgcagtaatggctcacaacattctaaaaagaattgacgatgataagattgggaaagggatttttgctcaagtgctcaccgaaaaaattcaacgtgagggccgcccttttgctgcccctaaatatatcagggatgcaattctgtgggcttcatcaattgatgttgctgaggaaagctaa

SEQ ID NO: 72463 - DNA, 1758 bp, Shewanella baltica OS625
atggctgttgaatttactgatgagcaactcgcttatgtgcactcaagcatcgaagataacacctttttagaagcgtgtcctggaagcggaaaaactgaagtagttgcagcaaaggttgctaaggaaatcgatgcttgggagaagcatccaggtgggcttgctgcactttcgtttgcaaacagcgctacagaagagttagcaagaagagtctcaaagtatctacccaaaggtcagagccaattcccccattttttaggtacatttgacagttttatctacaagaatatcgtctcgccactatctactgatctcacgggttatgtcggacaaaatggagatgcgtcaatacgcattattgagccaagtgcgtatatagggtatcgaactgaaaatgaaatttcagaacgagggcgaataagtgcccaccattactcctttgacccgataaaaaagaaatttatttttgcaactgcagaccaaaagctagatagagcccttaattcaattgccttggaagaggcgcaaatacaagacttgatcactaccaagaaaaaaatgctcagaggcggatttgcaacctatcaagatattgaatatttagcctataaagcactgaagcaaaaggagtttaactgctatttttctttgcttgcagtacgctacccactaattattattgatgagtgtcaagatctatcagaattacaactaacaattgtaaaactactagcccgcaatggaacaagtctccactttgttggggaccttcatcaagcaatttatggcttccgtaaagttgagcccaaaaaagttaaacagtttgtacaagataataattttaattgcttgtatctaacaagaaattttagaagttgccaaaacatcgtcaacctatgtgcaaagctaactggtcgtgacaatatagttggcaacataacttggcttgaaccaaggtgcttagtgctccagtatgacaattgccctacagaactcataagttcttttgaggaaaaatgtgatgggtttgaaaacaacgttgttgtgtcaagaggccactccatactgaacaaattccagacttctgttgccaagccaaacaacattcagaatctagctctcgctgttaagctatataaccccgataatatggaagctctaaatcagtctttacagcacttctcagagtttcttcgttatcacttgaaggaaagttacaagccaaacagtttaaattgccctcaatctattatctctaacctttcatggcgcaagtttttatatggtgcattaaaatatttgaccagtaactctttacataattttgatgttgagtggtcaagctggacaaaaaaagcaaaggtattaatccgagctctcccaaagcagagcttttgtactgaagctattgcaagcacattagctccgttgaaaaacgtaaacttaatttctccgaccggctcttccaagcttgaagttgcgccatcattggctgttactaacaagccatctttgcagtttgcaaaaggaactattcatggggcgaaaggcgaaacccactgtgccaccatagttatatcatctgctcgccctggaggtgattctcattggaaagattggctcaaagaccctgatagcgaggctgctagatttgcttatgttgcatcatcaaggccgagagaacttctgatttgggcagtaaaaacgctgaaaccaccagaaaggcaacaactagagtcggttggatttactattgtgtag

SEQ ID NO: 72464 - DNA, 1128 bp, Streptococcus pneumoniae GA44194
ttgattccaccagtactaactatcctagcaatagaagaaccagaaaatcatattgctccacatcacattggaaaactgataaaaaggtttaagcaattaggcaataatgacaactcccaagtaattttaacgtcacattctccagctattgtaaaaagaattgacccagaagatttgaagtatttaagaatagaaaataatgacagagttcttcaaaccattgtttctgatatacagctacctccagctatagatgaatcttataaatatattaaaggagcaattcaagcttatcctgaactatattttgcgaagttagtagttctaggtgaaggcgacagtgaggaactgctattaccaaagttttttgatttacttgggaaagaggtagatagctctcagatttcaattgtccctttagggggcagacatgtcaactatttttggaaattattgaatgctctcagaattcctcatattaccttgttggattttgataatgagagatacggaggtggttggggaagaataaaatacatttctcaacatctgtatgagctgaacacagagtttcaagaatggttccatactcagagacttgattttaatgaaattgggtcacgaggttgtgaatcgataggagctcaacgtctgattaattggtttaataaactcgaagaatttaatgtctacttttcatcgcctttagatattgatttcttgatgctacaacattataaagacaattatctgaatactttatccccaatagaaggaccagttgtttcatataatgattcggatggaagtagtaaaaaagtgaaattgagtgatttagactgtcttgatagattgcagttagaaggtttcaacaaacgtaaagaggaagcaataagagctactttaaaagataagagtggacatggcgatagtttcaatgaagaagaaaaagaattaatgatttggtatcaatatttctttttaggtagaggaaaaccaacaactcatatgcaatttttatcatctattagtgatgatgaattaacaagaaatctaccccctgtatttgaaaaaatagttaacagtgctgaagaattacttggagatattcaacatggtaaagagtga

SEQ ID NO: 72465 - DNA, 1818 bp, Streptococcus pneumoniae GA44194; identical to SEQ ID NO: 71809

SEQ ID NO: 72466 - DNA, 1128 bp, Streptococcus pneumoniae GA11304
ttgattccaccagtactaactatcctagcaatagaagaaccagaaaatcatattgctccacatcacattggaaaactgataaaaaggtttaagcaattaggcaataatgacaactctcaagtaattttaacgtcacattctccagctattgtaaaaagaattgacccagaagatttgaagtatttaagaatagaaaataatgacagagttcttcaaaccattgtttctgatatacagctacctccagctatagatgaatcttataaatatattaaaggagcaattcaagcttatcctgaactatattttgcgaagttagtagttctaggtgaaggcgacagtgaggaactgctattaccaaagttttttgatttacttgggaaagaggtagatagctctcagatttcaattgtccctttagggggcagacatgtcaactatttttggaaattattgaatgctctcagaattcctcatattaccttgttggattttgataatgagagatacggaggtggttggggaagaataaaatacatttctcaacatctgtatgagctgaacacagagtttcaagaatggttccatactcagagacttgattttaatgaaattgggtcacgaggttgtgaatcgataggagctcaacgtctgattaattggtttaataaactcgaagaatttaatgtctacttttcatcgcctttagatattgatttcttgatgctacaacattataaagacaattatctgaatactttatccccaatagaaggaccagttgtttcatataatgattcggatggaagtagtaaaaaagtgaaattgagtgatttagactgtcttgatagattgcagttagaaggtttcaacaaacgtaaagaggaagcaataagagctactttaaaagataagagtggacatggcgatagtttcaatgaagaagaaaaagaattaatgatttggtatcaatatttctttttaggtagaggaaaaccaacaactcatatgcaatttttatcatctattagtgatgatgaattaacaagaaatctaccccctgtatttgaaaaaatagttaacagtgctgaagaattacttggagatattcaacatggtaaagagtga

SEQ ID NO: 72467 - DNA, 1818 bp, Streptococcus pneumoniae GA11304; identical to SEQ ID NO: 71979

SEQ ID NO: 72468 - DNA, 1794 bp, Streptococcus pneumoniae GA17227
atgaagttaacaaaaatggttattaataattttaaatcttttggggagtgtcaagcaattaactttaataatcaaactgtactgatagggaataatagttcaggaaagacaactgtattacaggcattgagtaagttgttttcagataaacaaagtgatagaatcattcgaaaaagtgattttcatttaccaaaagggttaagacctggtgaaaacacaagaaatctttttatagaaactatttttgagtttgatgaacttgatggaactgtctatggaccagccattccaacatttttcgagcactttacagtttctcaagatggtgcaaaaccttttttacgaatcagattagaatcttcctgggaagatgatggaacagttgaaggaagtattgatactcaaatttattatatttcatctgatgaagatactattagagatgaagacaaacatcgtgctcctagaaaggatttggataaaattagggtactttatgtaccagcttcaagaacgcctgagaaggagttgggtaatgcttcaggtagtatgttaagtaggttggtaaatagtataaattggactgaagatgagataaaagaaattaaagataaaattgatgagttgaataacacttttttatctgaaaatggagcattaactcagatcaacaatgagattcagaaatcatgggaattatatcatgaagataaccgtttttctcaagcagagttgattattaattcttctgagatggcggcagcacttagacagattgccttaaaattttcaccaacaaccactgaagaagcatttacagtttcagatctaggagatggactgagatctattttttatttttcacttgttgattcgatacttgatattgagttagaaattaccaaagatcgtgaagagaatcctgataatccaagatttaagttggtacctccaatactaactatcttagcaatagaggaaccagaaaatcatattgctccacatcacattggaaaactgataaaaaggtttaagcaattaggcaataatgacaactctcaattaattttaacttcacattctccagttattgtaaaaagaattgacccagaagatttgaggtatttaagaatagaaaataatgacagtgttcttcaaaccattgtttctgatatacagttacctcaatcgaatgatgagtcttataaatacattaagggagcaattcaagcctatcctgaactatattttgcaaagttagtagtactgggtgaaggtgatagtgaggaactgctattaccaaagttttttgatttacttggactggaaattgatagttctcagatttcagtagttcctttaggaggtaggcatgttaattatttttggaaattattgaacgctctcaggattcctcatattaccttattagatttcgataacgaaagatatggaggtggctggggaagaattcaatatgcaataaaacaattgatactaaatggggttgctaaagaaaaacttgttactgtaacagccgaatctcaaaaatcacgagttctagatgatgatgagattgataaaataaaggactggaagattgatagacctgataatcagttgcttgaggggtggattaaaatgttagaaaaattcaatgttttcttttctgcaccacttgatattgatttcttaatgttacagtattataaagaacattatctggaaactttatctaccaatgagggacctgttgtttcttatactgatgaaaatagtgacaataaaaaataa

SEQ ID NO: 72469 - DNA, 1818 bp, Streptococcus pneumoniae GA17227; identical to SEQ ID NO: 72387

SEQ ID NO: 72470 - DNA, 1818 bp, Desulfotomaculum gibsoniae DSM 7213
attaaaatcaaccgggttcaaataaagaatttccgtaattttaaaaatcttgacgttacacttggagaacatgcagttattgttggagaaaataccatcggtaaaagcaatttcttatatgcattgcggttagttcttgacccatcgttgcctgatactgcacgtcatctgcaggaatcggatttttgggatggccttcctcgtcctttgaaaaaaactgctatgattagcatatcaattgacctggtagactttgaagataatgaagatttaatggctatattggcggagcacctcgtagacccggaacctatgactgcacgttttacctatgtatttcagcctttagcgacactttcaggttcgccaagctctgacgcagattatgaatttattatttatggcggcgatcgagctgaaaacagggttggttacgatgtcaggcgtaggattccagtaaatgttctttctgctctccgtgacgctgagggagatctgtcaagctggagacgttcacctttaagacctttactggatgaggcggccagggaaatagaccgtgaagaacttaataacattgcctcggaagtggctgatgcttcagcagaattactgaagaataatgaaatcagtgagttggcagaacaaataaataatagactttcagatatggttggtaagttcaacagtttaaacaccatacttggttttactgcaacggatccttatagacttataagggaaatacgcctttttattgatggagggaaaaggggcgtcggtgaggctagtcttggttcgtcaaatttgctttacctagctcttaagtcactggaactggaacaactcgttgaacagggaagtagggatcatacattccttggcattgaggagcccgaggcccatttgcacccccacttacaaaggcttgtttaccgcgattttttgagacctcgaagccaccgagaaggagaggacggtcgctctgaaatcaagcacaaacaccaaaccatactcttaactacccattcacctcacattgttagtgtatccccactgcattcaattatcctccttcgccggtcatcatccgaaaatactacagaggcagtatctactactcaagtaatccttgacgagaaggaaatagcagatcttgaacgctatattgatgtaacacgaggtgaaatgctttttgctaaaggtgtaattcttgttgagggagatgcggaagaatatcttgttccagttttgggtaaacgtcttggctataactttgacgaactggggataacggtttgctcagtatccggcaccaattttgccccctacgttaaattacttggggaaagcggcttgagaataccctttgccgtgttaaccgaccttgacccacaatcagatggcagataccttggtcattcccgggtaacaagtttgctaaaagaaattatggacgaaggggaataccaaaaagcggaagatgagggtaaattacttgatttggctcctaattacggtatttttcttaacaactatacgttggagatagacctgtttaaatataagcgccataaaagtatgtgcagtactttaattgaactaacagaaaataatgcggccaaagaacgggcaagagtttggagagaagcccctgaaaaacttgatgaaaccaagtttttaaaagatataggtgcaataggtaaaggccggtttgcccaacgtctggccacaaaaattgccaattacaaagcaaccatatgtccgccgtacattaaggaggccattaagtatgtcgccggcaaatgttctaaataa

SEQ ID NO: 72471 - DNA, 1878 bp, Desulfotomaculum gibsoniae DSM 7213
atgtcgccggcaaatgttctaaataaaccaacatacttggttgtagccgaagatttgagagggaatcccggccagagaaaagcttacgaatctcaaaaaaattgtgtaatacttgccggtcccgggagtggtaaaacaaaaattataacaattaaagtagctaggattttaaacgaggacattcgcctgccccgtggtattgcatgcattacatataatgcagaatgtgctagagagttaaaacgccggcttgatgagttaggagttgtcgagaattcacatatttttatcggcacagtacattccttttgtttaaaaaatattatcctgccttacggaaaaattgctggtttggaattacccgaacctctgtccgtagctattccaaaagaacaagaccgtctaatggaaatggcacttttacaggaaaagggtgatgaagagcttaggcgttggaaaatccgtttagctcgctacaggcgtacttatcttgaccgtgactccctggaatggaaaaataccgatgaagatgctgcccaggtaattgaagcatatgaagctaaattacgaaaaaatggttttatagattttgatgatatgatgcttttgggacttcaattagtggaaaagcatgaatggataagaaaactaattaaagctcgatttcctgttctagttgtagacgaatatcaggatctcggagtccctcttcataggatggttcttagtctatgttttaaggccggagtcaggctgattgctgttggtgaccctgatcagtcaatatacgggtttacgggagcaaaaccggagttgcttgaaaaactggctgaaatggaagggatagaacaagtaaggcttagacttaattaccgttgtggggagactatagttaaggcttctcagattacgcttggtgaaaaaaggggttatgatgctcgccctggggctcataaaggcactattgatattcatgaatgtccggggggccttgagcaccaggcagaaacaatatgcaataaaattatacccaatgttataaaaagaagacgttgcaacctcggtgacatagctgtgttatatttagataaaaacatgggagacgtgatagcagagaaggtaaatgcagctggcttgccctttattaggatagatcaaaatgccccctatcaaaaaacccccttaattcggtggctggaagattgtgcgttatggtgtagcggtgggtggaaagaaggtaagccgcgtctttctgcccttatacagacatggcttgcgtttaacagaaacgactgtgataatgatatgttattaacgtataagcgaggacttatacggtttttgtgggctaaccgacgtccggagatgatgttgcataattggctctcggcttttcaatcgtcctgcttaaaagaaatgttcagccaacagaaaataatgagggacgaaaaagaagcttttgaacgtttaatcggtgcttgtgccaagggcggtagaatcgaaaatttcatagttgctgcgtttgcagggcaaggagggtcgccggaacacctaaatcttctcactctacacagttcgaagggctcagaatttgacgttgtagtgattatgggaatggaccaaggcctgataccaaggtatggatctggggagggagaaaaaagagaacaaagacgcctgttttacgttgggctgacccgatctcggaatgaggttcatttaacatactctggatggacaaaaaataagtacgggcgaaaatttaataatggtccttcggaatttttaattgaactccgggatagtgttttaaatgatgacgagggctgttctatggcaaaaagtacatctaatgccattttagggggcgttctgtaa

SEQ ID NO: 72472 - DNA, 1782 bp, Paraprevotella clara YIT 11840
atgtatctaagtcaattacatattagcaaattcagggtatttgatgatattacgctctatttcaaaagtggaataaatatcctaataggtgaaaataattcgggtaagactgcaataatagatgcattgcgcatatgccttggatgtggtaaacccgacaatcttgtttatattcaagaaagtgatttgcatctcaatcctgaaaatccgacagagaccaacaataccatacaatttgacttgatatttaaatttggaaatgcttcaattgaaaaagaatgtttctatgatttcatatcacaagataaggataatccagacaagcaaacaatacagttacacctaaaatttatccaagaaaataatggtaagaaaaaatatttcaagcgaataatatggggtggtgataatgaagggcaacaagttccatatgaatcattacaagaaattttctatacctatttaagtccattaagggatgccgtaagttgtctgcgaccatattcttacgacaataagacatctcagttattcaaccaacttacgaaatatgacaaaggcgatgaaagcatacctctaaatgaggaaaagaaaaaatcgctcgcaaaaaaactatatcaagtgttcgagaatgatgctgatgattggaaacatattttaatcgcgggaaaggacaaagttaatacacatcttgaaggtacgggaataactcgtaaacatcctgatatagaaatgcgctatgtcggacgcgaattttcggatgttgtacgaggtatcgaattaaaatgtccggtttataaaacgatcgaagctgggaaagaacaaaaatactttgctttatctcaaaatggattgggtgaaaataatcttatttttacttctgtcgtgttgggagaccttatcaacagatgcgaagaccatgagttggaaatatataatgccttgcttgttgaagagcctgaagcgcacttacatccacagtatcaaaacactttctttgaatatctgaatgagttacaaagcaaaggattacaagtatttgtaacatcacattctccaacgattacggctaaatcagatgtcaataatatttcggttttgcaacgtaaacaaagtattataaagtcattttcttttgacgaattatcggaagacgattatccgaaagaaagtaaacgacatttacgaaaattcttagacacgacaaaagctcaattgtttttcgctaatggcgtattgttagtggaaggtgtcgcagaagcgattattattccaattctcgcaaagaaattcttgaccgaaaaaatagacttgtgtaaaagtgggattgaattagtcaatatcggaggtgttgcattcaatcattttgggttattattcaacaatgatgatgagagaaagcgtctattatcgaaatgtgcgattattactgatagcgatcccaacgaggacaaggagatatccgacagagcacagaaagcaaaaggtttagagaaacacaaccttaaagtatgtttggctccccatactcttgaatacgatttgttcgagcaatctgaacagaataaaaccataatgcgagatgtatatcgtaaacttcatcctaaaacagaaaaattaaaatctgaatttgacgcacagactttgatgcaaagtttggcacaaaataaagataaagctgaatttgctttacaactctgcgaccgattagaaacagaggacgcctttgatgtacctgattatattaaggaggctatcttgtttgttgtatccatagaataa

SEQ ID NO: 72473 - DNA, 1755 bp, Paraprevotella clara YIT 11840
atggctattcaattatcagcacaacagcaagcagtcgtagattgcaacgagccgagaagtgtcgtgaaagcttgtccgggaagtggtaagacattttcggtagcggcacgtatggccagattgttacgtgaaagcaacttatcaagacatcaaggaatagcggcagtatcttttacaaatactgcttgtgatgtaatcaaaaaagaattgaaagacactttcggttatcccaatatatcttatccatcatttattgggacaatcgacagctttataaacacatacatattcttgccttatgctcacttggtaatgggatgtgattgtcgtcccgaaatcgtaggaactgagtttaataaatggtatgattacgatgcttcaaaacggaactatgataggacaaaaatcattgatccaaattattttgtagataaagtgtctttcaatctaaatggagaacctataccattggctacagcacaagaatttaatttttcttggagccaaatgaggaataaagacggaaaatacaggaaagatgttaaagacattattgagacgaaacgtattcattttgcgcaaggaaaagcaaatcaggctgatgcaacatattttgcgtacaaaatattaaacaaatatccctcaatagcacaaaatattgttcagcgatttccaatcctaataatagatgaagcgcaagataccactgagttgcaaatagcaataattgacatattatctcaacgtggagctgattctattatgctgattggagatccagaccaagctatttttgaatggaatacagctaatccgcatctatttatggagaaatacaatagtccggattggttttcattggatttgacggaaaataggcgaagttccgacaaaatatgtcaattggctaatagtttttctggaaatgcaatgaattcaatagctatagacaaagattatgctgaacatccatgcctgataggtcacctcagcactccggagtcagtcaatcaaattactgatgatttcatccaaaaatgtaatgagatgggattgaatgaatctgaatatgctgttgtatttcgaggacaaagttttggggagacatatttcggattgacaaacaatgataattcagcaaaacagaatagcccatgggtaaacggacactacggcgtcagggacgtcgtacatggaaaatatctgattgatcaaggaaaatacacggaaggattagctcttattgaaaaaggctactataaaataacaaagcaagtacggtatgtttccacaagtactatacgtaaggaaatagccgaagtaggatttaggtcgtatcgagaaaaaatgcttgattttatcagaaaactaccttcaacgaataaaacattatctaattggattgcagaacttcaacgggaaggcataaatttaatggttgcattgagaaaagcgaatgttagtatagaatcacttttcagaacatctaatcaagaattacaacaagcacgttcatatttgcgaacaattcattctgtaaaaggaatgacattagaggcagttttagtatttctctctaaaagagctgttcatacgaactatacgactattttgaatgattcagccaaatactgtattcataataatgaagaactccgtattgtgtatgtagcttgtacacgacctaaaaagttgttatgggtagccgttcctgcagacgatattgattgttggaggaagaaactatctctctaa

SEQ ID NO: 72474 - DNA, 1095 bp, Paraprevotella clara YIT 11840
atgattttcgagatagaaatacttattcaagaatttaagcgcgaaaaagagaaaaagccagctgatataaatttgttgtttatagaagaaccggaagctcatacgcatcctcaaatgcaatatgtatttattaagaatattaaaaggttactaaaggatggtattcaaagggcagatggtgaagcaagaagtttacaatatataataagcacccattcttcacatattgttgcggatagtgattttgacgatattaaatatcttaaaaaggaaggtgataataatgtcattgcaaaaaatctgaaagatttgaagaaagagtatgataaaaaaacatcccaatatcaattccttacccaatatcttactattagtcgagctgaaatattttttgcagaaaaggctgtattgattgagggtgatactgaaaggatgttaattccaacaatgatgaagaaaatagatattgaggaagctgcaacacacaaggcaaaaagtacagaagatgattatttgcctttattatctcaaaatatctctattgttgaagtcggggcttattcacagatatttgataagttcatagagttcctaggaataaaaacgcttattataactgaccttgatgcaataggggctgacaataaaaagtgtgaagtagttaatgctgtagcatactcaaatgaagccttatcgcattatttcaataatcccacattagcagatctgaaaactttttcgcttcaagataaattatttaataatataggcggatgttggaaaaatcaatctaatggtagattatgtgttgtttatcaaactaatgaagctgattataatgctcgtagttttgaggacgcatttattcatcttaatagaaactttgtaaaaaacaataaagctgattttagaggattgcaaaataaggattattttgacaatcctaataagaacgcatatattttagctcaagaatgtattaaaaagaaaactcattttgctttggatattttataccatagtgatgaaatgttaagtaattggcaaattccagcatatattaaggagggattattatggttgaaacaagattag

SEQ ID NO: 72475 - DNA, 1944 bp, Paraprevotella clara YIT 11840
atggttgaaacaagattaggagtagagcaagtaaaagatgagttccaacaaataatggagcatattgctaatggtgacaactttttactaagtggtggagctggtagtggtaaaacatattctttagttcaagtaatcaagaaggttattgaagataatccaacctcgaaaatagcctgtatgacatatacaaatgcggcagttaaagagatagaagaacgtgttaatcataagaatttgaatgtttccactattcatgattttttgtgggataatatcaagcattttcaaaaggaattaaaaatagcaattattactttgtccaatgatgagaatgtaaataagataaaaatagatggattaagtaaggtgtcaaatgattattttgacaatggagaggaaactgttaaaatacaatataaagaatatttaaggttaaaagatggaattatatcacatgatgaattacttgtgatagctgattatatgtttgctaaatattctaaactttgtgatgtcgtaaaagataggtataaatttatttttatagatgaatatcaagatactcataaagaagttattagaattttgttagagcatttcccgaagagcaaaaaacatacgataataggcttttttggagatacaatgcagtctatttatgatgacggtattggtaatattaatgaatataaaggggatgaaaaagggaaagtgagagaagtcaagaaaactcaaaatagaagaaatcctcaaaaagtaatagcattagcgaataggttgagaacggatggaatagtgcaagtaccttcaaatgatatttcagcccctaatatgattgacggaaaagtaaaagaaggtgaaatcatatttattcattcaacaaatggagacatttcgcgagtagaacaattcttaaccgaaaaatacagctggagtttttctgatacaaaaagaacaaaagaactgaatcttacccataatttaattgctgacaaagcgggttttagaacattgatggatatttacgataaagaccctattatgggattaaaaaaggatattttacagaagattaaagataacgaaaagcaagggaaaccagaaatacatattgatgatagcgatacgtttgatattgtagtagacaaatttcagttaaaaaatagacagcggcaattgaaaaaagatatattgttatctaaccctcataatgttgagctatataatcaattgaaaaatagacctttttccgaagtacggagaatgtattttgataaagaccaattgatagatgataaaaaacaagatgatgatgacgaaaataagaaaggttctaaaagagataatctaataaggcatctatttaaaattcaaacgaacatatctctatatgtcaataaacaatataatgattttttaagggttacggattataaccaaatacatacaattaaagataaaagagaattaaaacaaaatatagaaagtctgattgaggtaggagataaaacgattgaatatgtgataaatgatgctcatagaaaagggatttgcctgattgatgaaaaattagaaaactttttgatagaaaaggaatacatatataatcaagtgaaaaacgtcaaatatgctgaattccaaaagttgtatgcttatttggagggacaaacacctttttcaactcagcataagactaaaggtgctgaatttgataatgtgcttgttatattagataatggaaaatggaatgattataattttgaatatttatttatgaaccaaacagaaaaacagagagttttagaacgaacacaaaaaatattttatgtatgttgtactcgtgctaaagaaaatcttgctgttttttatcataatcctacatctgttgttttagcaaaggcaaaagaatggtttggagaaaataatgttatatcaatataa

SEQ ID NO: 72476 - DNA, 1809 bp, Agrobacterium tumefaciens CCNWGS0286
atgatgcgagtagctcgaatagtgatccagaattttcgcacgttcgcgtcactcgatgtgaatgtcgcggatgatctgtgctgtatcatcggagaaaacaatactggcaagaccgcgatccttcgtgcaatccaaatttgtctagacaacatgctgccgtcgagtttccgggcgctgatgcgcgaggacatccactccgcgatcgatatcgcccagcccagccaggttttgataggaattgaattggctgggttcgagggacgtgtgaatgaagaggcgctagttagtacctggaagacggctgcggaccgcgcgcgtatattctaccgcttccgtccgcggccagctgtccgggagcagcttgtaagtggcgacatcttacccggggcgctgaccctcgaagattatcagtgggaaatccgcggtggcggtgaccctgctatcgacctcacggagattgcctgggatgatgacgggatcggcgagtcggtgcgttttgcagatctgcaatcttaccttcttgttcatctgcctgcgctccgcgatgtcgagagcgacctgcgtaatccccgccagtcgccactcatccgtctgatcgaggcgtttgagattgatgcggccgagcaggatgccctaattgccatcctcgacgaggccaatcaggcgatcgcgaactcggcgactattgccgaaatagcgggggcaattgacgcacggttcaaggatgtctctggccccgcgttcgagatggacgccactctcggtctctccgctgcgactttccgcgcgatcatacgcaacctgaaaatcattctgtcggacctttcgctcacctcgttcgaacccggtcgcaacggtcttgggatgaacaacatcctctatattgcgatcctgatggaatacctgcagcggcggatcgcgctaaaccgctcggccggccaattgatactgatcgaggagccagaagcgcatcttcatcctcaattgcagttctcgttgatcgcggcattacgcgcgatcaacgtgcagaccatcctgaccagtcacagcacgcaggtgacctctcaggttccactgagcagcattgtatctctcaccaagcgcgaggacgcgaccatcgctgccggcaatctcgcgctcaatgccgcgctgaccgcgccagaaattgccgatctcgaacgctacctcgacgccaccaagagcgccttgctctacgcgcgcaaggtcatgctggtcgaaggtccagccgagatgttcctgatcccggcgatgatcgagcaagtgtacggcgtgaagcttgagcgactcggcatctcagttattgcgattcatggcgtccactttgacgtctatgccaaactgttccgcgccggatcgcttgagaagaaatgcgccatcgtggccgatgctgacatgaagccgtccgacgccgaggacttcgatccggaaacccacgcgcccgatttggtggcactggagaacgactttgtgtccacttttgagggcgccaccaccttcgaacgcgagttggtatcgctcgggcgtctgccaatgctgatcgagaccgtccgcgctctcggcgcgccgcagatccttgcgcagatggagcaagggttcgcaacgcttgcgctcgggggactgagccccgccgacgagacagcgctacgcattgagcttggtcgtatcacgctcaataccgccaaacgctttggtaaggcgcgtttcgcgcagatagctgcgcgctatgctcacctcgcgaccgatctgccgacctatatcgaggaggcgtatgagtggcttaccgaatga

SEQ ID NO: 72477 - DNA, 1764 bp, Agrobacterium tumefaciens CCNWGS0286
atgatccggctaacatcggaacagcgcgaggccgtcgaatacgacggcgatctgcttctcactgcgtgcccaggaagcggcaagacgcgggtcattctcgccaagctgctgacgctggccgatcaggttgtcggtacgccacagttcatcggctgtattacctacaccaatgctgcagtcgacgaaatcgagaccagattgcgcacctacggcaataacacgatcgcagaccgctgtgaaatctccacgatccacgctttctgcctgcaattcattcttcgtccctatagctggctgttacccgaggtgccggcgtcgtttcaggtgctctcccgggagaacagtcagtttgagcagatcgtgacggcagtcgaggacgctttcggccgcatgcccgccgggcaggtgttcgaggactatgaatcgcttcgcatcgacgtgaacggcgacccctgcggccaagggttcgagacaggcattgtcactgaggaatccgccacgctctattgggagcgggtccgcgcccacggatacctcgatttcgcgatgatcctctattattcatggaagatcctcgaacagcacccgttcgtcgcacgaggcatcgcgagccgctttgcctggctacttatcgacgaatttcaggacaccactgatatccagatcgccatcttcggagcactccgaaatttcctccacacgcgcttctttctggtcggtgaccaaaatcagtcgatcatgcgcttcgcaggtgctcgtcccgaactcgctgatcagtttggagatgagattgacgcgcaccgcgacacaaccttgaccggcaacttccgctgcgggccggcgattgtcgacactgcatcaacactgatcccgaccgtcccggggatgcagtcggctggcgatgctgcccaagtcgcggcgcaagtgaactacgttcatgtcgcccggccgattgacgccatcactgactattttctgcccgccctgcaggatgccggcatcccgctcggtaaggcagcaatactggcgccatggtggacgcatcttatccccgtcgcccgcgccctccgggaattggacgtgccagtcttcggtccgggcgcacggccctatcgacgtcggcgactgcttgccggactcgccgagcagctcggagcctgtgccgaggctggcaactacctcgggctcccaggtgtcgagcgggctctgtttcggctcatcggcgacctcacgggagagtcgcgctacgacatgttcagctatcaggggcgtcgtgtggcgctcggcctgatctatctcgctcgtggacttgctgaccagcatcccggcggcgtcgcttggctgcgcgccatggcccacgaggcaggtcactatctcgaaaacgaggaattgttgccgggcagtgccaaacaaactctgatcgattccgccgaagaaatgttatccgacatgcaggccagcaaggtcgatctcgcaaatctgctgatctccgatatgggtcttttcgccaatcctgagcatgcgctcaagctaataacgctgcacaattctaagggacgcgaattcgatggcgttgccctgatctgtatgaacaatggtagtatcccgcatttttcgacctcgacgcaggaggcgtatgacgaatctcgacgattgttctatgtcggccttacccgtgccaagcgcatcttactcgtcgcgtccgatcagtcccattggaggaacaagccgacccccttcatcgcggaggctggccttggatga

SEQ ID NO: 72478 - DNA, 2076 bp, Fusobacterium nucleatum subsp. polymorphum F0401; identical to SEQ ID NO: 72066

SEQ ID NO: 72479 - DNA, 1902 bp, Fusobacterium nucleatum subsp. polymorphum F0401; identical to SEQ ID NO: 72067

SEQ ID NO: 72480 - DNA, 2190 bp, Clostridium clostridioforme 2_1_49FAA
atgcacataaagcgatttgatattcagaactttagaaagttgaaatgctgtaagattgaattgagtgataaaactacagtttttgttggtgcaaataatagtggaaaaacttcagcaatggatgctttggcaaaatttttatctgctagaaagtttgtttttaatgatattacactatctaatagaaaaaaattagatgatattgggaaagtatggataaatggtgggaattttgattttgaaggatgtatgcaggagatggaacagataatgccagcgctggatgtatggattgatgttaaggataatgaactgcattatgtatctaatataatacccacattggattggaacggtggtgttttaggggttagatttatttatttgccaaagaatgtagaaaaattatgtgtttcatataaagaagcatttgagacagcagtgaagacttgcgctagttcaaaaaaagtaaaactggctctgtggcctcaaaatctatgtgagtatttaggaaaaggagatttatttaatacgttatttgaggtaaaagcgtatgttctcgatccaagtaagatgaatgatgatgatttgcaacctacagattacttgatggagtgtacaacatcaaatccgttgctgggattgataaaaatagatattataggcgcacaaagagggttttctgatactggagacgagagtgcaggagaagccaattatcatacacagaatctatcgagtcaattaaaaagctattatgataaacatttggatccggaaaatgaaccatcgccagaggatctgaaaacacttcaagcgatggaaaaagcaaaaaaggtctttaatgatactctggctgataaatttcataatgcaatattagaattagaagatttgggctatccgggagttaatgatccaaggataacaattgaatcaaaggtaagtgtatcaaatagtttaaatcatgaagcagctgttcagtatgcacttaattcaaaagaaaaattgagacttccagaaaagtataatggtttggggtatcaaaatttgatttctatggtatttcttttaatgcgttttagagatgattggatgagaacagggaaggcgaacaaagaattactggaagaaaggattgaaccattacacattgttttgttggaagaaccagaagctcatttacatgttcaagtccaacaggtattcattaagaaggcatatgatgttcttactaatagtcagtttttgaaggcacatggtaattttcaaacacagcttgttatcagttcacattcaagccatatagcaagagaggtagattttaaagatttaagatattttaaaaggttgccagccacaaaagactgtattgttccggtaagtaaggttattaatttgtcaggtgtattcggagaagataatgagacaacacggtttattactcgttacttaagaacaactcattgtgatttgttttttgcagatgctgcaattttagtagaaggttctgcagaatatatgttgctaccccattttatacgaaataaatatcaagaattgaatcaaagatatattacgttgctggagataaatggaagacattcgcagcgattaaaaccattgattgagaaaatgtgtttaccgacattaataataactgatattgattcgggggaacccaccggacatcataaacacacgcttccacaaagagataaaggaattataagcacaaattatgcaattactcaatgggtgcttaaagagaagtcattggataaattgttggatatctcagagaagaaaaaagaaaagagttttacaactccatattcattcaaaatgagaattgcatatcaaataccaattgatttgaaatataatggtaaaatatgcgaagcattaccaagcacatttgaagacagtttagtttactctaattttaatttattttccacaacaacaggagaaggtttgatggaagctatttatggtatctgtaatgaaggacttgattttgaaagtttccatgagaaaatttataatttatttcgtggcgagaatgtgccaaaagctggttttgcactagatttaatttattccgtggatcctcaaactttacaggttccaaattacattaacgagggattactttggttacaagatttgttagacaagcataattag

SEQ ID NO: 72481 - DNA, 1860 bp, Clostridium clostridioforme 2_1_49FAA
atggccggcaaagaattggtgtctatggacgacaatcatttagatgatcatgtggacgaggagatacgatcatgtttggactggaaatgcccaaagagtttttttacatatgcaggagctggttccgggaagacatatagtcttgtaaagacattaaattttattcaagagcaatttggaattgaattgaatatttattctaaacagattgcggttattacttatacaaatgctgcttgtaatgaaatattaaatcgtgttgagtatagccccatcttttttgtttctacaattcatagctttttatgggaacttatttgtccatatcagaaagatatccggatttggataaagaataatattcagaaaaagcttgaagagacagaaattgaggaagctaaagggagaaagggtactaaggcatctcaaacaaggttaagtaaaattgaaagttataaaaagagattagagaaaatagattcagtgcgtaaattttcatataatcctaatggagaaaatagtggatatgattcattggaccatgcagatgttattaaaatggggtcagaatttattaaatgtaaagctactatgcaacagatattaataagcaaatttcccattttactaatcgacgaaagtcaagatacgaaaaaagaattggttgatgctttacttgatgtttatgcaaaaaacaaagataaaattattataggaatgtttggtgacacgatgcagaaaatatatctggatggtaaagaaaatttagaggatagcattccggatagttggattaagccggtaaaggtaatgaaccatagaagtgctagaagaatagttcaattagccaattctatcagaagatgtgtggatgataaggagcaacgggaacgaacagatgcaaaaaaaggcatagtacatcttttcatagcagactcgttgggagacaagcagaaagtagaattagaggttgctaaaaggatgtcacagttatcattagatgtggaatggaaaaatgagaatgcgtatcagagtctaattcttgaacattatatggcagcgaggcggctgaattttttaaatttgtttttaccattatataaaaataagagaatagcacaaagtgttttagatggaagcttgccagaggcaaaaatattttcacaaataatatttccgttggttgatgccaatagtgaaggaaataaatttgaagttgcgaaaattattaaacgatattcaccgttgcttagtagagataatttgcaaagagagagcgcaaatcaaagacaatgcctacaaactgctaatgaagcaaaggaatcactatgtaggttgtttgaaggtgaaaaaatgccaacttgcatagatgtatttaaagaaatagaccggactggaatatttaatctttcggaacgaatggaacatatagtgttagattgcgagcaggagcaagattctacagtagaagctttaaaacaagcattatctacatctgtgagtgaaatgaagaactactgtttatatgcagaagggaaatcatcattttcaacacatcaaggtgttaaaggattggagtatcctcgagtcatggttattatggatgatgctgaggcagagggtaacctatttagttatgaaaaattgtttggtgcaaaagaaatgagtgatacggattttgataatgagaaacagggaaaagataatagtatttcacgaactcggagactgttttatgttgcatgtacgcgagcaaaagatagcctggcattggtggcgtatacgaaggataaagaattagtaaaacaaacagtcctttctaataaatggtttgatgaatcagaagtagaatttgtataa

SEQ ID NO: 72482 - DNA, 1971 bp, Clostridium clostridioforme 2_1_49FAA
atgcttttatcaaaaatcacaataaataatttccgattaattgttaatgccgaactggatgttcatcaaaatataaccttaattgttggccgcaacaatacggcaaaaacatcgtgtatgagcattttagagaaggtggttaaaaatagggttttatcatacgatgattatcctttgcagaggcgaaaatatgcatttatactgttggctcaatttatgagaaaaaagataacgtatgaacagctatgcaaaagattaccgttaacatcaatagagttcctcatcgattactctttagatgatgcggaagataatttgggagcactttccccatttattattgatgtagatgttgatacaacaactgcattagttaaagctgaatactcattgaaaatggatgaggaatcgttgcgcaattgtttccatacctgtttttataaagatgggacatttgccttagatcctcaagaaacaaaagaggtatgttctgcaaatttctcaaaaatatttgaattggttatatatgctattaatcccaagaacaaagcagatgtacaaataaaaacacaaaaagaattggcagatctttttccgttctatccaataccagcagaacgtgtattaggggaagccgcagagcaaaattataattctttaggaacgctgattagtagctattttagtgtcgatataaaaaatttagacccccaaatagcagcagatgtgttaaagctacgtgaaactgttgaggaagcaaacaaatccattcaaagggaaagcagtaatctcctcagctcgattgttggaaaggctattggctttggttatccgaatggagaggaattgcagcttggagtcaacactaaactacaaattgataatcagataaaagaccaaacagaattaacctatatggctccacttgccggcgaagctcttccaagctcacataatggccttggctacaaaaatcttataaagatggaatttttacttgctgatttctcagaaaaaattaagcaagatcacacagcatgtattccattattattcgtcgaagagccggaatcacacatgcatccccaaatgcagcacacgttcgcaggatatttacaaacattcttatcaaaaatatcggatgtacatattcaaacctttctgacttcgcattcggcacatattgctaatactatggatttttccaacatccggtatgcacaaaagacaaaaagaggcgttgtttataaggatttaggcgcttttggtgcagaagatcccgaaaatatggattttatcaagaagtatctaacgttgagccgttgcgacctattttttgctgataaggttatttttgtggaaggtgcatcggaacgtttgcttgtcccggacatgatagaaaaatgtgataaatcaggactgtttgcacccataacatataagcttccagctcaatattatgcattaattgaaatcggaggggcatatgcatataaatttataccatttgttcgctttttggggattccctgcttgattattactgatattgatgcaatgaaagatgggagaactaaatctgttgtgagcaaggggaaaactacatcaaattcaacaattaaatggtgggttagacaagtaaaggggttaccaagtgctgacaaaagcaagataaaattagaagatattataaatctaacagctgacgagaaaaccatagataaatgccacatagaatttcaggttgctgaaaatggactatgcggaagatctttagaagaagccatcaaaaacgtgaatagagctttttatgggttagctgatcctgttacagaggaaaaattggaatttacagaaaaaagtaaaacagattttgcgctcagattgatttgtgattaccctgattattctattcccaagtatcttaaagatggtttggtatggctcaataagcaaaaagtccttgtgtaa

SEQ ID NO: 72483 - DNA, 1758 bp, Clostridium clostridioforme 2_1_49FAA
atgtcaaaggaacctcaaaaatcaaactttgagttagcacaagaggaagctaataaaatagacctgcagattatcgatacccttcaaaagggatataattttcgtgttgaagctggggccggatcaggcaaaacctattcacttaataaggttattgagtggatacaagtaaataaatggaagcagtaccacaaaaagaaccagcatgtagtatgtattacttatacaaatgccgcagtggatgttatctccggacgacttgcaaatgattcttttattattccgtcaacaattcactcttttgcatggaatgcaattaagcaataccagagtaccctcatcaaatttataagtgaagatgagacatttcggttaaccgaaggagatttttttgcaattagaaaagtagagtatacattaggacatcgatataatgaaaatggtatcatgtatctttaccatgatgatgtcattcgattgtttgctgctcttttagataatgcaaaatttcgccgcgtttttagcgataaatatccattaattctaatagacgaatatcaagattccttaaaaccaattattgaccgatttttggaatactttatatcacgcaattctggtcctcaatttggattttttggagactcatggcaaaccatttatcaatcaaataaggcatgcggtttaatacagcacgaaaatactgttgaaataaagaagggggcgaatttccgttctgcacctaaaattgtagatctattaaactttattagaccggagcttcctcagcgctctgccattgacaactttgctggagaagtcacagttattacatgtgatgattatataggagagcgaagaacggaccgaaatttcaagggtgatttgccttcgcctgaattaaaagaaagacttaatggtctaatggagcatattaaacacagctgcattcctgccagtgaaaatgtaaagacattaatgattacacatcgagttctcgctgcccaacagggatataataaacttttagatatcttaaaagatggtcttagagataaagaagatccatttttgctattttttatggaacagcttgaaccaatatatcaagccttagaggccaatgatatgcagttactgtttgatacgctgaaactaaagcgttatcctatcaccaaaaaagctgaaaaagttaaatggaaaaaactacaagaagctttgaaaatagcacgcaaaaaaaacagtgtagatgttctccaaacggtatttgaatcaaggttgattccgattccgacaaaaattgaagggtattatgatctatatctaaatgcaccagaaacaatgtattcgggggccgatgtgacaattaaggattttttggacatagaatacgaacagtttttggcagcaattaattattttcacccggaggcagacttttctacggagcatggcgttaaaggcgaggaatacgataatgtgatttttgttataagcaagggatggaatcaatatcagtttgaaacttacgcccctatgattaaaaatgggtatccacaggataaagaggcggcatacataaggaatcgcaatttgttttatgtgtgttgttccaggcctaaaaaacggctgtattttttcgtttctgtccctgttgatcgagtgtttagaaaatttcttacagaaatggttggagaagataatatccttacgtattcagaatttctaaattctcagaatcacagcaaaactgaatag

SEQ ID NO: 72484 - DNA, 1923 bp, Corynebacterium casei UCMA 3821
atgaaattcactattttacggattagtaattttcaatcctttggccccacgccgactatccttaatctcgccgatatgacatatgttctgggaccaaacggcgcagggaagactgcggtcctcgaggcgctgtcgcgcatgtttagcccggttacggcccagcgaacagttcgtatcagtgattttcatgtacctatggaccatagtcggtccgagctccaggatgaggaaccagtcctctggattgaggtagacattgagtttccagaagcagattctgagggttattacgcatccattccgcccaacttccaccacatgatgatcgagagtgctgatagggtgccgaaagttcgtgtgcgattaacagccaagcttgccttagacggagttgtcgaagaaagaatcgagtatatacgtcaggtagatgaatcaggggaaccgacagtttgttccgaaatgtcccgttacgaccggggatacattgaggtgcattatcttccggcacggcgtaaccccagtgaacacattgcttacacggctacatctttaatcggtcgaactctgcgagcagcggactggtcgcaagaacgcacgactctttctgacctttctgaacagctcaccgatgctcttacctctaacagtacggtatcgagtatggggctctctctgacgaaagaatggggcggactccatcggggtgaattcttcacagaaccgacaataactttcgggcggggagaattagagggagtactccgccagctcactatccatttctctccatctcatgatggggcctcattgcccttcgaccttcttagtgatggacagaagtcccttctgtatatctcactcgtacttgcctggcagtcgttagctcggcgggtgttaagaaatgaagaggcatcgctcgatccaactcggctacgacctccagtccatacaattatcgcattggaagagccagagaatagtcttgcacctcagtatcttgggcggatcatccgacagctgcataatgcatgctccgagggtgatctgcaggctctgatcgccactcatgcttcaacattgctgcgtcgagtcaagccggagtcggtctgcttcttgcggctgaactcagagcgagaaacgactgtccatcgcgtcctcttgccggaggatgatgacgaggctgctaagtatgtccgagaagctgtgcaagcataccctgagttatatttctcacggctggtcatccttggtgaaggtgacagcgaacaagtggtgcttccccggattctggcggctgcaggaattgctgaggacgatgcttctgtctcggtagtacccctcgggggacgccatgtgaatcatttttggagactactcaacgagttgaatatcccccatgtcacactcctcgacctggacagcggtcggtaccaagccgggtggggacgcgtccgctatgccctcaatcagatcaacaaggtaaagccgaagacctacccaagggaagagcttaacaatcttcctaaatgggattccacagactccttccctcagtttccgaggggtaaggggcctatatgggatctcgaacaacaaggggtgtttttctctaatccagtagacttggatttgttaatgcttgaggcgtttccagacgcctacgatgttgagcgatcgactccggacaagaaggagattgtagcggtactgggaaaatctcatgtcaacaaagatctccttaacccgaaagtgctgtcgctttttggcgattaccacgaaaactttaatttgaagagtaagcctgccactcacctacgcgcgctctcaatgctcaccgatgaagaactctgcgaaggattgcccgcagtttttaagcgactgattaagcatgtagacgcgaaattgatgggactacccgagtga

SEQ ID NO: 72485 - DNA, 1659 bp, Corynebacterium casei UCMA 3821
gtgattcgccctgaggaatggtgtccgtccgatgggctggcgctggaaccctatgctttaaccgctgtgactagtacagggaaaaatattgtagtggcggcagggccgggcgctggaaaaacggaactactggcgcaacgcgcggatttcctgctccgcactggggcatgcccctacccccgtcgcatcctcgccatctcatttaaggttgatgctgcccgaaacctccgtgagcgagtacgtcgacgtgtgggaagtcaacttgcggctcaatttgatagtttcacattccatgcattcgcgaaacggattgtcgacaattatcgccccgctttgaccggacaaaatgcgctttcccccaattatcgactggatgtgcataaccaaattcagtatgaacagataactttcgatgacctcgtcccactcgccctggaaattctgaaatccaatcgctatgccaaaaacgggatccgacagacctacagtcacgtttttctcgatgaattccaggatgcaacagccccccaatataacctgctaaaagaactcttctgggactcgcgtacctttctgacagcagtgggagacggaaaacaaaagatcatgacgtgggccggtgccttaaatggaatcctccatacattcgcagatgatttttcagcaatcccactgcctctctatcagaacttcaggtcagcgcctcgcctgcgcaggatgcaaaatcgcatgattgcggagatggatcctgccgcggttagccccggccaagaactgactggagacgacggtgtcgttgaaataaggggatttgatactagctccgaggagtctgaaaccctagcggaacgtattcaagactggctcgacgaaggagtggatccgggtgagattgcagtcttggtgcgtcaacaggcggggctttacacggcgccgcttggcgaggagcttgccaagcgtggtatcccttttcgcaacgaacaagaaagtcaggacttgaatgctgaaccagccgcagtgttggtgttcaacttccttcgtgtcatagctggtgatggacaggctgatgcgtatgtcgagcttatgcggttttctaaccgctccaatttgccggaagaagagagcctgcagtttgaccgtcgcctgaaaaacttactccaggaggcacgccagaaggttcgggtttctgaaggcgatcactcagcgccacaattctggtctatatggaccgagaaatttctgtctcttatatcccgcccgacccttgtggccttgtctcctagctaccagcagggccaaaggctcgacgaagtaatccatcaagcgcttgatgctttcgagcaggagctttctaactgtggagatgtagttgtggcgctgaaacgtctgtcaggaaaggaggctgttcgcttcctgaacatccacaaatgcaaaggactggaattcgaaaaagtcatcattttaggggttgagaatgagatgttttggggagataaatcgaattctctagctgagtactttgttgctgtctcacgtgcgaaaaaccatttagttttgacctgggctcgatttcgaccacgccctatagggcatgttaaaaggtgggacgagtttagaactcaacaccagaggttcataaactttggtcgtggtgattag

SEQ ID NO: 72486 - DNA, 2073 bp, Fusobacterium sp. oral taxon 370 str. F0437
atggttttaaaggaaatagtggtagaaaattttcgtttgttaaaaaattttaaattagagcttaaagatgagttatctctaattatagggaaaaataattgtggaaaaacatcagttcttataattttagataaaatgttgaattcatttgatattgcatgggaagatgtaaatttagtaaaacaaaaagaaatatataaagaaataaataaatttaatgaaaacattgaagaaggcaacaagtttcttgaagcaattaaacttcaattgtatattgaatacgatgatactgattcttatgaaaatattcaaaattttataatggatttagatccagaaaataatattattcttttagaatttattttattaatagatataaaaaatattttagagttaaaagatataataaaagaaagagaaataaaagatttttcaactttttcaagatatataagtaaaaattttacaaaatattttaaaataaaaaagtattccagagggtatgataaaaaaaataaaaaaataatctcagatatgatagaggaaatagaaaataaagatatacaaaaagtgatcaaagttgtagggataagagctgacagagcagtttctaatgatgaaagaaaccatgcactatcaagtttaacaagtagatattatgaaatttatagaaaaaatataaaagatgagagtaactcaatatttcaagagcttgaaatagaattagaaaagacagataaggcactatataagatttataatggagaaaaaggaaataatgagaaagattcagaaggaatatttaagagaattatagatgttgtaaaaacttatggtggatccgataataaaattaatatttcaataggatcttcaatatctgaaaaaaatttattaacaaataacactagtttatattataaacatggtgatgaagatagttctacacttccagaaacctataatggattagggtacttaaatttaataggaatattatttgaaattgaaactaaacttcaagaattgtatgaacaacctgctgatataaatattttatatatagaagaaccagaagctcatacacatccacaacttcaatatatatttataagaaatattaaaaatcatattaacaatcatagagataaattgaataaagagaaaaataaatatcttcaaataataattacatcacattcatctcacattgtttctgaatgtaattttgatgatattatttatttaaaaagagtagagaataatattttagccaaaaattttaattctttaaaaactgaatacaaagaagatgaaaaaaggggatttaaatttgtaaagcaatatttgacattaaatagaagtgagttattttttgcagataaagttatttgtatcgaaggagatacagaacgtatattaatgccagcaatgatgaataaagttgataaaatacaaattttaaaaaatgaaataaccattccattgttatcacaaaatatttctataattgaagtgggagcatattctcatgtttttataccattatttaaatttctaggaataaaggttttaatcatcacagatatagattctgccacaaaaaataagggtaaatataaaaaatctcatccaaataaagcaacccatacaagtaatgcctctataagagaattttttaaagaaagtggtttagatgatggagataaccaatttaaagagcttatagaaaagaaagatactgataaaataaaagataagataagaattgcttatcaaatttctgaaattgaaggagattatcaagctagtagttttgaggatgcttttatatcactaaataaagattttattttaaaaaataaagataatctttatgactatggagcattaaaaaaatttaataaaaatgaaataaataaagattgctataatttttctttaaataaaattgaaaagaaatcggcatttgcatctgctttattatattttgatgaagaagaaaatgatatggaatggaaagttcctcgttatataaaggagggattattatggatacaagaattttag

SEQ ID NO: 72487 - DNA, 1944 bp, Fusobacterium sp. oral taxon 370 str. F0437
atggaaagttcctcgttatataaaggagggattattatggatacaagaattttagagaatgaagtaaaggtagctttaaaatgtatcgaaaaaggaataaatttcatattagaaggtggagcaggaagtgggaaaacatattctctaatttcattaatagaaactttaattataaaatcacctaaaattaaaattgtatgtattacgtatacaaataatgcagttgcagaaattaaatcaagaatcgataatgaaaatctttgggtttcaacaattcatgagtttatttggtatataattaaaaaatatcaaaaagaaataaaaaatgagttggtgcttcttattaatgatgaaacaattaaaagctttaaaaagccaaaagataaagatttagaaaataatttaattacaatagattattttaataatatagatgtcgaatatgatgaatattattcaatgaatcctagtaaaaataaagttaaaattagtcatgatcatattttaattttggctgaaaaaatgtttgaaaaatataaaaagatatcagatattttaaaagatatagctaattgtatttttgttgatgagtatcaagatactaatccaaatgtggcaaaaattttattagaacatctaaaaaaaagtaataagaaaaatgttataggattttttggagattcaatgcaatcaatatatgatgaaggagtaggagatttaaatgaatataagttaaaaaaaatagtaaaaaaacaaaatcgtagaaatccaaggagagttatagaaatagctaataaatttagagatgataaaataatacaaattccttctaaggataagaaagctcctaatatggatgagaatggagttattattgaaggtaatatcaaatttatatatggaaaagagccagaggatataaattttcttaaaaataaagcactttttaagtcatgggattttttaaatggtgaacaaactagggaattaagactgacacataaatataatgctgaaatggctggcttcaagaaattatataacttgtataatgatgatttaataattgtattaattgataaaattaaaaaaaatattgataacaatgaaaatgaaaaaaaattattaaatgaattagtattagaattaagaccaacttataatagaaaagatttatttgaagaaattactagtaataaaatatatgaatctatttatcagaatatagaaaatttagcatggaaagatgtactagaaaaatgcaagattaataaagaatcattaatgtcttataaatttaatggaataagtggtaaatatgaagctaattcatacagagataaagttttacaaagattagatattttaaatgaattaatagaactatatgaatctaaaaaatttaatgaatttttaaagaaaacgaaattttctattcaaaataaaaatgataaaagtaaactaaaagaaatgatgaattatttgatacttgaagatagaaaaacaatagaagaagttttagatttctcagaaaaacaaggtttgataaaagaagatacggactttgataactatattagtgttaaaggtttttatttatgggaaagaataaaaaaaatatcttttaaggaatatagaaacagtatcctttatttgaaagagttctcaccaatttcaactcaacatagtataaaaggaaatgaatttgataatgtacttgttgtgttagaatcaaattggaataaatatgattttgaaacattatttggaaaaggctcagaaaatgaaaatgttataaaacgaacaagaaaattattttatgtttgtatgacaagagcaaaaaagaatttagtaatatatatgcctactgatgatttagaaatagtagcttcagctaaagaatattttggagaagaaaatgttctttcgatagatttaatttag

SEQ ID NO: 72488 - DNA, 1791 bp, Methanosaeta harundinacea 6Ac
gtgtgtgccatttcgcaatttagtggcgttaaaatcgaagaagttcgtattcgtaacttccgttccctcaaggaagttgacgtcaagctagattggctgaccgtcattataggagagaacaacgcaggaaagacgagctttcttgatgcactttttgtggcaattggagcaggaaggcacaatatatcatcagatgatatatttttggcacaatctgagacaaaagctcctaaagaacgagaagttattattgatttgcttatccgaccaatcgataaaggtggaaatataattgatatttttcccgaagggtgctattggattgaactatatggagaaggtatatcacaagatgatgatggtaacgaatttgtggctattcgtactcaaatgaggtgggattcaacggaaggggggtatgaagttgagcgaaaattcttggcagattggcaagatcctaataggttaaatctatcaaaagtaaaaggcagtgtttcctcgtatcaaataaaacccttagctctctatctgttggatgctaaacgtgatataaaagaggaatttcagagtcgaaattccttttggtataaattaatatccgatctcggtcttgaaaatggaaaaataactgaaatcgaggcggagcttggcagaatcaacgaaggtattatctctggcagtggcgtcttaggtcaccttcaagaacatttgaatgatttatacaaaacgataggaggtgatagtgaaagcgtctctattacccctattccacgccacctaagagaccttagtaagggtgtagatgtaaattattcaactaagggtgctcagtcgtttcccctttctagacacggtatgggcacgagaagccttgctgcagtgctaaccttcagggcatatatgacttggaagcagcgaaattcaaatgataatattcatccaatgcttgcgctagaagagcctgaatctcaccttcacccccaggcgcaacgagcacttttcagtcaaatagaagaaatacctgggcaacgaattatcagtacacactctccatatatcgcgggtcagacggatgtatctaaattccgccacttcagaaaagttggtgaaaataccatggtaactcagatggacacctcagaactagaggcagatgatatacataagattgaccgaatggttatgaacacaagaggtgaaattctttacgcaaacgctcttttgctattcgagggagagcagactgaagatcaagcactccccatcttcgcggagaaatactgggggcagcatcccaacgcgttgggtatttcaatggttggtgttggtggtaatggaagatatctcccattccttcgccttgcgcgtagtttccaaattccctggtatatcttttcagatggtgaaagtgaaacgattaccaacgttgataaggcactaagcaaagcaggcgagcctatcacttccactcgccgatttacaatccccgatgggaaaaattttgaggaatacatatctgttcaagaatacgaggatgttttaattgatgttatattatgtaccgaatccaaaaatccacatcataaggctgcactaaaagctaaatgggaagaagaaactaatcctcttcaagaaatttgttccactctcgaaaagaataagacattatacgggaagcaaatagctgacgcaataacagggatggaagacgagaaattaagattccctcccttaattagatccttattcgaaaagatgtcagatgaccttggtttggaaaagagaggttga

SEQ ID NO: 72489 - DNA, 1902 bp, Methanosaeta harundinacea 6Ac
gtgaatattcaactttctgaaacacaacgtaaaattgtcgaacatggtgaaggccctttacttgtggtcgctggcccgggctctggaaagacgcgagttctaactgaacgtgttcgaagactgttaaatgaagatacgggtcatttccgtatattggctttgacctttacaaataaagctgcaaatgagatgaaagaacgattatcggagatcccaaatatagagaaacgtgcttttattggcacactccacagtttttgtatggaagttttggccaatagaggaaaaccagtaggaatcgatgagctgcccaatatctttgaatcgtaccaggatcgcaaacaagtactatttcaagcagctatggccaatccatatctacggcataaactaaatattattttggatgcaaacactcaagaccgacttctaaaccgctggcttgatatgatttcttcagcaaaaaataatctatttgttcctgagatgatggataatgaaactgataggcaagtttatgaggcatataacaacggtcttcgtgtgtcatatgctatagattttgacgacctattgttgctcacatatcgcttattccaagagcgtccaaaaatagcagatttctatcggcgccaataccgttacatttgcatagacgagggacaagatctaaacgaagcacagtaccaagttatcagtgctctttgcggtttagaacatcgaaatgtaatgatagtaggagacaaaaaacaggctatttttgtttggaatggagcaaatccaaaatatctcgatcaatttgaacgcgattttggtgcgaaaaagatctttatgaacgataacttccgatcttcacaggttgtcgtcaatgcggcaaaatccttagtttcagagtacgaagttgaagggcaacttccaattgcagggtcaattgagttaatggagggaatagatgagcaacatgaagcacgtcttgtcctcgattatattcaaaatctccttaatgaaggacatcgggatgtagagggtcccataactttagaacgctgtgcattactgggcagaaataggtatgttttatctgcggttgaagacgaattaaataaacgccattggccctactacaaacaactttcagcacaacaagaaagcgaatcgagcctcattcaggattttgaactttgtttgcgtctactggcaaatccccgtgatcgcttacactttagtatgttaattgcgcgttgggatatgcgcgaagatgcctccgatttcggccaacatgtcagtgatggattgcgcctgttgtctgccttaaagagacgaacgtctgataatgatcgattagctgtaattttggcactagaatcgatggactggacggaagaaaatttcaagtttaaaaacgctatggagtatttatatgattattctgagactaaagaaagccaagaagaacgtgctttgataatagaagatataagaacttggcaaaaacattggaattactatcttcgttcgcaacctggcggatatcacacgcttacatcttttttaggacaagttgcactggggacaacgcagcagccacggcaagaaggattagccttgctgacggttcattcagctaagggcctagaattcgatgtggttgtggtgatgggtatggccgaggggacatttcctgattatcgtgctagagatggtccagcgctggaagaggagatgagagacgcttttgtagcagttacacgttcaaagcgcttgcttgcattttcctatcctaggactaaattaatgccttggggcagcgaacggaaacaaaggccctcaagatatttgtcaataattggccttatcaaacctgataatccaagagggccaaacccagggaaaattgtatga

SEQ ID NO: 72490 - DNA, 2061 bp, Marinobacter manganoxydans MnI7-9
atgaaactaaaccgcgtacagataaagaacttccgtcttcttcgggatgttgaactttttcttgaaagcgagacttctgtaatcgtgggaaggaacaacagcggcaaaacatccctatccgaagtcattcggcgattcacatcggacaagaacgcgacattttaccttcaagatttctcaaccgagtgttatgaggagttctgcgcagcgttcaaggcggagagagaaggaaaggaggaatcagaaatacgcacgcttcttccaattatcgaactgcgcttgttcttccgttataaccctgcacagccgcgacttggaccactcggcgaatttatcgtcgatcttgatatggcatgcgatgaagccctcgttgtaatgcgatttgagccgatggatggagcgatcaaccgactgttcgacggacttcctgaagaaatcactgatgcgacacggaaactgttctttcgtgaaatcgctgcgcgcatccacaatctgtacggcattaaagtctgggcggaagaccctaatgatgcgtcgaatcgtaaagaaagttctcaggccgccgtcaggaccttgctaaaaacaggctttatcaacgcacagcgtggccttgacgatatcaccaccaaggaaagcgatgttctcgccaaggtgctggaaggattgttcaataacgcatcactggataccgcggatgagaaggagcgcaaaatagccgaacagcttgaggaagctgttcgcacaattcaagaaactatcgacagcgattttcgcagccaattgcaacaattgttacctactttgcaaacctttggctaccctggattgggtggatccgtgctgacgacagagacgtcactcgatgttcatcgtcttctgacgaaccatacaaagatccgctacgaaggggatagcggcgtccttttgcccgaatcctataacgggcttggtatgcgaaacctgatatttatcttgctacagatagtcagtttttatcgtgaattccgggcgcaggcccacgcccccggagtccacatcgtctttattgaggaaccagaagctcatttgcatccccagatgcaggaagtttttattcgccagattggcgcgatcgtcgaaaagttaaacaaggaacatgaaaaggatccggagtggcctgtccagttcctggtttcgactcactcgtctcatatcgcaaacgaagcgcattttgaatcgatccggtatttcctgccttcaccggccaatgataggtcgaccatctggaataccaaaatcaaggacctgcgccgaggaatgtctagcactaagcccgaagacaagaagttcctccaccagtatcttaccctgacgcgctgcgatctgttctttgcggacaaagcgatactgatcgaaggcaccagcgagcggctcatgttgccaatcatgatcaaaaagcgagacaaagccgacacgtcgggaccgaagcttcgcagtcagtacttaaccatcatggaggttggaggtgcctatgcgcataaattcttcgatcttttaaatttcttggagctgcaaacgctcatcgtaaccgaccttgaccctgtcactgacgtcggaggaaaaaagtgtctcgtgcatgaagcaaacgccaccagcaatgcctgtatcaattcatggtttggcggtgggcccaacgttcccaatgatctgcttgaaaaatccgatgaagaacaaatcagagggcgcattaggatcgcgtaccaatgccgggaagtgaatgatggtccctgcggcagaactttcgaggatgcttttctgctggcaaatggcgcaaaattcggggtaagcggcgacacgcccgaagccctcgccggggacgcccttgcaaaagccgaaacattcaagaagtctgcttttgctctgcaatacgcgatcgacgatacggactggaacattccgaaatatatcaatgacgggcttgcctggctcgccagaggtttcgtagcaccacccaccgtcccagtaccaccggaagccactgttgtctcagaggatattgcggaggaatccgccaatgactga

SEQ ID NO: 72491 - DNA, 1758 bp, Marinobacter manganoxydans MnI7-9
atgactgaaccgactgagttatcacctgccgaggaagccagcgaacgtgcacttactgcggttcgcgaagccatcgagaagtcgaatagtttcaagctggaggcgggtgccggggctggtaagacctattcgctggtcaaagcattgcagttcctcatcaaacgggaaggcgaacgccttccacgcctcaatcagcgtattgcttgcattacttttacaaacgtcgcaaaggaggaaatcaaagcacggaccgatcgcagcccgcttattcactgcgacaccatccatgccttctgctggtctgtaatttccggctttcagtctcagttgcgcgttcacttgcaagagcttgaaggatggtctagcgatccatgggaagaacgtcttaaagaagctggtggcccaggatctcggaggattgaatattcacttggctatcgcggcatcacggacgaggctatctcgattcaccacaacgatgttctacccctgaccatacgattgcttggctatgagaagttcagaaacatctttcgttaccggtatccagtcatcctgatcgacgaataccaagatacaaatgcagattggattgcagcgatacgcgaacatttttttggcaagggcgggccgccgctattcggctttttcggagatcactggcaaaagatttatggagatggctgcggcgagctggtagacaccacgataacggagataggaaagcaagccaatttccggtctgcgtccgccgttgtcgattgtctcaaccgtatgagaccggagctcaagcagttcgtcctcgatccagacgttcgtggtgaggtgcgtatattccatacgaacgagtggccgggcatcaggctcaaggggccacattacggcggcgatttgccggacgatgctgccaacaacacaatctccgaagtaaagagccgcctcaccaaagcaggttgggacctgtcggccgaaaggactaagatcctcatgctcactcaccgggcgctaggtaaacagcagggctatagcagtttagcaagcgtttttcgggacaataattccttcacgaagaaggagcaggcccatatcgcgttctttgtcgatcacttggagcccgcttgtcgagcttttgcagcaaaacggtatggagagatgttcgcggcgctgggggcgagtaaaagctatttactaaaggccgctgacaaaaaggattggtcggactccatgacgcgcctactcgaaatccgacagactggcactgtcgccgatgtagttgcgcatttgcgggaattccgaattccccggcttgccgatgcagtggagaagatagagctgcggctcgaaactttcgatccatcagagggggaagaaatgcctcgttcactgatggaggtacggaaacttcatgatattccatatcaggagattatatccgttaccaactaccttgaggggcattcgccattcgagacgaaacatggtgtaaaaggtgctgagttcgaaaatgttctggtcatagttggtcgaggttggaacaaatacaattttgggaaaatgctcgaaaatgtccccaaacaggacacgctgagcgaaaaggaccgcgcaacttttgaaaataacagaaaccttttttacgttgcatgctctagaccaaaaagacgactcgctcttctgtttacccagcagctttctcccggagccctgaacacggttgagagttggtttgagaaacaaaatatagaaagtgtagttgagtaa

SEQ ID NO: 72492 - DNA, 2310 bp, Enterobacter cloacae subsp. dissolvens SDM
atgtcagcagcagacgccaccacatcattaactgggcagatatcccttcggtttgttgagctttgccagttccgccgacttggtaaggtccagcttgaagttgatccaaagactactattctcgtcggtgcgaataatagtggcaaaacatcaattctggcagcgttgcgccatttcctcgcagatggctcgccatttggtgctttcgatatcagtgtttctcaatggccaaaattgcgggaacttggaagagcttgggacgcattagaagaagatccatctacgtctggcgcatccgaagatgaatgggtagagcaacttggaaccttactttcggcgatgccaacgctagatctatggttcgatgctaaggccggtatgttccactatgtctctccgttcttgtcaaaattcagttggaaggggggcggggtaggtgtccgattgcgtctggaacctgctacgaacattgaggatctgaagcagttggcttggaagtatcacctgacgagaatacctgtgaaggatatgggaaaggattcgcttgcgtggccgattgatcttcttgatttttggctgcgagaaccttcgctactcggccaggttcgggcctataagttggatgcagataacaaccctttggacggaataaagacctatgttagccagatattggatgctaactctagtccaattgatcgtaaacatttgcagaaaatcataaaagtagactttgtggctgcacagcgtggccttggtagtgaggaagccgattcccggtctgcttctggtccccatcgcataggtttattctctaatcagcttctcaaatttgctcgacagcatctaaatgtggcagcaacaggtcatgggcatcgagctgacctcataaaagctgttgctgatgcccagcaggaactagataaaaagattcatgaggctattggaccatccgtagaagaggttaaagagctcgggtatcccggcttgcatgacccccaagagattcgtttccgcacgcgcatacagacagccgaattactcgaccatgggacagctgttcaatacagcatgcagaaggattcattagaggagcttctcccagaatattccattggactcggttatcagaatttacagtcacttagttaccaactagtttccttcaaagctgctcgcctaaatcctgaaaagggcgctccagtacctattcacctggttatgattgaggagcccgaggctcatttgcacgtacaggtacaacgtattttcccaggtaaggcacataagctaatcagccctaacggtagcgctgagtcaggccttaaaagccaattgattatcagtactcattctagccatctagctcatgctgagaattttgaccggctacgatatgttcgccgtgttgccaagagtgaagaacaaaacatgcctaccaccgaggtggtcaatcttgggcaagtttttggtgatgataaaacgacccgtcaattcgctgagcgttattttcgcgttcaacacacagaccttttatttgccaatgctgcaatctttgtcgagggggttgctgagcgaatgttgttacctcttttcattgaaagagatttcgcaacactcaacagtcgctatctgtccttccttgatattggtggcagccatgctcatcggctaaaatctctcgttgaaagactccgtattccaactgtaattattactgatattgatccagttgaagaaagaccaggtaagcctaaaaaaaatggggatccgaccacaaccttagttgctgtagctaatacaggacaacccgggctgcaatgtgggaacccgactcttcgcggatggcaccctaagctgcaacagcttgaagatttcaagaacccgaaagatgagcatattgtctggaacgaaattgccgaatgttctgtacgtttcgcatggcagttgcctgtagccgaagctggtaatcagtggccaagtacttttgaggattctcttatactaagaaatattccttggtttaaggcgttgatgaatgaaaaagtcgatgacgaaggcaagcagatcacaccgccaaaaggcgcactgggctcagtagcaagacaggtcgctgaaaatgataatattccagaactgctcgctgctctgcacaaattaatgcatggatcttttaataaaggagattttgccgcaagcatctttgaaatggttgctgcggatgagccgattgtctgtcctaaatatatcgtggatgcattggaatggctccagacacagcttgagccaagcaaggaggtgatgccatga

SEQ ID NO: 72493 - DNA, 1950 bp, Enterobacter cloacae subsp. dissolvens SDM
atgactaactcactaatccttgacggcaatgatcgcgatgcaggggtagtagaagagatttgcggctaccttacagacattccacctcgtaactacttcctttttgcgggggctggttccggtaaaacacgaacattggtggaagttttacgtcgccttactggtgtgaccgagcatgagaaggggggacaattggcacggtccctgaagatgtatgggcgttctattagagtggtaacgtatacaaagaatgctgtctctgtaatcaacggacgtcttggagacaatagcttagtctgtgtgtctaccatccattcgttttgttgggaattaattaatgggttcaacgatgatattcgcgagtcccttatagcagtaaaagaagctcaactcgctaaagagactgcagaggcacaagcgaaaccgaggggtattactgcagcaaaacagcgtgaccttgacgaaatcacaaatgaaatcgaggttcttcggacaactgaagtattcaaataccatcccgatcgcaatacatatggacctggtgcactaccacacaattacgtactcgatgcgacagcttggttgcttcaaaataagccaacactccaatccattctcaaagatcgacatccaatcatactgattgatgagtcgcaggacacgatgaaaggtgtactggactccttgatggtgcttgccaaaaaaagtgagagagatttgactcttggtctgctgggagatcatcgacaacgaatttatatggatggtcatgccgatcttccaagcattgttccggaaagttgggcaacgcctgagttacaaatgaatcatcgcagtcaacgacggatagtcacactgattaataaaatctgggaaactgaatttgaaggcaggacacaaccaacaaagggctcagcacaacatccccgaacggaaaaagctggtggaacggttcggctcttcttgggggatacatcacgaagtccagaagataaagtgcctagtgaacgctggtgcgctgagcgaatgtttgaaattagtggtttagcagattggaatcaagggcaatatcagttgcttgcgcttgagcataagcttgtcgccactcgtggctcgtttcttgatgtctatgaggcaatggttctgttagatcccaacgctgcagcaccatctggcagtggggacaataaggggccttcaacagtacaaattttgcttaatgagctggcgcatttagaagcctgcgtcagtgatgaaggaatcgttaatgagtttaaggccaccgaggtttttcgacgttatggcggtttagacaatatgcctgaggactcagaagcaagagctgaacgtactgatgaaatgctcgaagcgatagcgatatttgcaatggcttgcgccaatactgagtcaacgatcgctgaagtattagcaccagttttaaatgcaaaattatttgaagtagatcatcgccttcaggaggcttatgctgacaagtcaccagccccgcaagctcctggacgaggtgaggatgagtcaaagcaagcaagaatgcgccgtggatggtgtgcattgtttgctgctccatggaaacaacttaagtgctatcggaattaccttgctgggatttcagagctcgctacacatcaggtagttaaaggctctgaattcaagcacgtcatggttgtaatggatgatgctcttgctggtggaactctcattaagtacgacaaaatttttggtggtacgcagttaagtccaacagataaaaagaatgcagaggctggtaaggagacaacaattgaccggactttacgtttgctgtacgtgacttgtagcagggcgcaagaatcgctcgccttagtgctttggtcgtccgatccagcggcagcaatggctcgaattaaggagagtcaatggtttgctgaagacgaaatacaaataatcacataa

SEQ ID NO: 72494 - DNA, 2070 bp, Peptoclostridium difficile 70-100-2010
atgcaattgacaaaaataattcttagtaactataggtgttttggagaagaacctacaactattgaaattaataatttaactggatttataggtcataatagcagtggtaaaactgctttattaagtgcacttatgaaactttttggagaaaagtctagtgatagaattattgaaagatcagatttccatatacctgaaagtattgatccagatagtatttctaagaatgaattatatattgaagcacaatttgagtttcctgaattggagagaggtaaagacagcatatctataccagtattttttaaaaatatggttgttagtgaaccaggtgggaaaccttatttaagaattagacttgaagcaaattgggagaaaagctcaaatcctgaaggaagtattgattcaaatgtatactatataacatctacaacagaggagataaatcctgaagataagcgtaatatcaaaagatatgagcttgatcaaataaagatgatttatgtacctgccattaggagaccagatgaacagttaaaaaatgtctcaggaacaataatttcaagattattaaatggtataagttggtcagaacaaacaaaggcaagaattaaaacgaaagcaagtgaaacggaggaaattttctttgaagaaaaaggggttgaatcattaaagaaatcactcgaaactcaatggaatagttatcataaggatattagatattctaatccaaagataaacttcaatagtactgatttagagacaattttaaaaaaagttgaagtaactttttcacctacagggacacatcgagattatcgggttgaagagcttggagatgggttacgttctttattttatctttcacttgtaaatacatttttagaaattgaagaagaaattctaaaatctattaatgatggtaaagaagaagatatatttacattaataccgcctgtattaacaattgttgcggttgaagaaccagaaaatcatatttcacctcatcttttaggaagggtagttgaaaaattaaattttatttctacaaaagaaaattcacagacaatattgacatcacattcaccagcaatagtaaaaagaattgaaccaacagacataaggtattttaggatttgtaaggaatatgaatgtacaaaagtgaagtcaattatattaccaaatgaagaaaaggaagcagaacaatttaaatttgtaaaggaatcagtattagcatatcctgaactttattttgcaaaacttgttgtattgggcgaaggtgatagtgaagagatcattattaagcagatgattgaattaaaagcagaatctgtagattcatcagaaatttcaatagtaccattaggtggtaggcatgttaatcatttttggcgtttattaaatgatttagaaattccatttattactttgttagatttagatagagaacgagatggaggtggttggggacgtataaagtatgcaatacaacaattaataaatattggtcatgataagaatgtattactttatacatgtgaaggaatttcacaagataatgaatttaaagagatgcatacttgggatgtaactgatactgaaaatatggctaaatggattgaaatgctaaaaggttatgatgtttatttttcagctccgttagatatagattttgcaatgttacaaagttttaaagataaatatatttcagcattaacaagtgcggaaggtcctaggataaaagatcatggaaaaatacaagatattgtgatcaatgaagatgctgaagatgaatcattgaaagctgcttataaagatagaatagatagtgatattaaatcaaccttaaaacaagaaggtggtgatggatctacttatactgagggagagaaagaactaatgatatggtattcatatttctttttaggaagaggtaaaccaactactcatttatctttattttctaataatactgatatagattttgaaagttttccatactgtctaaaggagtttgtaaatagtattattgaaaagatgatagatgattcagggggtggaagaaaatga

SEQ ID NO: 72495 - DNA, 1866 bp, Peptoclostridium difficile 70-100-2010
atgaagaggaattgggttagtaaagaagattggagtccagcggctggattcagactagaagttgaagcgatgaatacagttattaatgataagaatacacttgttgtagctggtcctggcgctggaaaaacagagttattagctcagagagcctgctttttactagagactaatacctgtagatatcctaaaaaaatccttgctattagttttaaaaaggatgctgctgaaaatttaaaagagcgtttagaattgagatgtgggaaagaattagcttcaagatttgaatcaaagacctatgatgcttttgcaaaagaaatcgtagatagatttagaaatagtttagatgaagcatatagacctttaaataattacaatatagctgaaaatcgtgatgttagaagagcatttgagatagcaggattaaatttcagaggaaatcaaactgaatttaataaagtatatggaaataaactatcgataaataaattgcctttacatacagattttgtagataagatttttatagatgcttggaatgtactacttaaaggcaacaaagatactaattttgtaagttcacttacttttggtatgatatcacgtttagccgaatatttgataagaaccaataggtatattaagaaagcaattgaaatgacttatagtcatgtgtttttagatgagtttcaagatactaaatctattcaatatgatcttgttaaagcttgtttttttaaaacagaaacaataattactgctgtaggggatggcaaacaacgaattatgttatgggctggtgctagaaagtcaatatttgaagattttcaaaatgattttttaagtcaaaaaagaacattaattatgaatcatcgttcagcgccaagacttgtagagattcaaaaagcaatgtataacagtttgaatgaagaggcaattgatttaaaaactaatgaaaagtggaattatgaagatggagaagtgtatttaagactttttgaggattatataaaagaagctgatatacttagtgaggaaatagtcgaattggtggaaacaggtatagaaattaatgaaatatgtatattagtaaaacagagcgtagatatttattcaaaagagattataaataaactttctgaacgtaatattaaggcgcgtaatgaagcaatgtatcaggagatattaaaagaagatataataaagacactggtttcgctttttaggttgtcgttaagtgatagaaatcccgatgattgggattatatttacgatattctaggtgaattatatggaatagacgaagggtataaccctaaaatattaaatgatttcattaccaaagtagaattaatgattaatgatctcaaggtaaatttaaatattactgatgaaaaacaattttcagatttagttgattctaaggttgaatatatttcatatgaaaaatttgcatcaaagtttcaaaaatataaatctaaagattattttgatgatttggtagataaatttaaaaagctggtatggattgaatataatgaaactaaagattggattaaagcgattgataactttgaaggtaaaaattcaattccaataatgacaattcataaaagtaaaggacttgaatatgatactatcttttttgttgggttagaagattcagcattttggaattttaaaaatcaaccagatgaagatagatgtgcattttttgttgcattatcaagagctaaaagaagaattgattttacatttagcttagatagaccagcaggattttcgaattcacagaagcattattgtattaatgaattctacgaattgtttgataatactgagattgtaaaaaagatagagtattga

SEQ ID NO: 72496 - DNA, 1803 bp, Halomonas boliviensis LC1
atgtatttgtcacgaataaaaattgaaaacttcaggaatttctcgaatctagatgtcgcgcttgacggcaacattgttgtggtcggtgaaaaccgagtcggcaaaagcaaccttctctacgcgatccgcctgatattcgatccctcactccctgacagcgcccgccaactcggtctggacgacttctgggacgggttaggagagccggacgaagatgacaagatcgttgtggctgtcgaaatcaaggacttcgacgacgacttagatatcctggcggaaatgacggatttccgtcttgatgacgacccggagacggtacgcctcacttacgagttccggcccagaggcgatctggaaggctcgccagcgtcagaggatgaatatgagttcgtctgctacgggggagagagcgacacgaagacgttcgggcacgcgcagcgacgccggattacgatggaggtgcttcccgcgctcagagacgcggagggcgatcttgcaacctggcgccggtcgccgttgcggccgctaatcgaaagcgcgttccgcggcgtcgagcgcaacgagcttgaggagataaaggacgcggttcaagcagcgacagcccgacttggcgattttgaggctgtgaaggagctggaggagaagctcggcacgcgcttcgccgagatgagcggcccaaaacaggacatcaaaccccggctagggtttggcgctacagaggccacgcggctctaccgcaacataagattactgattgatgacggtcagagagcgatcaacgatgccagccttggttctgcaaatattgttttcctcaccctaaagagcctcgaactgcaacgccagatgaatgagaacttgcgggatcacacactcctggcgatcgaggagccggaagctcatttgcacccgcatttgcaacggtctgtctaccggaatctcttcgaggatattggtggcgatgacgagagtacccctctctcgatcctgctgactacgcactcgccgcatattgccagcgttgcgccgctacgctctctagtgctgcttaaagagacagccgacgacggggctgtcggacattccacggcaagcatctccctttctgaagccgatgaagaggatcttgcccgctaccttgatgtcacaagagcggagatgatgttcgcccgcggcatcatcctggtcgaaggcgacgccgagaagttcctgctgccagtgcttgctgaaacaattggccatccgcttgatcacgccggcattacggtttgctctgtcgccggcacgaactttaagccctacgcgaagtttctgaccgcacttgatatccccttctcgattgtcactgactgggatcccgttgaaggtaaaaatcctcttggcatgaaccgtgctttgaaactcatcgcggctatggagcatgagagggcgggcgatgagcccgtcgaggtggtgaatgagctcaaagaactcgctaagaacgaggatgatttcagcgacagatgcgagaactttggcgtcttcacaaacacgcatacccttgaagttgatcttttcatagatgaggactttacagccgaaattattgcggtattgagggaacagaaatggagtcaggaacgacgaaactggatcgacggctgggaagttgaccgagatactctggatgtcgagaactatctcaagctgatcgaatccgttggcaagggtcgctttgcgcagcgccttgcctcccgcatagagggcatcgaaccgcccgcctatataaagcgcgccattgagttcgtagcagaccgtgtctga

SEQ ID NO: 72497 - DNA, 1788 bp, Halomonas boliviensis LC1
gtgtctgagcgagcgctttatttacaggcagcagaatcactgcgccgtaatcctggccagtgggcggcctacgattcccatggccattgcgttgtccttgcaggaccgggcagcggcaagacaaagacgctgacggtaaagctcgcacgcctcctagctgaggatgtccaggaaccgcgcggcgtcgcgtgcatcacctacaacaatgagtgcgcgagggaacttgaaagccggttggcggccctcggtatcgaacctggaggccgtgtcttcatcggcacagttcattcgttctcgctgactcagatcgtattgccatacgcaaaggtggcggggctcggccttcctgacgagttcagcgtcgcgacgcaaagtgagcgggcccgcgcgcttgaacgcgcctacagaagcgtcatcgacggccctgataacccgcagacgtgggacttcagaatgggtaattaccgccgagcgatcctgaaccgaaatagtccccagtggcgtgagcgcgaccctgtattggcggcccttgttgaggcctttgaggacgagttgcgggccatggggcgcatcgattttgacgacatgcccctgctggccttacgggcgctgcgcgccaatgagtggcttcaacgcgcgcttcttgcgaagtatccggttttggtcgtcgacgagtatcaagacttgggccgtgcgttgcaccgcatggttttggggctctgctttagtgccgggatgcgcctgttcgccgttggtgacccggatcagtcgatctacgggttcaatggggcacgcccggatctgcttcagcaactttcacgacgcgacgatgttgagactgtccacctacgtttgaactatcgttgcgggtcccggatcgtgaccggctcgcgttacgctctcggcgaggatcgcgactatgaagctgctgaaggggcgaatgaaggaacgatacacttccatccccgaacagggaaccgcgaccaacaggcagacgacctcttttcgtcgctgcttcccgatattagggagcgcctgcccgatttgcggctctcggatatcgcaattctttacccgtcggcacctataggcgatgcggtggcgagcgccgcgcagaactacggtctgcagacgataagaactgataagaattctctttaccctcgctctagtcgcctgatgcgctggctggaacaatgtgccgagtggtgttgcggaggttggcgtaccggcacgccgcggttcaggaccctgatgaatgatgggcagcgcattttttcagaatccttgactgcggaaggtgatgtccttttatttcagcggcggctgctaaagacgctatgggaacgacgggacagtaccgttctactccattggtggcttaacgaaatgcgacgggaagcgatcgcggaactgatcgaggggtgccgcacgttgcaggacgagggtgagaccctcggtgcttttatcgaccgtgccgctcccgatggcgattgcgcagaaatgaccttggggcagtttgcaggaaggagcgagggcaagaactgtattagcctttcaacgctccatagtgcgaagggccgtgaattcgtggttgttatcatgttcggtatgaacgatggaaccatcccatggcataaccaaagtaaccagcgtctcgtcgagtggcggcgactattctatgtgggctttacgcgcgccaaacaggaactacatatgatgtacgcggcgaatatgccatcgccatttgtcaaggaagtcgaagagcgactgaacgctgatggatag

SEQ ID NO: 72498 - DNA, 2253 bp, Pseudovibrio sp. FO-BEG1
atgaaaatccaaagtgttgaagtctataacttccgaaaacttcacaaggccaaacttgatttttctagcagccaaacactgctcgttggggcaaataacagcggtaaaacgtctgctatggtcgcattgcggtgctttctcaaagaccggggtgggataactgccaaagatgttactgcatccaactggaaacggttagaagctattgcctgcagctggatggaggaaggagtcgaacctgagcttcaccctttaattgctgagctaccatacatggacgtatggctgcatgtctccgacaacgagtttcaccacgttgcccatctcatcccaactctcgagtggaaggcgggccttctgggtgttcgtatccgacttgaaccgaagacctttgccgatgtgtttaatgagtatcgggaagctcgaaaaaaatccttggatcgactggtagagtacgcaaagacacacgccgacaaagtaggtgatttttcactttggccaaagtcattgcaagacttcctagatcgacggatgtcaagcttgttcacacttaatgcttatctgctcgacccagataaaccggccgttgtacaagatggagaaaccactgtgctccagcctcaagtgctaccggaaacggcgcaaggactagggcctaatccattttctggtctatttcaaattagagaaatcaaagcgcagcgtggctttgcagatgcttcggatgccaagccttcgagagatgatgacacggaagataggtctcctacatctaagcgcaaactgtcggatcaactgcaagcgtattatcgccagcacctagatcctgacaaggaccccacgcaggaagacgtttctgcactaggtgctttccatacagcgcagaaaaccttcgacgagcgtcttcaacaagggttctccgctgcgattggagagcttgaaacgcttggttatccaggcatcgctaacccgaaaatgttgatctcgacacgcatcaaaccgactgatggcctaaatcatccgtctgcggttcagtatgacatttccggtgactcaacaccattgcgccttccagaggactacaatgggttgggttttcaaaacctcatctccatggtgttccttctcatgcgattcagagatgactggatgctcgttggtaaacatgcgaggtccagtaccggtttagagcgagaactgattgctccgctccagttggttttgatcgaagaacctgaagcccatcttcatgcgcaagtccaacaagtctttatgcgccgggcgatgagcgtgctgcgcaaccatgagttattgaaagatgatgcctcaccattttcgacacagcttgtggtgagcacccactccagtcatatcgcgcatgaggtcgagttcgcagacctacgatatttcaaacgtaagccggctaagcccgactgcgtcgccacctcagatgttgccaacctgtccggcctgtttggtaccgatgacgaaacaacgaggtttgcgaaacggtatcttcgcacaacccactgtgatctgttctttgcggacggggcaatcatgatcgagggtgcagcagaacgtatcttactgcctcattttatttcgcaggcacataagggtttggctgaaaggtatatctctttactcgaaattggtggaagccatgcgcatcggttgaagccattggtcgagcttctcgagattcctacgttgattatttccgatcttgatgccgttgacccgaaaaacaaccgcaaaagcgtactcccttccaacggtgcagcgtatgagacggccaatagtgtgctgaaaagttggttacctaaactcactatcgtggacgatctgttggcagccgatgatgttcccgagttatgcgtgggcggttttggatacactggcgttgtctatcaacgcgaccagtctgtgcaatgcgaagacgacactaacactgtaaatctcattccaagtacatttgaagatgcacttgttctggcgaatttagacatcgtaaaaaagatgtccggtgtcagcatgagcaatgcctttgctaagatcgctagttcgtccaaaacagctgaagggctggttgaaggcctttaccaaagactgtcgcaatcaccacagaaggccgcgtttgcccttgatctcctgagtgttgaaaatatcgatgatctagtcgcgcccccttacattgctaagggtttaagctggctcgagaagcgtctcaacgccggagatgcaacatga

SEQ ID NO: 72499 - DNA, 2007 bp, Pseudovibrio sp. FO-BEG1
atgagtgaagaacacatcgagatcgtagatgataataatcgcgacaatccagcggatgaagcaatcagagatgctctgtgtctcgataaaccccagagcttcttccttttcgctggagcgggatccggtaaaacacgatcacttaaatccgtattggaaaccctagctgacatcatcggcagtgacttacgtcgcagaggtcggaaaatcgcagttatcacctacacgaatgtcgcctgcgatgaaattctgaggcgtgtcaacagtgaccctatattcgatgtgaagaccatccacagcttcgcatggtccctcgttgagggccgtaatcatgatatccgcaaatggctgctcgaagaaaaactaccagctgatcttgcgaaaatcgaagagaagcatgcgaagggccgcgcaggtaaagaacatgacaaacgtaaaaagcaaatcgcgtcaaaaaagaaacgtattgaagagctccccaatattcatcacttcacctacaatcctaatggggacaatgttggccgtgcctcactcagtcatgatgaagtgatagccatggcatctagcttcctgatgtcaaaagagacctttcaaaaaattgtccttagcaaatatccgtttatccttatcgatgagagccaggatacactgaagccattcatgttggcactgctagagtttgaaaaggctcaccaaagcaagttggcactagggctctttggcgataccatgcaacgtatctatgggcatggtctgcctgatctcgttgatcgtatcccagagcgctgggataaaccagcgaaggtaatgaaccaccgaagtcgagcccggatcattgacttagcaaacagcattcgagcagatgcggataagcgcagtcagcgaccacgatcagatcgcgctggtggatttgttcacgttttcattgcccctaatgaaggcaccgaccgtgagcagtttgaggctgatgctcgtttagtaatggcagaaatcacttctgatgagaaatggcgtgtgccatctgcagttaagacgttgacaattgaacgtcacatggctgcagcgagattgggattctctggtcttttcgagcctctcgataaagtagacagctttcaaacaagctttagagatggaactctagcttcaatgagattgttctcagaacgtattctgccagtgattgaacataataactcgggggacgcctttggcttgatggcaatcttgcggaagcactctccgttgctctcgaagtcatcgctttcgataacacagaagggccagttatctggattgggaaaagccagatttgccgtaaaagatctaaccgcactctttgttgacgatgcagatccaagctgcggcgatgtacttaagtccgtggcagcctcaggactatttgagatacctgaggtcctcaaatctctaagtagccttgattttagtcccaatgcggagttcgagccgacgaatgacgaccgcgtggatgcttgggcagtcgcgcttcgcgctcggttttctgaggtttccaagtatcgtgactatgttctagatcttagcccttacggcacgcatcaaggtgtaaaaggactagagtttccgcgcgtgatggtgattgcagatgatggcttgacccgattcaaaggccttgcgtcttatgaaaagcttttgggagctagggccaagtccgatcgggatctaaaaaatgagcgtgaaggtaaagagacaaccttcgatcgcacgcgccgcctattatatgtaacatgcacaagagctgaggaaagtttggcaattgtcgtttacagtgacgatccaagttccgttgccgatacaatgatgtcaaaagggtgggtaacatctgatgaaatcagtaaaggagacaatctaaggaaggaacgggcaacggcttttggcagggttttagaagctaatgaaaaacgtagattagagatccatattgaacagacagaaatgaggacgcaaaaggagcgacctatttga

SEQ ID NO: 72500 - DNA, 480 bp, Staphylococcus argenteus
atgtatatgtatatttctcaattagaaataacaaatttcagaaattttaaaaatacaatatttaaatttaaacaaggagtaaacacgttaataggcgagaatagttcaggtaaatctaatgttttatatgcattacgactacttttagatgaaaatttaccttttaatgccacaaaacttttagaaacagacttcaatcaaaatattgatgattggaaagggcattggataattctaaaacttacattcaaggatttagattcgagtgaagctgctagttttgttgctcatcattcaaaaaacattaaaaaccatgaagaatcgattggtacatatgctttatatttcagaccaaataaaatgattaggaaaggtttgtttgattttacaaaacaaattaaaaatcttcaaaaaaataatggagacatttcagaagtgaaaatggcatacccaagaatgatgattttctcactagaatag

SEQ ID NO: 72501 - DNA, 1320 bp, Staphylococcus argenteus
gtggcaaaatcataccatcaacacttattagaaaataatttgattgattttgatcttattttgtacttttcatattatttaatcactaattactctcaaataacaaaaaatcttgctagatttttaaaatattttttcattgacgaatttcaagatacacaagacttacagtatgcaattgttggagaaattattaaagcttcatcaggtaattgtaagatatttttagttggtgatccagatcaagcaatattcagttctttaggtggagtagtgaaaactccatcacagattagtgaatatattggtgggtactttgtcaaggaattgggactaagtaagaactataggtctacacaacgattaataaatctatttagtgaatttcaaagtacaggttttgtaatagaaccaggagcggatcatcgagatgaagaggggattattttatttgataaaggcatacctaaagaagatttagtgaataggattactgaaataattaaagaagaaattgcaaaaggtgttcgtccaaatgatatctgtattttggcacctcaatggagttttttaacatctatagctagaaaattaagagcaaatttacctggtttagactttgattcacctggtctaaccttattaccaagaaataatgataatttttggtttaagttagcaagacttattttaatttctaaggatgtgagtaggtatttagtaagagtgaaatgggcgaaagagttattagaagaattaactgcaataacttccatacataaagaaattgataatgatggttgtagaaaattacttaaaaaaattaattctattaatgttaataatgaagatgctattaaatatctggaggagtcttttaattatttttttgaaatactagactttgattatagttcgagtgatttattacaagaacagtggaatagtttctttaatggtataaaaagacgttatgaaaatcctgattttaacaatattcctaaagatataaactatatgaaaaagatgtttaattcaaaagatgggatagtcgttaatacttgccaaggtgtcaaaggagaggaatttcatacagtaatagcttttggattattaagagggcgcttaccccattggaaccaaataataggacaacctaaaagcaatgaaataagtgagtctaaaaaattattatatgttttatgttctagagctaaaaaaaatttatatttatttgctgaaactggaagaaagacaactaaaggtggaaattataaagtgaataatgaactgaatgaagtagattttaaaaaattataa

SEQ ID NO: 72502 - DNA, 2064 bp, Staphylococcus aureus subsp. aureus M013
atgtacatttctagtgttaaaattaagaattttagaaattttgataatatcgatattgatttccatgagggagttaatgtattaatcggacataataattcggggaaatcaaatttattacgtgctttatctttaatttttgacggttcagttagaaagcaactgtcagtggaagattttaataactctttaacaaaagaatctttaaaaaaagaggctccaaaaatagtaatttcagtacatataacacaatctgaaaacgaaagactgatgtctgatgagttaattacggtaagtaattggctgactaaattagaagaaccttatgaagctagaatacaatatgaattctttttaccaaaagatgaggaaaaaaattacatagatttagtaaaaaatatagatgaaaaagaagaaatatggaatttaattagaagccagtttattaggttgtatgtcaataaaatctgggtgggtaatccagaacatcagattcctatagataatgatagtttaaataaatttgatttccaatttttagacgcaataagagatgtagagagagatatgtttagtggtaaaaatacattattaaaaagtgtaatagatttttttatagattacgatataaaatccgatgaaacaatcacagaagaagaacagaaagaaaaattagaagaaagaagaaaagaattttctgataattctagtgatttgattgaaactattcataaaagattagatagtgggaatcaaaaaattttgtcttatacaaatggcataggagcatcttatgataaatcaacaccggattttaaaggtaatcttacagaaagtgaaatttatactgtattgcaattgataattaaacatgaaactggaatgactttacctataactcataacgggttgggttacaataatttaattttcatggccttgctattgtctaaaatgcaagctgattctgatggaaattttctaggtagtaatgcaaaagtatttccgatactagctattgaagaaccagaggctcatctacatcctactatgcaaaatgaatttattaaatttttaaaaaataacattagagaaaaaaaggtaaagcagattttcataactactcattcaacacatatttcttcttctacaaatattgatgatattatttgtctttacacagatgatagtaaaactaatgttagttatcctggaaaagtttttgataagaataatcaaagtaagaagtacgtacaacggtttttagatgccactaagtcaaatatgctatttgcagaaaaggtaatatttgtggaaggtatagcagaacaattactattacatatatttgcagactatttaaataaaccgttagaaaagaatcatgttgcagtaataaatgtaggcgggagatattttaatcattttttatctttgtttgatagtaataataaatatgcaattaatcgtaaggtttcttgtataacagatttagatccaatgcgaaaagaaaaaaatgaaaatggacaaaaaaataattttaaagcatgctatccttttgaatatgaaatggatttagataaatttgattattcaactaataattctctagataaatatctaaataatgagcacagtaatatacgagtatttgttcaacctaataaatatggaaaaacatttgagtaccaacttatgtttgacaatccttcattaaaactgttacttacagactcgatttctaatagtcaagagctagcagaattaatggatcactatgaagaaaatgaatctttacaaaaattaattgatacattatcaccatctaatgaaaatcagagaataataaaatctttaaaagacacaaatgacagttggaatgaagataataaaaagaaagcattaatagcatcaagatacctaaattccataggaaaaggagaaaatgctctagagctagcttcagtattaaaagataatttagagttaaaaggccagagtgactatgaagattttgtagtaccaaaatatatagaaggtgcaattcgatgggtgtgtgaataa

SEQ ID NO: 72503 - DNA, 1749 bp, Staphylococcus aureus subsp. aureus M013
atgattattaatgctcaaacgaaattaaatatagaacaagattttaaaatacaggctggtcctggtgctggaaaaacagaatttttggtgaatcatatcaaaaatgtaatacaaacttctgaaaagctcgaacgtatgaagaaaatagcgtgtattacttatacgaatacggctgctcagacagttttacaaagattaggaaaaagtgtttcaaatagagtagatatatctacaatacatagctttttgtatagaaacgtagttaaaccatattgttcttttctacccaaagaatacggaatttgtgtgcaaaaattaaaaggacatagtgatccaattgtgattaacaaatatgtaaatgcatggttaaaaactgaatattttacgaaattaaaaccgcctagtaatagaaatcaactactaaaaatgccagtactaaagaaagctttgcaaaactggctactatctatgaaactttcttacgaaaataatgatgtgcaatttatttgtgataataccaaagctcaagcaattgataaaaaaagtaaaaaaagaatgggaataaataaatcaaacttaaatatactagaaaagcaattattaaattataaaaaaatatattgggagaaaggaattatcgatcatgatgatgttttgtttttttcatatgtattaattagagattacccattcattctcactattttatgtgctaaatatccctacttttttatagatgaatttcaagatactagtcaattacaagattttattatagataaaataagacagaaaggctgcatagtgggggttattggcgataaggcacaggcaatttacagctttcaaggtgcacgggtttccttatttgagaagtttaaagttgatttaataaattctcacactatcttagaaaatcatagaagttcatatcaaatagttacttttttaaatagtatcagagaagatattactcaaacagtatatagtggtattgaaaatgataaagttacaattttgattggaaatcggattcgcagttatactaaggtagttaatatttgtaacaaggagtcacttgttaccttgtcaagagataatattacttctaatgcaatgagaataaagttggaaggaaataattttgataaaaagttattggaaaaatttcaagaaattgatagtaatagtaaaagaaggaatactattatttcgcttataaaagctattgaattagctaagaatactaaatataaagatgccttaaaaatagtcgaatcgatttataaagatgaaaataatcctaaaaaaatagctcttaattctctaataaatatgattaataaatatgataaatacggtaatggtacattaatgaatttctacaatactttatgtaaaactttagatattaaactttcagggtttagaaaggggcaagtaaaagatttttacgaaaacactttatataaaaatatggtgatatgtacaaatatcgttgaagacacaagtaatcatattactatccacaaagcgaaaggcgcagaattcgaaaatgtatttgttataggtaataaagacactttaagtctacttttgaaaccagatttaatgaacgatgaagagcatcgtatattctatgtagctatgagtcgagcaaagaagaaactttttttacaatttgattatcttgataataatgaacaaaagaaaattaaggaacgttatgatgtaagtattatacaataa

SEQ ID NO: 72504 - DNA, 1944 bp, Actinoplanes sp. SE50/110
atgaagatcgttgcgttgaggctgagcaattttcagtcgttcggccccgagccgacaacgatcgatcttgatgacttgacctacattctcggcccgaatggctccggcaagactgccgctttggaggcgctttcccggttgttcagtccactggccgcgcagcgtcaaattcagccggaggactttcacgtgccggtcgatcggtccgccagtgaggtgcaggatgcccaaccgaccctctggctagaggtcgatgtgttgtgccctgaagcgggggccggcgggacacacgcgtcggtaccgccgttcttcgcgcacatgaggatcgatacggcggacgggatcccgcagattcgagttcggctgacggcacaactggccgcagacggagtcatcgacgagaagatcgagtacgtcctgcaggctgacgcggcaggggtgccgaccagctgcacccagatgagccgtttcgaccgcgcgcagatcgaggtgtactaccttccagcccgccgtgacccggtagatcacatcgcctatacagcggcctcgctgattggacgtagcctgcgagcagcggactggacgagcgagcgggaggtgcttggcgatctatctgcacagatcaccgacacactggtcgccaacgccgcggtggcaggtatcggcgtgcacctgaccaagcagtggcagaacctgcacagcggcggctacttccgagatccctcgattgccttcgggcgtggcgatcttgagggggtgttgcgtcaacttacggtgacgttttccccatcgcacggcggggcatccctgccattcgaccggctcagtgacggacagaagtcgttgctctacatctcgctcgtcctctcctggcaatcgttggtccggcgggttctgcgcggtgaggaaacttccctggatccagatcggctgcgccctcctgtgcacgtcgtgatcgagatcgaggagccggagaacagcctcgcaccgcagtatcttggccgtatcatccgtcaggtgcgcggcgcatgctcggccggcgacgtccaggcgctgatcgccacgcacgcgccggctctgctaagacgggttgacccggacacgattcgcttcttgcggctcgacgccgcccggcggacgactgtcgagcgcatcgttgttccggcggacgacgtattggccgcgaagtacgtccgcgaggcggtccaggcgtacccggagctgtacttttcccgccttgtcgtgctgggcgaaggcgacagtgagcaagtggtactgccccgagtcctcgccgcagccggcatcgccgaagacgacgcctccgtgtcggtggttccgctgggcggtcggcacgtcaaccacttctggcggctgctcaaccaactccacatcccgcacgtcaccctgcttgacctggacagcggccgttatcacggcggctggggcagggtacgcaacgccatgcggcagctcaatgcagtccaacccgatacgttcgcggaagcccagatcgaccagttgccgaagtgggatgacgactgcgattttccgcagcccggatgcggccccgacatcggcggtgggctcggcccgatcgatgtgctggagcagcatggcgtcttcttctcccagccagtcgaccttgacctcatgatgctggcggcctatccgaccgcctatgccgtcgaccctcccgcaaaaccggacccgcagaccgtcgtggccgtgcttggaaagagccacaaaaacgagatccgccttcgcagcgaggtccttgacctcttcgacgagtatcaccggaagtttgacctcggcagcaagcctgcgacacatctgagcgccctggctagcctcgacgaccaacacttgctcaaagaatcacccatggtgcttaccaggatggtcgagcatgtgcgcgcggtcctgggcggcctgccggaatga

SEQ ID NO: 72505 - DNA, 1662 bp, Actinoplanes sp. SE50/110
atgatccgccccgagcactggcggcccgcagacggcctgacgctggaaccgaatgcgctgaaagcggcgacagcggccgacctcaacgcggtggtcgccgccgggcccggcgcagggaagacggagttgcttgcccagcgcgcagacttcctgctgcgtaccggtcagtgtccgtacccgcgccgcattctggcagtctcgttcaaggtcgatgccgctcgtaatctggccgaacgggtccgccgccgctgcgggccgacgctcgcggaccggttcgacagtttcaccttccacgccttcgccaagcgcctcgttgacaacttccggccaacgctgaccggtgccaatgcccttgattcggattaccgcatcgatcggcaggaccggattgccagcaaacagatcacgttcgaagacttggttccgcttgggctggagatcgtccaggccaacatctatgcccggcggggcctggaccagacctacagtcacgtctttctcgacgagttccaagactgcacagcggaccagtacgagctgatcaaagcggtcttcgggccgtcgaccgccatcgtgaccgctgtcggcgacaccaagcagcggatcatgctttgggccggtgctctcgacggagtgctggagaccttcgccgacgacttctccgccgtgcgtctgccgctgtatcagaacttccgctccgcgccacgactgcggcgcatgcagaaccggatgatcgcccagatggaccccagtgccgtcagccctgcggaggatctggtcggtgatgatggcgtcatcgacgtcctcggcttctctgacgagtaccaggagtcgcgaacagtcggcgatcttctttccggatggctcggtcaaggcgtgcctccggccgagatcgctgtgctcgtacgcaaccagccgcacctggtcgcttcggtgcttggggacgaactgcgtgcacgcggcatcgccttccgcaacgagcaggagagtcaggatctcaccgcagagccgatcgcggccctcgtactcaatttccttcgagtagtcgctgacgatcggcaaccccacgcctacgccgacctgatgaggatcgtggcccgcacgaacgcctccgacgacgaggtcgcacgcttcgacagccaggtcaaacgaatcatcaccacggctcggatcgccgtacgggcttcaacattcacccccgacgactccgcaggatggcggaacctcgtcattggattcctgcgtctggtgtcccggccggtgttgaccgcattgtcggccagctaccagcagggcaaccgccttgacgaccttatcgtgcagacgatggctgctttcgaacgggaactcgccgtagacggcaacgccgtactagccctgcggcggctttctgaagccgacgccgtgagagtcctaactatccacaagtgcaagggcttagaattcgagaaagtcgtagtgctcggcgtggagactcagctcttctggagtaaagatttgacgacgatcatgtcggagttcttcgtcgcgatctcccgcgcgaaactgcacctcgtcctgactcacgtcgagcaccgcggccggccgagcgccgccacgagacgatgggatgagcggcgctcatcccatcagacattgctcggcttcgcagctgaggattaa

SEQ ID NO: 72506 - DNA, 1665 bp, Azospirillum brasilense Sp245
gtgctgaaatcgctcatcaaggtcgatttcctgaatgcgcaacggcatctcgcggacccatcaacggtgtccggtgatcgttcggaggatttgtcgaagcgtctaagccgcttctaccagcgccatctcgatcagcgtcaggacgaccatcaggcgctaaaggcgctgtttgagtccgaggtgggcctcgacaaacatcttgcggaggttttcaaggacacgttgaaacgattaaagcacttgggttacccaggcctcaataacccaacgctcgaaatcaagtcagcactgaaccccgcgtccatcatggcgcaggacgcgcgcgtccactacatcgtgggggagggcgcgcagaaggtggttctgcccgacacctacaacgggctgggcttcaagaacttaatttatatggtaatcgaggtactcgaccttcaagagcgctggaaggccgaagaggaggcgcgcgctcccctccatatcattttcattgaggagcccgaggcgcaccttcacgcgcaactccagcaggtgttcattcgcaatattctggacttgctggtcattccggatgaggcggggggatcattctccagccaggcggttattacgacgcactcgccacacatcctatacgagcgcggatttcagccaattcgctacttccggcgcgatttgattggaagcgatcaagtcaccgaagtgctcaacctctccgcattctatgcgcaggaaacagagcatcgcgattttctgcaacggtacctaaagctcacccactgcgatttgttttttgcggatgcagccgtgctcgtggagggcaacgtagagcgattgctgctcccgattatgatatcgaaagcggcgacctcgctaaggtcctcctgcatctgcattctggaggttggcggtgccttcggtcacatattcaaatcgctgattgaattcctaaggatcgtcacgctaattatcaccgacgtcgacagcgttaccctcttgcctgccgatcatgacggcgatgacgatgacaatgacgagattgaggtcgaagtcgagaccttggaagtggaagctgttgatgactacgagttgttattggtcggtgatgctccgcccgcgccggctggcgaagccgccgcccctgcacccgcccgtcgctacggtaagaaatgccttcctgtagccggagcggtcacttccaaccagactctcgtgaaatggcttccggcaaagcaattgattgacgatcttttcgcggcgacggagcaggaaaaggaaaccccggcagacggcacgatccgcgtccgggttgcttatcagacgcccgtgccgatcatttggaagggtcatcacgcaaagctggccgggcggactttggaagaagcgttcgggctcgagaacgccgaatggtgtcagagcgcagagcagaggaaattgggactacgcttacacggtgcactggctgatcctgcagcgctggcggcggggcttcacaagcgggtcagtggcgataagttcgacaagaccaagttcgcccttggtgtgcttacggcccgaccggaagagtggcaggttccggcgtacattcgcgacggactcatttggctcaaggcacaagtcgatctcgaagttgaggccgaaatggaaggggccagtgtcgatgagtag

SEQ ID NO: 72507 - DNA, 1845 bp, Azospirillum brasilense Sp245
atggtcgccggggcgggttcaggcaaaaccacgtcgctgatcaaggggctcgcctctatcatcgccatccacggcgagcgattacggctacgcagacagcgcgtagcttgcatcacctataccgaaatcgccgccggggagatttgggcagacgtggggaacaaccccctcgttcacgtctccacgatccatagttttctttggtcggtcgcgcgcagcttccagccagacatcgccacttgggtcgcgaacaggatcggcgagcggatcggagaattgcagcacgccgccgctaattttggccctcgcgttcaacagaaaacgcgagagaagaatgcccacgatatcgtgcgctacgagcaacagcgcgaggctatcactcgagttcgtaccttcacttatggaactggaagtgattatgccaagggcatcctcggccacgacgacatcatcaagatggcttcgcagttgatgatccatcgcccgcttttccgaactctcgtcgcgcagcaatttccgttcgttttcgtggatgagagccaggatacgtttcccgtcgtcgtcgaagcgttaatggcggtccagcagcaggagcaggcccgcttttgcctcgggttcttcggcgacccgatgcagcgcatttatcccaccggcatcggtacggttcccaaacccgacggttggcgagcgattcccaagccggaaaacttccgttcaccgaccacggtattgaatctcgcgaacgccatccggcgtgacggcgacgatttggttcaggtcggtggccggaagaagaaaaatggcgaggaggaagtgcccgtcgtaggtacggcgcgactgttcgtcctaccgaccgatgcccatcgcgacgaacgcgtggcgcaagttcgggcgtgggttgctaacgctaataatgacgagatgtggcagcccgccgccgaaaacgatccggtgaaaatgctggtaatcgtgcatcgcatggcagcgaaacgattgggtttcggagacctctacggcgcgcttaacgacaaggcgccagacgccttcaaaaacggatttctggatgggacggcttggccgctgcgaccgttaatttcgtttcttttgccgattgcggaggctgcccgcggcgggcgggacttcgatacgatgcggctgcttcgcctccattcaccgttgctcctgaaggccaacctgcaaggagtgaacgtcgccgagcgactcgatcagcttcagactgtgagcaatcagctcggtgagctgatggggccgaaatcgcaggcgaccatccgtgacgtgttgatgcttgccaaagaatgccgactggtggcgtttgacccccggctatccgcttaccttgaagatatcgcggcgaacgaacccgagatcgaagagaacgaagacggcgaagcggaggaggaagatccttcaatcgagatcagttcgatggccgcgttcctcgcgtgcccggccaatcagctccggccttatcaggcttacgtcaatcaggagtcgcctttctccacccagcaaggcgtgaagggggctgagtttgatcgcgtgcttgttgtgctcgacgacgacgagggcacgcacgttcaattttcctacgaaaaatactttgggctgaagcagctttccgcgcgggacaaaaagacgctggaggaaggcggtgaaaccagcgtcgagcgaacgaggcggctcttctacgtttgctgcacacgcgctcggcaagacctagtggtcgtccttttcgtagccgatcccgcagcggcgatagcgcatattcgtgggctcgggctctttccggaagcggatatcctctcgcaagatgcgctcgcttag

SEQ ID NO: 72508 - DNA, 2289 bp, Azospirillum brasilense Sp245
ttgaaagatgtcagaatcgatcttgcatcggatatctcgatcttcgttggcgccaacaacagcggaaaaacatcagccacacacgcgctgcaacttttcgcggcggcgtcgcgtgatcgcttttcgattcatgatttcagcgtcgattgctgggatgcgatcaacgctttcggcgatggtgtagatggcgcgtcacttcctagcatctccctcgacatatggttcaacgtcaaagcgaatgacctgcacagagttgttgaccttctgccgaaccttgcttggcaaggtaatttcgttggtctgcgcgtagagtttgcagcgacagctccagatactttgcgcaccaattttcagaaagcccgggaacgggccagggagaacattcgccctggcgtcaatggcggtgccgattaccatcccacaccacgaataccctgtcattatctcggcgatggcaaaagtgaccggttccgccgagagttcgagttgcgctattacgttcttgatcgcgcgcatttcgacgatgatttgtgcgccaaagcgggctatgcaccactccgcgtgaccccggacaaaggccaaaccggtagggacatccttgctggcttggtaaagatcgatgttttgcacgcgcaacgtcacttgtcggactccgctggcggcagccggtcagaagacctgtcccggtgcctcagccggttctacgatcgcaatctagagaaacggggagaggattacgaggcccagcgagccttggcagactccgaagccatgctcaatgatcatcttgggcgagtgtttggtccaacattacagcgcttagcagtgctgggctacccaggtctcaacaatccgagcctgctgatccgaacggccttgaaccctgccacgatcatgagcagccatgaaggagcgcgggtccactatgcgctgggaccggtcaatcccaggcgcgatccgctgacgctgccggaccgctataacggcctcggctttaagaatttgatttatatggtcgtcgagcttctggactttcatacccgatggcgcgacattgaggaaaatcggccgccagtccacctaatctttatcgaggagccagaagcccatctgcatgcacagcttcagcaggttttcattcgaaaggtatttgatattctcgtgctcgaggaagaggaagccaaacactacaccacacagattgtggtttcgacgcattcgccacatattctttacgagcgcggtttccgccctatccgctattttcgccgaacatcgggtccagccttgcagacatcagatgtcctcaacctctcaaatttttaccaaaatacagccaaccctacacgtgacttccttgaacggtatttgaaacttactcattgcgacttgttttttgccgacgccgccattctcgttgaaggcaacgtcgagcggctcttgttgccgcagatgatcgccaaagcggcccaccgtctccagtccgcctgcctcagtatcttggaaattggcggcgcgttcggccatcgattcaggcccctgatcgaattcctcggcatcaccactttgatcgttaccgacattgacagtgtcttgccaccccaagccaacaaggataacgcttccccaggtgagggggccgcgccgctggccgaaggcgatgcctcgtcggctgaggaagcggatgcctcacagaccgaggacgaggcgccggaagccacggacgacgacgattccgctgccgggtcggcctgcatggtccacatcgatggcgcgctgacgtccaaccaaacgctggttcaatggctgcctggccaaaagacgattgtcgagttgctcgcagccgacaaggcaacgtgcacccagttgccgaaggccaatggggacgcgctggtccgcgtaacgtaccaaaccagggtcgaagtgacttggtcggggcgaactgtggcgattgccggcagaacgcttgaagaagcgtttgcactggaaaatcttgcttggtgtcaagcgaaggagcgagccgatctcaaacttcgtgtccggggggccgctaagctctcactggaagaaatggctgaacgcctgcacagaaagatcagtaaatcgagctttcataagacggatttcgcgctcgctctgctctctcatgatccttcggcgtggaacgtgccacactatatttcagttggcctttcctggcttgagcaacaggtcatgccacccccggctgaatctgtgcccgagctcgcaccgaaactggagaaccttgaacaggccggaaccgcatga

SEQ ID NO: 72509 - DNA, 990 bp, Azospirillum brasilense Sp245
ttgtttctcctgcccgccgatgatcatcggtcggagcggatcgcccaagtcaggcaatggctgagccgtgaaaacaacgatccacattgggagaacgacgcgcgtgaggctgacgtgcgcgtgctggtcatcgttcatcgcatggctgcgatgcgtatgggattcccgggcctctatgcggccttgcatgacaaggcaccttccagcctcaaggatgggcttgaggatggcagcacttggccgctccggccattcctgacctatctcctgccgcttgccctggccgttcgcgtcggcgatcactttgaagtcatgtcactgctgcgcacccactgccccctgctcacggcggacggcatcgcgggccgggaggtgggcgaggtgctcctccaactcaaggctgcgacgatccaactgagcgcgctgttcgacgcgccgacgaccacgatccgtcatattctcgatcatgcgatcaccaccgaacttcttcgactcgacgatcgctacaccccatattttgctgaccctgatagagggccggatgccgatgatccagaaagcgggcctgttacggcctttcttgcttgcggtgcaaaggagttgtgggggtatcgtcactacattgaagacatgtctccctttgccacgcagcaaggtgtgaagggcgccgaatttgatcgtgtgttggtgctcatcgatgatgatgaggggcgtgggcagaatcaattttcgtatggaaagtactttggcatcacgccgctgtcggaaagggacacggagaacttagcgaaaggagaggattcagtgttggagcggacgcggcgccttttctacgtctgtagttcgcgcgcgacacgtgacttggctgtagtaatgtttctgcccaacgtagaagccgcgcggtcacagatcgaggccaaaggactttttcggcctgaagatatctacgatgaccggtcgttggttgaacatccagcggcggctggttga

SEQ ID NO: 72510 - DNA, 1908 bp, Pseudomonas stutzeri ATCC 14405 = CCUG 16156
atgtttctgcgagcgttagagatcgatggcttcaagtgcttcaacgctggtttctctatcgaattccacaatggactgaacgtgctagttggagagaacggagccggtaagactggcgtcgtcagcgcaatacgccagttgttcaatgactcggagtcaggcaagcgctcgatccacgagcgagatttctatcgcggctttgaagcggacgcggtgcctaccgagaccatgcgtattgcggctaccttcagcgatctaaaccaggaggaaagcaccgctttcatagattggtgcggcaaggatccggaagccaaactcaatttcgacgcaatcaaccgagagtcccgcggccgttaccggcatcagattttgggggggcatcagcgcgtgaaaccggtcgatccagaaacgctcgacctaattcattgcatctaccttccaccactacgcgatgctgagataaagcttcgtgaagggaggcaatctcgccttgcccggctattgaaggctctgtgtcgcaaggagctggacgcctgtcgaaaggaaggcactgcccatccattggagcagtatgttggcgacttcaacaaagagctttctgagagcgataagtacgctatcaagcaggccaataagcgaattggggacaacctcaagcaagcgctgggcatgaacttatcccagggcactctcattcagttttctgaggtcaacttttccaaaatcgtcgaaggtctgaggctcctgtattaccccgacctgagtgaggcggccgcgacccagttcaggtcgcttgaagaaaatagcctgggttacaacaacctcttatacatcgcctcgatcttggccgagttgatcctggaggctgacgaggatcgcggagaagatacttacctacggctactgctgatcgaggagccggaagcacatctgcacccgcagcttcagattcgcctgctcaaacatctgaaaactgtcgcggagaagcaagggatccaggtcatcgtgaccactcactcgacagtcatatcctctgctgtatcggtggagaacatcattcatctgtcgcggaaggacgcaccggtagcagtaccgttgcgcagctgtggcctctcagatcccagcaggaaattcattgatcgctggctcgacgtaaccaaatctaacctgcttttctcgaggggggtaatcctcgtcgaaggcatcgctgaggccattgttgttcctgagcttgcgcgaattgtcctgaaagaaaatggggaggggcgcaacaccctagaggactttggtgtctcggtgattaacctgaacggcatctacttcaagcacttcatgcagctgttttgcgatgtcgatggggagccgaaaagcctaaacattccggttcgatgtgcggggctaactgataacgatccaccgaaatccgtagagacagttgaggatgccgagggcaagaagactgcagtcccttatcttccacacgccgatagcttcatggcgggtgaaaaccacgccctcaagctcgttccactgattgcggaatctgagcatggaaggctgtttgccggaagctacaagacgttcgagtatgacctcgcacttgaggggaacaatctcgcccgaatgtttaaagctgcatccagctactggcctactcaggggccagtgaaaaaggggcttcacgccagatcagagctcaagtttgcagagatggggaatcaggaacgggcgaattacgcgtgggagctcttagagcgcatcgactcagatgacatgggcaaggggctctacgcacagatcctggcagatgaactggcggcgaaccaggagggtgagttcctcgttcccaactacattcgtgatgccgtactgtgggcctgtgagctcacgctagagaaacacgaatga

SEQ ID NO: 72511 - DNA, 1749 bp, Pseudomonas stutzeri ATCC 14405 = CCUG 16156
atgacgcctctcaccccggaacagcgggcctatatcagggcatcgctgagtgagcatgtatacctgcgagcttgccctgggagtgggaaaaccgaggtagtcgccgcgatgatcgcgaacgcctctcgggtatggcagcggtcaccatcgggcattgcggttctgaccttcagcaacagcgcgaccgatgagctgaaggatcggctgcatgagcacctgggcgaagcgctaccgcatccgcaccgcgtttcaacttttgacagttttctgctgaaccacgtcgtagggaatatcgctacccacctgacagggtatccgggtcgtgatggcgattacaggatcaggctactcgataagagctccaacatttacctgacccgtaccaagatcggtgaaaggaggatatctgcctgcaagtacgactatgacattgtgactaggcgcttcgaattcacgacgggggatctgaccgaggtcaagctgaacgccgttgaacaaagccctgaaatgattgatgacctaaccgagaccaagcgacgattttggcgtgggggatttgccacatatcgcgacatagacatgcttgcgctcaaagccctgagagacgctgctttcgagggctattttgcgaaggtggttcgcagattccccatagtggtcattgatgagtgccaagacttgtctgctgagcagctatcgattgtccggcagctggcccgaagaggcatgaaatttcacttcgtgggtgatctgaaccaatccatctatggattccgaaagtcagatcctgccagggttcgcatactgcttgaggagctcaattttactgagtacgcgctgacagctaactggagaagcggccaagccatcgtagatctctgcagtgatctgctgcgtgtagcaagaagcgcggggaatccaggcatcgaacccttgaagcccctactgattcagtaccaagaatgtccatcggaactcactccgaagataaccgagctcacacatgcttaccaaaacgtcgtcgttgttgctcgagggtacacaacgctccagcgcttcacccgcggaacatctgagcttgcggccatagaagaattggccctgtcatgcgtcttgatcgagagccaaaaccttgaggaggtacggcaggcgctaaaattatttgcggaatggttggcttccaagctgagctttgacgtttcgccgggcagtctctcatgccccatacaggtcgagtcgaatctggaatggcgccagttcatcttccaatgtctcaagttcctgagcagttgcggcgcctcgaatcttgagctcacttggaaagagtgggcagctcaaacaaagcgggtgatacagtcgctccctgatcagctgttcgtaccgcgagctattgtgccgctgctagagggacttaggggcatgagtctgtctgcccccgcaggtaaaggagctgacgcgctcgccaaacaactacttcaagtagggcagcaatccatctccaaccatagggtcgccaccatccaccaggttaaaggcgaatcccatgacgctacagtgctcctctcttcgctcaaggctggctcccagggaaactggaaggactggctgcaagatccgctttcggaagctgcacgattcgcttacgtcgccagctcgagaccccgacacttactcatttggggggtcaaagcattgaagccagacgagcgagatcggatagctggtttgggctttgagatcgttgactga

SEQ ID NO: 72512 - DNA, 2124 bp, Pseudoalteromonas arctica A 37-1-2
gtgtatatatcaaaaatcaatattaataatttcagaaacttttcgaattcaacatttgaatttacagaaggtacgaatgttattattgggcataataatgcagggaaaactaatttaattaaggctatacaattagtccttgattcaaggaaatcaaaatctaaattaacagttgatgacttctgtaaacaatattccgacttttctactccaccagaaataactatttcaataacgttaagcgaacaaactgatgagccggccgatgataaagtcgtagtttacgattggatcaccggtttcaatcctaagtatgaagcacaattgaccttttcattttttcttccgcagggagatgattacgatgattattgtaaccagattgaacatttcaaaataggtggcaattatgagtcagaaaaagtatggcgatttataaaaaaatatttcttttccaaatatgtagccagagtttatgggggcgatattgataaaaaagagagtgctgattatgaaatgcttcaaaagttcgattttcaatttttagacgctattagagatgctgaaaaacaaatgttttttggaaataatacaattctaaaagaagttctcaattactttcttgattttgatattactgacgggaaaaagttaaaagatttacctacgcaaattaaagacaaacttcgagataaagagaataattttgaagacgattcaaataagttatttaatcagttgaaaactcgaatttcaaaaaatgaaatattaaaatatgcaaaagaaacaggggcaagtaaaggtggaatacctgatcttgatgctcatctaaatgaggatgatttattattcgctttacggttaattattgaaattgatggaatgaaaattcccattagtaataatggtcttggttacaataacttactgtatacagctttagttttagcgaaaatgcaaatagaaagtcaaagtagctattatggagaaaatgcaaaagtatttcctatactggctattgaagaaccagaagcacatctccatccatcaatgcaatttaagtttctaaagtttttgagtcaaaatattaattcgaaaggtaaggttagacaattatttgtcacgacacattcgacacatattacttctgctgctgagttagacgatgtgatttgcttatataaaggtattaatggaaataccaaagttggctatccgggtaaagcttttggcaaagatgaagattctaaaaattatgtaaaaaggtttttaaatgcaacgaaatctaacatgctttttgctgataaggttattctggtggaagggttagcagagcagttattattgccatgtttagctgcatatgaatgttacgacgctaaaaataagattaccaacgaagatgagttaattaatcaacatgtttgtactgtgtctgttgatagtcgtacttttagccattttttacgtctgttcagttatgatgaaaccaataaaaatgctattgaaaagctagtggtttgtattactgatgcagatcctgagtcgaaaggaaatgatgggaaatggagagggtgttttccatttgaattaaaagatagtgataaatttaatgcattagctagtcatgtaaaaagtttgaaaaatgattttgaaaaaccttatcggaatatatcaatatttcatccagaagaaaaaaaaggtaagaccttagagcatgaatttattcgttataaccctggaagcgaattagtcatcactaaatcttttccttcacagaacagcccacatacaattgaacattttaaagctttgcaaaaagtatttaatgataacaatgaagattttttaggaataatttctgcttatgaaaagacactaacaaccgataagcaaaaagaaaaatttgaaaagttgaaaactagcattaatgtatgtacgttttcgaataaagataagtctatcgctgtgctttctgctatttattacaacattgtaaagtccctaaaaggggagcatgcactttatttggaagagtgccttcgtaaagacttagatgaaagcgtgcccgaatttattattcccacttatgttaaagatgcactcaaaaaaatattaggttaa

SEQ ID NO: 72513 - DNA, 569 bp, Pseudoalteromonas arctica A 37-1-2
atggatacaattaaagaactacctaaagttttaagtgatattaatgttccatttaaaatatcagcaggtcctggtgcaggaaaaacgacatggttagtcgagcatgttaaaaatgtactggaaaattcagataagctaaataaaacacaaaaagttgcgtgtatcacttatacaagaataggggctgatacggtaaataaaaaaataaaaaacttcaccgatactaataggttagatattggaacaatacatagctttctttatcgcaatgtaattaaaccattcgtttatttaattgaagaagattcagacaaaaacaagttgtttaatatacatgaactgactggacatgttgaacaccggccaagctatgacagaattagtagttggattcatagtattggaagccgctatagttatctatatgatcaaaaaaagtcagatgaaaatggtcaaactaaccttgataaaactcgaactattttaaaaaattttgaatggcaattttctggaaataaattggaaggaaagcttagtaaagtttattttagcgacttaagatttccttc

SEQ ID NO: 72514 - DNA, 2064 bp, Bacillus sp. 7_6_55CFAA_CT2
atgtatatttcagagttaacaataagcaattttagatcgtttaacaaaaaaacaacgttaaattttaatgatggaattaatgtaattattggacaaaataatgctggtaaaacaactgtaataaaagcattagatatcctttttaacaattcttctagtaagagattgaacattaacgattttaatcgtagtgcctcgattgaagaactaaaagtatgcccacctaaaatatatatatctgctaaactacaagaatctgaaaatgaaggtgaatactcagatgaattagtgacagtagctacctggttaacaacccttaataaaccgtatgaagctacaattacctatgaatatttcttacctgaaaaagaagtagctgaatatacaaatttaatgaaaaaaatatcgattgaagatattaatcactattggaaagctattgaacataatttcttaaaaaagtatgttcatagagtatacgttggaaatcctgaattcaaaaattctgtgcagaatgatgaaataaatcgttttgattttcaatttttaactgcaattcgtgatgtcgaaagagatttattcaaaggaaataacagtcttttaagagaagtaatagacttttttatggactacgatattaaaagtaacagtgagttagaaaaaaaggaaaaaatagaacaaattcaaaagaaaaaaagagacttttcagttgaatcaaagaagataattgaatcacttcagcaacgtatgagaaacggtgaagaacaaattttaaagtatgtcaataatactggggctggaattgatgaatctaaaccttcatttgatggagaaattttggacaccgaattatattcagcattaagactcattgtcgaaaaagaatctggaattaagctacctgccattagcaatgggctaggctataataatttaatttatatctcccttttgctatcaaaaatgcaaaaagatgcttctggagaatatttagggtcaaatgccaaagtgttctccatattagctattgaggaaccagaagcacatttacatccaagtatgcaatataagtttttacaatttctaaaagaaaataaagattcagatgttaaccaaatatttattacttcacattctccaaatataactgctgcagttgatttagaagatattttagttattcaaaaaattaatgaagaaattaaaatagcttatccaagtaaagtattcaatgattcaaacgaggaagatatcatatctcgaaattatgtgaaaagatttttagatgtaacaaaagcagatttattttttgcgcaaaatgtaattctagtagagggtattgctgaacagcttgtacttcctgaattcgcagcctcaatggatttgaatttagcggacagccataccacaatattgaatattggtggaagatattttaatcatttcttaaaattatttgatactaaccgctgcaaatttgccttaacaaaaaaagtagcgtgcataactgatttagatccagttagaaaactaaaagacgctgcagatgaggatagcaattggaaaaagtgtcttcccatatttttgaacttacaaccagaagactatgaatataaaaaaacttctaattcactcgtggggacatatagccatagtgattcgaaaattaaagtttttacccagacacacggacaaagctctacatttgaatatgatttgattttgaagaatccgagttgcgaaaaattagtaaccccttcagtttctaatgctcaagagattaaagagttaatggaccttgttgcaagagataagcctataaaggaagtagttgcaagaataagaaagaatgcctttaaagacgagcttttaaacttgcttactcttggattgttaaaagatgagttaagcgtaaagaaaggcataattgctagtcgatacctattatctatctctaaaggagaagcggctcaggagattgcttatgtcataagtacagctgagcagggcttaattgagccaccagattatataagcgaggcgataaaatggatttgtcagtag

SEQ ID NO: 72515 - DNA, 1326 bp, Bacillus sp. 7_6_55CFAA_CT2
gtgaaattatgtgaggcgctaaataaacttcaatgggttttagatgatgaaataccaacattaaagtttttaaatgcttatgatggtaagatagaaggttatttcctaaaaaaaagtgcttattataaatataaacaattatattggtccgaaggaaaattaagtcatgatgatgtcctttattttgcgtataaaattttacaagaaaacatacgaataatagatattattagagctaaattcccctatattttaattgatgagtttcaagacacaagtccattacaaacagccattattgaattgattgggcaaaaagaagttaatataggagtaataggtgacttatgccaatcaatttattcttttcaaggggcaaacgtagaatcatttgagatgttttcaattgaaaatatgaaattatatattttaaaggataatcatagatcaagtaacgagattataaatgtacttaatcatatgcgtaaaaataaagactttgagcaatcctctcccactcataaatctggtaaccttcctactatactggtaggatctaagaaaagtgcttatcattacttgaatgataaatcaataaatccagttgtactatcatataaaagtgaaaactcaaagtccgttgaatatgaaacagatttaattgaagatatggatttcaatattattcttcaagattcaaataatgaaagaggctggagaatttttcatataatccaatctatcgaattagctaaacagtttcaattaaaagaggctttaagattaatgaaaattgcttatcgaaaagatgagccttttactgataaagaggcttttgttaacttaaaaagatttttaaatatgtacaatgaatttgaaaccaaaagcattacttacttccacaacgagttaattgtagggcaatacaatgttaagggacgtatttccagaggagcagcaaaaacattatatgatggtttaacttatagaaaagttgccctccaaatgaaaattttagatgacttaagtgattttaaaacaatccaccaatctaaaggagatgaatttgaaaatattttagtaataattcctccccaaaaacaaggaacagagctaaactttctgctttcacctaacatgaatatagaagtgcatagagtttattatgtggcattaagtagggcaatctcgggactctatattaatgttgagagcttaaaagaacaagaaaaagcagcactcatagaaattggttttgaagtaatacaggtagaccaatcaaatgaattaaatattactactaaggagctagttaaatccttataa

SEQ ID NO: 72516 - DNA, 2310 bp, Citrobacter freundii 4_7_47CFAA
atgcatttgagtaaactcgcagtcaggaatttcaggagactgcatgatgtagtaattgatcttgcatcagatatatcaatatttgttggggcgaataatagtggtaagacctcagtagggcatgcgttgcagcttttcactggaagtggtcgtttcagtattcatgattttagtgctgtactttggcctgacatagtggcttttggggagggcgccgtcgaagtaagtttaccttccatggaggtggatctctggtttgaggttaactcagatgatattcaccgtgtaattgatctactccctagcttatcttggcaaggttcattagtcggtatacgggtatcttattcccctaaaaatcctctagaaacgagggcccgttatgcagaaatgagacaccgtatgcttgaggctgttgccagagatggcaatggagaactgatttttgatccttcacctcataacttaaaagagtttctacaagacaggctcaatgaagagtacgaattacgtcattttgttctagatcctgcacgatatggcgtgaacatgattgcagaggaaaactataatcctctccccttagatggtcgtgaccggagtggccgcgaaattttaaatagcctccttcgtattgactgtttgaatgcgcaacgtcacctttctgatagtccagggggagctcgttcagaggaactctcacgagtgcttagccgtttctacagccggaacttagaacagcaaagtgacgatcatcaagccctaagtgctcttgctgaatcagaaacatcatttaataggcatttagaacgagtattcgaaccgacactcagaagcttatcccaacttggttatccaggacttacaaatccgagaatggtaattcgttctgctttagatccagcgcagatcatgggagggcgaaatggggctatggttcattatgcactaggtgctgatgatggaaatcctaatcctccaactttacccgatcgctataatggccttggcttcaaaaacttaattttcatggtggttgaactacttgatttgcatgcacaatggattgctattgaagataatcgaccaccggtccatttgatcttcattgaagagcctgaagcccatttacacgctcaacttcagcaggcatttattcgaaaagtgatggatatacttgctgtgacaggtgaggagcaagttcattatactaatcaagtggttgtcacgtctcattcgacccatattctctatgaaagaggtttcaggccaatccgctattttcgtcgaagtcgttcatctgacgtatctgcttcagaagtccttaatatgtctattttctatgataatgccgatccggaagttagagattttctcgaacgttatttgcggttgacacattgcgatctgttctttgctgatgcggctgtactcgtcgaggggaatgttgagagattactgatgcctcagatgattgcaaatgctgctccaagattagcatcatcgtatctaacggtgctggagattggaggagcatttggctatcgatttagagcgttaattgaatttttagggctaacaacccttgttattaccgatctcgacagcgtatacggcccacaggaacagcgagaggtcgttgatactcagcccgatatcttagaagttactgctgcaaacgatgatgataccgagctggatgatgacgaagaagatgatcagacagatattgccctgaggcctggtaaggcatgtattgcaggttatcctggtgcaattacatctaaccaaacactccgtcaatggttaccaagatgtgcaacagtgtcagaactctgggaggcacaatcggatcagaaaatacagagacgtaatagcaatacagatgccttggtgagggtagcttatcaatgcccgaaagatgttatttggggccaagaaacgatggaacttacaggccgtacgttagaggaagcttttgcgcttgagaaccttgaatggtgccaacatgtcaaccgtaaaccccttaaactccgaattcccagagcaaatggtatggatcttttgacacttgcaatgcggatccataaacgagtacaagcaaaaagtttcggtaaaactgactttgcattagcgctactttctgaagatcccaattcttgggtagttccttcgtatatagctgaaggcctcagatggttagaaacagaaattgtgtcggcagagcaaaataatggtgttgaggacggagcaactcagataggagaggtttcagtgtcggctgtaactgagaatgagggggttgcatga

SEQ ID NO: 72517 - DNA, 1878 bp, Citrobacter freundii 4_7_47CFAA
atgactagtaggatcggtagccctgatactcaagctgatcttgatgttcgttcatgtctggaacaaatccctccttgttcatttgtaatggtggctggggctggttctggtaaaacgacgtcgttgataaaagcccttgcttatttggcaaaaattcgcgggcaagaatttaggcgtgctgggcagaaaatagcatgtataacatatactgaagttgcggtttctgaaatatctgaagatgtaggtgactcatctatatttcatatctcaactatccatagttttctatggtcaattattcggccatttcatttagacatcaaaggctgggttgcttctcgtattgatgagaaaattgccgataaacaagaacattataataggcccagagttcgtgctcaaaccaaaactcgtctcgaagaagaaattgcaggcttagaggttcagaaagcacaacttgacgaagttgataagtttgtttacgggactggaagtaattatgctaaggggattcttgggcatgatgatattcttaaactaacgcctacttgcattgaaactagtccattgctaagacagttggtttctaaacgctttccttttatctttgtagatgaaagccaggatactaatccttctgttgtaaatgctttgcgccatattgcaagagaatgctcaggtatgtgtgtaggcttcttcggtgatccaatgcagaaaatatatatgggaggaacgggggctgtttttcttgatgaaggctgggcagaaattagaaagcctgagaattttcgatgtccaacatcagttcttacggtgattaacgcaattcgtgcgcaaggagatgggcttgagcaaatacgggggcggacatcatttattaatggttcagaacaattagtggctggttctgttaatctttttattttgccttccgactctgagcggaattctcgcctaatggctgttcgtcagtatcttgcaagagaaaataatgataatcagtggttgagtgatgtgcgagaaggcgatgttcgtttgcttgttctggttcatcgaatggctgctgataggcttggattccctaatttattttctgctcttacagaccgagcgcctatgagtttaagcgaaggtgtaggagatggaacagcatggcctcttcgaacatttgttcaaaacatactccctcttgttaaggctgcatctgagggggatgaattttctgtgatgtcaatattacgtaatgaatgtccaaaactcgaatcacttagaatacaagggcaaccaatggggcctgtacttactgtgttaaagcaagctttggatgaactggtttcattactctcgtcagattctcatgcctctattagggatattttatcacatataaatgatacggagttacttcgtcttgatgagcgcttcggtatacatttagttcccaatcctgtgaatgatggcagcaaggcttttgaaaatattcaggccttcctgcaatgcgattgtaatgaactctgggcctatcagcgttactttactgaggaatccccatttgctactcatcatggagttaaaggtgctcagtttgagcgagttttggtcgtcattgatgatgaagaagcacgataccatcagtattcttacggtaaatattttaactatatccctctttctgagagcgatgaagaaaggatcgccgctggtgaagaatctgttatagagcgaactcgtcgcctcttttatgtttgttgttcacgtgcaactaaggatctggctgtggttgtcttcgttccagatgttgtgagagctcgcgaagcgattattgaacataatatattcactgaaacttcaattagaggtgttgaacatctcatgtaa

SEQ ID NO: 72518 - DNA, 2190 bp, Enterococcus faecium E4453; identical to SEQ ID NO: 71982

SEQ ID NO: 72519 - DNA, 1749 bp, Enterococcus faecium E4453
atgacaaatatcttcgaaaaaatcgtaaatgatttaaatttagaacaaaaagatgttgtggaaagtgaagataacctttatgtaaatgcatgtcctgggagtgggaaaacaagggtacttacaaggaaaattgcttaccaagcaattaaacacgatggatcactaaaaagaataattgctatcacatacactaatagagctgctgaagaaattaaggaacgcctaagtttacttagtatagatgatgatattaatatttgggtggggacaatacatcagttttgtcttgaatttattatttatccttttaaaatgaatctctcaagagtatcaaaaggatttacaattattgatgattatactcaaagagcttacgtcagccaaattaataatatgctgaatttaaatctcaaaacgtatgaactgaacaaaattgatttgtcactttctcatgattttaaaattaatgaagttcagtatactcaagtttctgaaatgtatcacactatgttggaaaaaaataaagaaattgattttgatatgattttactagtagcgtataaaattttaactgtaaacagtaacgttgcacgtaatattgctagtaatataagggcgatttatgtggatgaatttcaagatactagagaattacaatacaatgtaatagctaaattacttcaaaacaaccctcaaattcagtcaatgtttgttggagatattgaccaagcaatttatggatcattagatggtatagctaaatcagttgaagaactagaaatgctaactagtcacacttttcaatcaaagacgctacatggctgttacaggtctaatcagagattagtagacttctactctaattttcagagttgtccttacgagattgaaagcagagggaataataaaaacgaccgtggttttataagttatgattgcaaagttactaaggaggatttacccaacataataaaaaatataataaaggaaaagattgaaagcggcattcatgaaaaagatatttgtgtacttgctcctcaacactatcctctgttttcactgggtgagtatttaaagaaagaattaccgtattgcaattttgatgctataaatatatcaccaattaaggtaaataatcatagtttatttttcaagttagcaattttgtactttactgaatcaggtgaaaaggttcgaagaagaaagctaattgcaaacgatattttaattatactaaaaaatgaatttggaatagaagttaaagattattttattgacttagatttattacagctaataaacagtgtgaaaagaatgtatagtggagacgacaacggtgttgatttatacaaatttgttaccaaacatatatttgttaatcttaatattgacgagaaaaattacccgtctatttttaagcactatctattttttattaacgaagtagaagatcggataaaaaataattcattatctagtagtgtatctagttttaagaagatgtttaaatctcgagatggtatcacacttactacagcacataaagttaaaggaaatgagtatgatactgttatcgctattaatcttctaaacgggaaaattcctcattggaatgaaatttttaatgtttctgataaaggaattagttcagcgagaaaactactatacgtaatttgttcaagagcaaaaaataatttatttcttttctcagaggtgggttattttacgagtaaaggagacttgctttag

SEQ ID NO: 72520 - DNA, 1995 bp, Bacillus cereus F837/76; identical to SEQ ID NO: 72088

SEQ ID NO: 72521 - DNA, 1926 bp, Bacillus cereus F837/76
atgaatgataaggtgttggagcaagattggaaaacttcaaataatgtgaaactggaagattcagccttacttgctataagagcttcaaatcatgtagcgattgccgctggaccaggtgctggaaaaacagaattgttagcacataaaacaggttaccttattcaaactgggatttgtccaaatcccaaaaaaatattagctattagctttaaaacagatgctgcaagaaatctgcaagaacgtgtcaaattaagatacggtaaaaatgtagaaaatagatttgaatcaaaaacctttgatgcctttgctaagggaatattagatcaatttatatatgcattacctaaagactatcaacccaaaagagattacgagattattctaaacgaaaaatcactaaacgatataataaaaggatatattacaaaatttaatccttatcatcctaattggcaacatgaatatcatcttaataaagtgttgggaaccatgaaagaaacggaattaccaatagtggtttttgaaagtgatttatattcttggataaacgaaagactgtgggtggttttattaaatggtaagggggatttaacaagttcacttactttttcaatgatatcaattttagttgagtatttattaaaagaaaacccattaatagttaaggcattacaagcgacatatagccatgtttttttggatgaatttcaagatacaacatataatcaatatagtcttctgaaaacaatttttttgaactcagatactgttattactgctgtcggagataataaacaacgtattatgggctgggctggagctttacacaatgcatttggaatatttgaatctgattttaatgcaacgcagcacacactttttaataattttagatctgctcctaatttagtctctatacaaaatatctttgctaaatctcttaatgacacccctatagaagttctcccagttggagagtggaacgaaaatgatggtgtttgtgaagtgtggaattttaaaaatcataatactgaagcaatcctattagcatcttatataagtgaatggatgaaaacagaaaatttaaagcctagagatttttgtatcctcgttaaacaacaagaacatatctatgcagctgaaataatgaaggaactttccaaaattaatataaaaagtagaatagaaaaagattatcaagaccttttatctgaggaaatagttctgcttattattaggattttacagttaagttatgaagaaaaatctcctgaattatggatgagtgtcattgatgaaatcatagatataaaatacagggatgttgatccagaaaagataaaatacctgagtatagaaaacgaattggtaaaaatgctagatgaggttagaaatcgttattcagatattgatgttacaaactttaattcacaattcacagaaatattacaagaaattgtagtttttttaggcgaagaccgtatcaaggcaacttatccgaaatacaatcaagccagttattttaatgaagtaatacaaaagatgttagataaactaaaatatcaaaatcgtatttcaatgaaggaattattacaagagttttgcggtgaatttagtataccaattatgacaattcataaaagtaaaggactagaatatcacactgtgatttttattggagttgaagatgctgcattttggagtttttctactcaaaaagaagcagataaaaatgcatttttcgtagcattatctagggcgaaacaaaaaatgatatttactgtaagtaaaaaaagaaacattttgaagtttggtaaggaaaaaaatgtaacgcaagaaactgaaaatgtctctgagcttatacaaacattaatggatgcaggtgttcctttaattgaagaaagtgatttggaaaaggtgttataa

SEQ ID NO: 72522 - DNA, 537 bp, Yokenella regensburgei ATCC 43003
gatgacgttgatgacgttgatgacgttgatgaaagtgacaagattgttgaacaaatatctgttctttctgaagacttaataactacaaacgcaactctacgtcatttttatagaaacagaaaagttgcagcattaaaagattattatgtaaaagataatttgatggttgttttccagaaggatggcattggtataccaacagaatgtccacaaaaaacttattatgccactagtttcgaggaggcactaattttaaagaactataacaatgatttgctattagacgtccttctaaaagttataaaaaaagaaataataaaaacacttggcagtccaagaaatgtttgtaatatagctcataactcaagacaactacagaagcaactggctaggaaaaaaagtgaattttctaataatcttattttctctttggttacaacagaacaacataaacctgagcttcctgattacattttgaagggattagaatggctcacgttaaaattaaaaagggatggtgtaatctatgaaatttga

SEQ ID NO: 72523 - DNA, 2037 bp, Yokenella regensburgei ATCC 43003
atgaaatttgaacttgatcaacaacaagttgaagtcgaaaaaaatgtcgagattgagctttttaaactgatagagaaatctgagtctttctattttatttctggagctggatccgggaaaacacatgctctcattacaagtgttaataaatttataaatgataattacacgcaacttatattaaatggtcaaaaacttctatgtattacatatacaaataacgcagcagatgaaattaaacatagattaggcgataatgatttagtaataacctctacaatccattcttacatctgggatcttgttaaattccatatggatttattacttgatgagcatgttattttcttgaatgaagaaatagaaagaatttacagtgagatttatgaactacaaacagatagtgcaactttattgaaagtgagaagtttgaaagaacctcaactagatgcaataatagactatattcttgtagataaaaatgatttttatgagtctcttaaatcagcctctaagttttggacgtatttaaaaggaattactgatgaagaggtgtttaagcatctaaaaggtaattatcagaaattatcaactgtttttaagaaattagtaaaatctcaagaattcaaacgatgtatatgtaatattgagaaaaaagaagaacagtacactacaataaaatacttcaatactaaaaatattgaagttttatataaaaacattatcgggcataatacgttgttaatatatgcatctagattgattcaaaaatatactttgctttcaaaatgcatcatagatgctcatccccttatttttattgacgaatatcaggatacggatgaaaatgttatcaatttatttttaagtgtagataatattgcaaaaggaggaaataagaaaatgtgcttaggtttctttggggatcctatgcagacaatttataaacatagcatgcataaagaatcgcatagcttaaagaaattggtgaaaaacattaataggagatcgcatcaggatattgttgagtgtattaataaaattagaggtgataatcaagatgttaaacaaaaaccaataaaaatatacgcagaacaatgctgcccgtcgctgattatcgaaagtgaaaaaaattatacgaataactatttatcttccataattcagaggcataaaagcgaatggagcataaatgaaaattccaaacttgcctgccttgttctcaaaaatgaaatgctgtctcagctccttggatttgaaggtcttttttctactatgctagatatctaccaaactgagcatgcaaaaggatttgagatgattggttcggaatttttatttagagaaataaggtatgccggttacttaccatctattctgcatgatttattgatgccactttatctcttgaaaagaaaagcgaacttttcggtttcagattttttcaatatgaagccaatttcaaatcataacttgtcagatgttttagattctataaaaataattgagtcattaaaagttaaatgcttaagtgattttgtacatgaaatatctgaaatatatgttgggcaggaagcagaaattcaaagtctgattagctataactttcatcttgttatcgatggcttagaaagtgcgaaagagaaaattattgataaatgcaggtttaaggatacggaaaagattcctcaattattggatgaattatttaatattgatatggaacagtttttcctatggctggattttatttatcagacttatccagaaaatttagtttcatacttgacttgccatgcctcaaaaggtctggagtttgataatgtcataatttttctttcggattctttcaatagaaaagaagggtatttttctaatctcttaaactctgatataaattccattttggaacctcaacttgagtcagcaagaagattactttatgtttcaagttcaagggctgtaaagaatttaaaaatttatctttttacaaataaagaaattgataaatctaaagttgattatttatttacctga

SEQ ID NO: 72524 - DNA, 2190 bp, Staphylococcus aureus subsp. aureus 21178; identical to SEQ ID NO: 71904

SEQ ID NO: 72525 - DNA, 1794 bp, Staphylococcus aureus subsp. aureus 21178; identical to SEQ ID NO: 71697

SEQ ID NO: 72526 - DNA, 2190 bp, Staphylococcus aureus subsp. aureus 21209; identical to SEQ ID NO: 71982

SEQ ID NO: 72527 - DNA, 1794 bp, Staphylococcus aureus subsp. aureus 21209; identical to SEQ ID NO: 71697

SEQ ID NO: 72528 - DNA, 1764 bp, Actinomyces sp. oral taxon 849 str. F0330
atgaaaatcgattccattcacataaaaggattcagaaacttcatcgattgcgaagttgagttcggcaagcatacgctcatcgtcggagagaatgacatcggcaagtcaaatttgcttcatgcactacgcatactatttgatccatctttcagctcaagagacttcgaacttgatgaaagcgactttaacatcacgtccgaatgttccgaagtcgttattaccgcaaaaatcatcgacgtcagcgaagattgtttggtaagcatatttaaggaagcgcgaagtgatgacggcaccgtttatgtccgttttcaattgaaaaagggcgaagaatatatcttcctgaccggacctgaaactgaaacccttgaagagacagccagcagatactatattcagcatttgcaaatggagtatgttgccagcacccgcgatctatcgaatttcctaaaacgccaacaaaacaggcttctagacatagcgcgtgtgcagagaacggacgaagaagagcaggaagatcaaacagcgcttacgtccatacaagagaaatttgatgaactcaataacaagatcaacgagcttcattacgtttcagattccctgaatgttgtaaatgagcgcatgacggctctgtccgcactcaacgcagagcagcagattcaactcgttgcaggaaacaccgacgcgggagaactcgtggacaacctgaagttggcttacctctcaggagaggctcctctaacatttggtggagatgggcgtcgaaatcaactttatttcgcaacctggctttcaaaacaagaattagcctccagcaatcagcgcgagaaagttgtattttttgctgtcgaggaacccgaggcccaccttcacccccagcaacaaagacgcctgtcggaatacctgtcatcgaatctagatgaacaaatattaatgacaactcattcatctcaaatcttagcacgtttcaccgacggaaaaatagtgagattagccaaagatataagccacaaaaataccaaggcactgagctattcaaccaaagtagatgaagcactcaataagttcggatatcgaatgaattcgattacatccgaggtgtttttttctcgcggtgtcctccttgtcgaaggttcttcggaagtaatgttctacaccgcattaagtggcgcattaggcataaacttagatcagttgaatctttcggtcatatcggttgatggcgtaggcttcaaaaagtacctcgacgtgtgcatcagtcttgaaattcccgtgactatccgtaccgataacgacatatttcgcgtctacgggaacaatggttgtatgcggtaccgatatgccggagtggagcgcgcggttgacctgctagaaattctactaggggacagtatttcagaagatactagatctactatcgaacaatacaaacattcactggtttgggaaggggagttcccaaccgaacagaatagtaaagccgcagaatgcctcaaaatgctggccgaggaacatgggatttatctagctttaaaagacctagaaaatgatttaagcagtggtcctctacgagatcaacttgcaggacactatggcagacatgaagagaagaaaattgtagaacaaatgcagaaacgtaaagctgagcgcatgtatgatttccttaaaacagaacctgatctaactcttctagcgagcaatcctatatctgcccctttgcgagccttagctgggaggaacatcaatgtcgctggcaccgaccgatga

SEQ ID NO: 72529 - DNA, 1347 bp, Actinomyces sp. oral taxon 849 str. F0330
atgtcgctggcaccgaccgatgagcaactcgtcgcgatcgaatacccttacaacaaagccatcaccgcaaggccaggcagtgggaaaacctttaccctcgcgcagatgatcgttaaagattccaaagatttactttcatatcaaggaattattgcgatttcgtacacacgcaaagcaagtgccgaattaaaggggcgatgcattcgttatggagcgatacgaaacagatcgttttatggaacaatagattcattctgtatcaacgaaatagttgccccttttctaagtcgattccttaaacgctcagtcgatctgaagattatcgattcagttaacagcaataagtttgatgaaagaactaaggacgagaaagtaatcgaagcacttaaaacaggtaaactgccaatcaatatgctctgcagcgcggccgtgctgatactcgaccgagtagaagccgccaagttgtatgttaaagcgcgttacaaaagcgtctatgtcgacgagtatcaggactgtggaagctcacagcatcggttaataatgtggctggcatcgatggggttaaaaacagtcgttgttggagacctcgatcaggcaatttttggttgggctaataaaagtccagagtatttgagcaatctaatcagttcaactgactttaggcacttcgctcttaccagaaatcatcgctgccacccaagtatcattaactactctctccggcttataggacacactgacaatttacttactaccgacgaattgcgcgtgattagagctcgaattatgcctctcaattcgccgcactctagaaatttagtaggtactgacgaatcatcgatagctcaggcaattgaaagattccttcctaatatcaagaataagtacaaagtccaaaaatatagtgactttgctattcttgcacgatccaatgccacattagttcgatttcaagaggcgctaactgttccatctaaacgtcacgcagacagcgtgctcgacagaggtatcagcaaatggagacgggtgttcattatgttacttgagatgtacttttcgcccaacagatttgtcgacagttttctcgacgattactccaacctctattctaaacctagcacacgcgccaaaacaaagctgcttgtattaaagtacttatctctcgcacctgggaaactgtgcgaggaaacgagtctcgctgtcgaaatagctaagcgttgcgagccgcgagggttcaatggcgaagatattgaggcatatcagaaagtagtgtcagattcgagcgttacagcaatgtattatcgggcccccgaaggacaacgaagtcaacctattaacatatcataa

SEQ ID NO: 72530 - DNA, 1998 bp, Bradyrhizobium sp. ORS 375
atgaggcttgagcgcatttgcattagaaattttcgattgttgcgacgattctcgattgacttggctaggaataagacgacgacggtgctcgtcggaccgaacaacagcggtaagacctcggtcatggaggccctgcaactatttgtaggagctggcggggagcctagacgaagattttccatccatgacttcgcgcatgtccggcggaaagacttcgcgcatatagagtccaagctgactgcgataggaagtgaggaggatgcaataaaattgctccgccggttcgccccaagcatcaggatggagctaaaattccgctatgcggatgaaacggcagatttagtcgttgcgaacgagttgctcatgtcccttgaagtcaccagtgacgtgatagctgtccgtatcgaatacgcaatcgataatgcaagaggtctgtgggttgacttcaaggcccgcactgacaagacgcagacgctcttcgagtttctggccggaaaccttcaactctattacaaagtcaagacttacaagatctccgaagatggttcaaaggcgcaggcgctcgatagcaacgaggtgctcaatcggcttattaagatcgatacaatctcagcgcagcggcatctcgatgatgaggaggcaaccggcgctgcaaagctgtcgcggctcctgcatgatcactacaaccgctattataaggtggagcatgccgaaggcgccaaagacatcgaagatgctatcaagagtagctccgaaactctcaccggaaagtacgtcggggcttttggacggcttacagggcggctcaaaaccttcggctatccccaggggcacgcatcacctgatctgttgatcaaagctgaaatgaccgcagagaaaatctatcgggatagcacacgaatctattacgcgagcgagcatacttctatcgggggtgtcgtcacgaagtacgagcttccggagaagtacaatggcttaggctacaagaatctaattttcattgtgctccaattggaatcgttccgagcggctctcgagtctatgcctaaggataagccgcgggtccatatcatcgccttggaggagcctgaagctcaccttcatccacaaatgcagagtgtcttcattagagagatatcaagggcgcttgagcacaccgacggcgttaccgcgcaggtcattctttctacgcactcgtctcatatggtgtcggggtcggattttgatcctatccgctacttcaagcgcaagggacatgaggtttccgtaaaggatttgtcggcgttgccgctcggtaaggatgatggtaccgtcttaaatttcctgcggcgctacatgaagagcacgcattgcgaactctttttcgcggataaggctatatttgtcgaaggtcaggtcgaacgcttgttgctgccgctgatgatcgagaaatttgcaagtaagaaagctgggtcgtttttggcaagccagtacataagcatttccgaagtgggcggcgcctatgcgcatattttcaagcctctgatcgattttctcggcgtaccgacgctcctgattactgacttggactctgtagatgacgatggaaagaaatgcccggttgcggacggaaaaagtaccagcaatgcagcattgaaaagttggctgccgggcaaaagcgtgttgacggacctaatgtcatgtgatgcgcccgctaaaacggaagggcgcgttcaagtatcatatcaggtagaggagaatggaagttgtggtcgctcctttgaagaggcgtttgtctatgctaacgttgactggttgaagagcaaccatactagcttgctcgcgtcgggcaagctattcgacgaagtcgcaaccaaggatttggtggcgagtgcataccagctgtgtgcccgactgcctaaggtagattttgcgctggacttggttgctcacggaggctgggatattcctaaatacatctccgatggccttgaatggctggcgcagcaggggtcttga

SEQ ID NO: 72531 - DNA, 1689 bp, Bradyrhizobium sp. ORS 375
atgaagaccactgaggctgatgaaaagatcgaaaggtgcgttgaggaacgcaagagtttcttgctcgacgcgggtgcgggatctggcaagaccgcatctcttatccggaccttgaaccaaattcgtggtagtcagcggcgccgattggttgctaattcacagaacgtcgcctgtattacgttcactaatgtcgcgaagaacgaaattatcgagagaacggagggggacgatcttttcaaggtgtctacgatccacgacttcctctggaattcgataaagccgtttcagaatgaattgaaggtggcggtcgagcttgttaatgagcggctacccgccaaaagtaagcgcagaaaagatccggccgaattgaaagcggctttggcagaggttcaaggaatctcgtactcggatcgcggcggaaattttcttgaaggacgcatctttcacgatgatcttctggaagtagcgcaggttatgttcaaaacatatcccatgctgtcgcgactcgtcgcagcaaaatatccgtacatcttcgtggacgagtatcaggacacgaacgaaaaggttatttcttcattgctcgactgcattttggttacgaagagtcccccggtaataggcttctttggcgacaagatgcagagcatctactccgatggcgtcggcgagttgtctgaggggtatttggcaaagctggagcttatacaaaaggaagaaaacttccgttgcgcaacgacggttatcgacgttctcaacggaatacgctccgatatcaagcaaaagccagcgggtcagaatccggttggatcggccatctatctcaacctccatcgggccaacgccgacgaagttgtcgacgtcgctaaagccttggtccgtgaaaagttttcgtggcagtttgctgatcgcgatctccgcgtgctctttctgacgcaccggctgatcgcgcgtaaggcaggatacgaaaatctatttgctgcatacaaccagcgggggggcttctcgcaggagcagttccagaccggggaagatgctaatggaaaatttctatgtaatgagatcgatggattggtgacggcctggaagagtgatgacgccggtactgtaatatctttgcttcatcgcaatcagcgggtggttgcttcgaagaaggataagaagcgggtcaaagaagcgctagataaactcgcggcgttggtggttgccaacgcgagtatcggcgatgtactgaagtatgtacgcgatgtcgaccttctgccgcttattgaccaactcaattactggctcaatcctgaagtatgtggcaacatcgctaatgaccctgagtccgaaagggatcgcacgtttttcaaggctctgttttcagtgccatttagggagatttcggcttatcgcgcagtattggaacgaaaccttccttattctaccaagcacggcgtgaagggcgacgagtttgatactgttatggtcgttcttgatgatgtcggagctaactggagccaatactcgttcggaaatctgctagcgggcagcgatttaagcgaggcgcgccttcaaagaacccgaaatttgttctacgtgagttgctctcgagcaagacgcaatttagctgtagtcgacttggcggccccgggagccagcataagtaagatccagaagctgttcggtaaggacaattgcgtcttttga

SEQ ID NO: 72532 - DNA, 2199 bp, Pseudoalteromonas sp. BSi20652
atgtatttacagtctctacaaattactaattttagaaaatttggcactaagaacaatataatcgaatttgtccaatcagattataaaaaagccactgaaagcaaacctgatgaatctacctctcaaagctttgttgcttgtgccacaaccctaattattggtaaaaataacgcaggaaaaacaacggtaaccaaagccttaaagcaggttatcgataatgacaatatattaggcgcttcttttaatctgagttatctaaatggattattcgacaaatacaagaaagtactttttggtctgaataaagacaattttctcgatttccgaaaagacgaattcaataaagtagagctgccaaacatgaaatttaggttgaaagttggtttagatacagatcctaaatctacatcgactcaaaacttaagcaaccttatttcgatcgaagacaatacgattaataagcttataactctagaggttaagtttattatcgctgagtctgagcagtataaggaaagggtatacaagaccttttgtagcgcagcaaaaagagagcatgaagttaaatttagtgagtttctaagaataatagataatactaatttttctaggcagatctacgatatcaaaggaagattaataaaaaactctttatttaacataaacaatctattcgaacttacaactataaaagctaatttggatgatggtgagacatcactatcatctgttttcaataaaatagttcagtatagattaaaggatgaagaaggtgatagtcgtgttcgactagaaaatgaaatattaaatattaacgatttcatggatagacacataggggaatctcacaatgatattgttaataatgtcgttagccagataacagaccaacaaaatatgctagttcatttaagatccagtttagattttaaatctttatttaataagcttattagatatgagtttgaagaaaacaataactatatacccgaaaatcaattcgggcttggttattcaaaccttatgaaaatacttggccaaataattgattatgtagaacagtatgaagaaagcgaagctcacgataaagtaaatattatatgtatagaagaaccagaaaactttatgcatcctcaaatgcaggaattattcataaaaaacattgacgatgctcttaatttattattaggaaatcacaacagtaaaaatattaatagccaattaataataacaactcactcatcacatatcgtaaacagtaaaatccatagcagtaacacattcaacaacataaactatataaccacagatgaagataatttcagtaatgtagttacattaaatgataaaaaaatcactgataaaatagcaccggaaagcactgaagaagccactgcaaaagatgaattaaagtttttaaagaagcacattaaatataaagtatcagaacttttcttttctgatgcgatagttttagtcgaaggagttactgaagagcatttaattcagcattaccttagtgaatctaaaaatttacaaaaatatgggatttcaatatttaatattaatggtgcttttgctcacatatataaaccacttatagatttattgaaaatcccatgcttagtaatcactgatctcgatatcaaaagaagtaaggccgataaagaaaatttcaaacaaattgataaactagataaccgcgaaacaactaatgcagttttgcagaaatatgtttgtattgaaaagttacccgatgaagagccatcagatgaagatgaatcaaaaagtataatacttccaagtgactcaccttattactgcattgacaattttatgatcgttttccaaaaggatgcaatcaatggctttgttgcttcaagctttgaagaagcctatattctcacaaactatgaacataaaactcttaataaaacactaaaagagttaaaaccaagaatatataaaagaattgttggagcctcaggtctagaaaacactaaccaatccaaggaaaagtcttttgagtggcaatgcaagctagcttcaagtaaaagtgattttgcaaatacactcctctacgaaataattacatcaaatattaatgctccacaactacctaaatatattgaagatggtttagattggctaactaaaaaattgaataatgataaatctctccaaaataaaggagtttag

SEQ ID NO: 72533 - DNA, 2010 bp, Pseudoalteromonas sp. BSi20652
atgttgaaaattaaagaaaaccctgaaaaattaattgaggaaatgaaagtacaagagttgcttaacaatgctatagataataacaaaagctttgttttcaatgctggagctggctcaggaaaaacttacgcattaattgaaagcttaaaatatatagtcaaacattatggggagaagctatcaaaccaaaataaacatgttttatgcatcacctttactaacgcagctgcggataatatcaaatcaaaatttggaaacagtgacatagtaaaagtatcaactattcacgagcgagtttgggagctaattcatttacagcaagatgcattactcattgaacatgagataaaaataaataaaaagttagttacattaaaggagtcttttgaaaatagcccagatgaagagtggctaaacagtggtgataaagaaagatttaatggttactttcttttagatgaagcaaaaaacactttctataactctactaatcatactactgattttggaagcatccttgaagattttggttatacgctaaaccgtaacttaggcaaatttaagaaagccgtaaaatatttacatgataccgataaaattcaaaaatgccttaatagaatcaaatcaggtgaaaataaagaagttagatataaccctaattttaacagtgatagacttcactacatgttgattagccataatactctattagaatatggacttgaattatgcaaaaagtatccaacacttcgccgaataattgttgattcatacccatatgtattaattgatgaatatcaagatactcataaacatgttattcaatttatgtatgaattaattaaagatacagaattatctcataaatttttacttggatattacggggatgtaatgcaaagcatttattcggagggtatttcaaattccctaaatgaatatcaccccaatttattaaaaatagaaaaaaagtataaccgtagatcgcgaaatgaaatcataaatatatccaacaagcttcgtaatgatgagatatctcaagagagtatttatgaaaataatgacggcggttctttttcttttcataaattaataagcgaaagaccaaacgattcctctattctagtaaaaagattcatagaaagtgaactttcaagtttaaatgaggacgtcgtccactgcttagtgcttaaaaatgaaatgcttgctgagttaagtggttttaagaatcttttcaattgctttaaagcttttttcttttttaatgaacaagcacaaaaagtattaagtagagatttaactaagctagatacttcaattcgtacaattctagcactcattgaatttagagaattgatagcaaaacctcagaagacacttgaagatatactcccaaaagaaaaaaatcctgtatcgatgtttgatgctcataactatctaaacgagttgaacatattaatagacgagaaaattaatactttcgaagattatttagttgcgctattccaactttatgactctggttcttatcttttcaaatgcaaattgaaagacttttttccatctgatgattttggatattcacttgaggggtttaaacagttgctaaataatgacctaccaaaaagcgactcaattaaagaagaaaaccgtattaaccaaattaatatagcaataagtacttctcttaacgaattcactaaatggtacgaattcattactgaatctagcagcgaacctgttagatttaacacttaccatagtactaaagggttagagtatagcaacgtagtcattattatggagaattcatttagtagagacagatcatattttcctaacttttttaaagatcctcagaacatagactttcaagaacgccgaaatttgctatatgtagcttgctcaagagccattgataacatgaggatattatatattgatcctattgactcgtttcgagaagaagcttcgttattgtttggggaagcaaagagatttgtcttatag

SEQ ID NO: 72534 - DNA, 2082 bp, Elizabethkingia anophelis Ag1
atgtacattgcaaatataaagctcataaattttaggaattttgaaaattcgaatattgaattcaacgacggtgtaaatgtaattatcggccataataatgctggtaaatcaaatttacttaatgctctatcgctagtcctagataatcaaaaatccaaaaaattagacattgatgacttttataaacttatatcaattgatgagcttaaggaagcgccacctaaaatatccatagagctaactttaagaaaaggtgaatatgaaacttctgatgacctcgttaccatttcaacctggctaaccaaactagacgaaaattacgaggccaaattaacatacgaattctttttgccagaaaagcatcaagaaacctataagaagcagattaaagatttaccagaaggatcaaatcaaaggcaggatatttgggattgtataaaacacaattttctgcgcctatatgtaaataagatctgggccgggaatatagtaaaccaagcaaccgcagattcagaggctttacaaaaatttgactttcaattcctggatgcgatcagagatgtccaacgggatatgctgaccggcaaaaatactttgcttagagatgttttagatttctttatggattacgacataaaaagcgatccggcaaaaactgatgaacaaaaatatactgaaataaaagatcgaaaaaatgctttctcaaaaaaagctcaggaattaattttagatttagacaaaagaattgaggcgggaaagagagaaattctttcatacgcaaaagacacaggagcttcctttaataatgcaacgccaaactttgagggtagtatttcagaatcagaattatatagtgttcttaagttaattgttgaatatgaaacaggcataaaaattcctgcaactcgaaatggtttaggttacaacaatctaattttcatgtccttgctacttgcaaaaatgcaggtaaacagtgatgcagcttatttagatagtaacgcaaaagtattctcactattggctattgaagaaccagaagcacatttgcatcctgcaatgcaatacaaattccttaagtttttagatcaaaacaaaaacagacgcaaagtaagacaagtgtttgtaaccagtcattccacaaatatcacctccgctgtaacccttaatgaaattatttgtttacacactgataaagatggaaaaactattgtaggatatccatccaaaacttttgttgccgacgatggtggctttattgaagaaagcaaaaaatatgttgaaagatttttagacgccagtcgatctgacatgctctttggccaaaaggttttatttgtggaaggcttagccgagcagctattaatgtcggttttagcaaactatcaagattcttcaatcgaagatcaccatataagcatcattaatattggaggaagatactttaaacactttctttatgtatttaatgccaacagagattacacgattggaaaaaaaatagtctgcttaactgatcgcgatcctgaaagaaaaaacaaaacaataaagaatggaagttataagggatgttatccatatgaattcaacattgacacagtgacgtacgattacaaacaaaacttattctgtgaggactataagcctggtagccatcccaatattacagtatatacccaagatcaaaaattaggtaaaactttcgagtatgatctcgcatttcataatccgtctttaaagcttttgcttacagattccatacaaaataaacaagagcttgaaatactaatggatctatacgataaagaagaatcaacattggaagatttttttacgatattaagagatagttcagaaaatgaaagaattatagaaagtattcaacttaatacaacattcaacctagatgaaaaaaagagatcaataatagcctcccgatatctaaattcaattggcaaaggtgaaaatgctttagaactagcaatagttttaaaggaaaacctaaagcaaaaaggaacagacgattataaagagattgtattaccggagtatattaaacaagctataactgaattatgcaattag

SEQ ID NO: 72535 - DNA, 1680 bp, Elizabethkingia anophelis Ag1
atgcaattagaaattttgtcagacaccttaattgacactaaccaccattttaaagtctcggctggtcctggagccgggaaaacgttttggatcgtttcccatattaaaaatgtaattcaaaattcgactatattgacttcggcaaagaagatcctttgcattacatataccaatactgctgccgaaacaattcaaagtagacttggcacttcttcacttcaagtagaagtcttgactattcacagttttctttacactcatataatcaaaccttatttgtcctttatttcagatgaatacgattttgatgtaagtaaactaaatgggcatgatgacacaattctatccaattatcaatttttacaggaatggaaagaaaaaacaggccaaaagagaattaaggaagacgaccaaatactaacagcttttcaaaaaatgcgatggagattcgataataatgatcttattgtaaaaccagactacccgataaaaataaatggatactcaataaaaaatgattcttatttcgagtataagaaaatggcatggaaaaaaggagttcttcatcatgatgatgtgctatttttttcattgcaaattttaaaaaaattccctttcgtttcgaaaataatttcctcaaagtttccatacatatttattgatgaatttcaggacagcaatcccatacagatttcaatagttaaaaaacttgcaaggttatcaactgtaggggtgattggcgatgtagcacaatcaatatatgagtttcaaggcgcagagccaggacaatttcaaacctttaatttagtcaacaataaaaactattacttaaaccataatagaagaagctcaaatgaaatcattgatttccttaacaaaataagaaatgattttaaacagcaatatcatagaaacatatcttttcctaaacctattttatttgttggcgatatggttaaggctctaaagcaggccaaaataaactgtcctggagaggatatccatacgttgtcatgggataaccttacatcaaatgcaatgaaggcagagattaatggctccacattagataaagaacttttaaacaatcttagacaaattgactcaaatttccatagaggaaatttaatcttccattgtataaatgcaatagcgcttgcgaaagaggcaaaatttaaggaagccatcaatattctggaaaagtacctaacatataaaaatgacaaatttgggggtagaaaaaaggcactacggtacttaactatactactcaaaaactttgataaatataaaggaggtacccttttagaattatccaacttcgtaagggagaatttagatgatcaattgactaaagtcacatcggggaaagtcaaaaccttttatgaatcatattcatttcaaagcctccttttatgtgtcaatattgcagaagacaacagtttaaacagaacgattcacaaagctaaaggagcagaatttacaaatgtactcctcatcataaaagatcaaaagggtcttgaattcatttataatccagatttagccaacaaagaagagcatcgactatactatgttgcggtaagcagggcacagaataggctatttatttgcgtaccgaccttagacacagaaatagaaactcttttgcaggatattatttcaattcaaaaagtatga

SEQ ID NO: 72536 - DNA, 2148 bp, Vibrio fischeri SR5
atgcatcttaaagcattaaaaattaaaaacttccgtcgattaaagaatgttactgttgagttagataaagaattatcaatatttgtaggcgctaataatagtgggaaaacatctactggtcatgcactgcaattatttacttctgcacttaaaaacaagttttctgtacatgattttcatattgattgttgggacgaccgtaatatagatggtgacattattgaagtatccccccctgttatatctttagatatttggtttgaaataactgaaaatgacttacataaagttattgaaattttaccaaacctacagtgggagggaagtcttgtaggggtgaggatcgaatttgctcctattgatattttagctttaattgtgcgttatcaagaggcattaagtaaggctaatgaaaacattagacgtgacagcgatgatgaaataactttccatcctaaacctaggaacttaattgaatacattgaggctaatctacatagtgaatatgaacttaaatattttgttttagatagctctaaatttgaaaagtttaatgaaatagcttcttatactccagcaaaaatcaactcagataaaggtaaaagtggtaaagacattattaactctttgattaaagttgattatttacatgctcagagacatttatcagataacgttgaagggggaagaactgaagagttatcaaagcgcttaagtcgtttttatgatcgtaatcttgataagataggtgatgattatgatgcactggaagcactatctacatcagaaaaacggctaaatgaacatcttgaccgtgtattttcacctacattatcaaagttgtctcagttgggttatccgggactttcaaatcatcggttattgataaaatcatcattgaatccagctgctgtattatcaaataatgatggtgctagcgtttattattcccctaatggctctgaagacagaaatggtccgatattgccagacaagtacaatggattaggttataaaaacttaatttatatggtcatagaattactagatgtacatacgcaatggttgaatattgaagataatagacctcctatccatctgatatttattgaagaaccagaagctcatttgcatgctcaactacagcaagtatttattcggaaagttctggatattttatctattgatgaaagccttttaagtttacaaacacaattggttgttactactcactctacccatattctttatgaaagagggtttatgccaattcgatactttaaacgagatctattggacaatacaactaaggtattaaacttaagtgagttttctgatagttttgaagaagatgaaagacctacacgtgattttttacaaaaatatttaaagttaactcattgtgatcttttttttgcagatgccgctatttttgttgagggtaatgtagaaaggcttctactacccgaaatgatcgaaaattcaaaccctagtcttaaatcttgttatctaacaatattagaaattggtggggcgtacggtcataaatttaagcctcttattgaatttcttgggctcacaaccttaattattacagatatagatagtgtcactggtaatagtgatatagaagtagaagatgaagtagaagatgacgattctcctagtggtcaagcctgtatggtagaaactgataattcaataacttcaaatcagatgcttataaagtggttaccaggactaaatacaatatctgagttattacaaacaaacgatgatgaaaaagttagtgaagatggattagttagggtggcttatcaaactgcaaaagaagtaacttggggtcttgaaactgggtcttttacgggaagaactcttgaggttgcttttgctttggacaatttagattggtgtcaggataacgaacagaaaagtataaagttaagaattcctaggaataatgaaaagagcttagaagtcctcatagaaaaaattcataatagagtgaaaggttctaaatttgataaaacaggatttgcacttgaattattgatgaaagaaaactcggagtggaatgttcctagttatattaaagaaggtcttgattggcttgaaagtaagcttgaaattgttgaggttgaagtatga

SEQ ID NO: 72537 - DNA, 1866 bp, Vibrio fischeri SR5
atgagtcgaagaattgattctcctgatactgagtcggatgcgagcttaaagcttttgttggaacagcaagaaaaagcagcatttattatggttgcgggtgctggttcaggaaaaaccacatcattaataaaagctctggattatttaaaaaatgagtatgggagtgactatcgctctcaatgtaagaagattgcttgtattacttatactgaggttgctgtaaaggaaatattagaagatctaggcgaatcggagttatttcatatctcgactatccatagttttttgtgggctgtaataaggccttttaaaacagatgttgttaattggatggttcgtgaaattaatgaaaaaatcattaaagctcaagatcgtatagatgcacctagaacaagagagacaacaagagttaagctcagattagatattgatagatatcgttctcaaatcccaatagtagaatgtgttgaagaaattagctatgggactggaggcaattttactgaaggtattctagggcatagtgatatattaaaacttgtacctcaaatgatcattgataacgtgcttttacaaaaaataattgcgcgtaaatatcccgtaattttaattgatgaaagccaagatacaaaacctgcttttgttgatgcattgaaagctatatatgaaacagcagagacctctttttgtttaggtttttttggtgatcctatgcaaaaaatatacatggaaggcgtaggtccaattaatcgtgaatctggatgggagctcattgaaaaagaagaaaattttaggtgtccccgaagtgtgttacaagtaattaataacattcgacgtgaagataatgatctccagcaaacaagagggcgtatgattcagactcctgaaggctttgaaagtgtagaaggtagtgtgaatgtctttatatttcaacagtcagaagataatagtactgaaataggtcgtgtcagagaatggctaagcgaatctaggcaggaccctttgtgggacgaggacggtgggaatatacgtatgctaattctagttcatagaatggctgcgcttcgattaaacttcaactcaatatattctgctttaaatgacaatggtactactagtctaaaaaatggtttacttgatggaacttcatgggtactgctagattttttaaaaactattcttccaattgtagatgcaaagcttagaggagatgattttgaggtgatatctcttctcaggaagaaatcctctttattttcacaagcaagactttatggattggatatttctgaggtcttgaataggctggtcgaagatgttgaatatttagtatcaacaatgtcttcggaagaagggtcgattagagatttattagtgcatttacatgctagaaatacaattgaccttgatcagcgttatatcccatatttaaccaataatattgaagaagataatgaacaagaacgtgctgctgttcaggcttttttaaactgtccaacaaacgaaatattacagtacaaaaaatatattgaggaagtttcacctttcgtgacacagcaaggcgtgaaaggagctcaatttgaaagagttttgttagttattaatgatgatgagggaaaccaaaatacattttcatatgggaaattgttagggtataccaatttatcagatagggataatacgaatattgaaagtggtaaagagtcagtaattgaacgtacaagaagattattatatgtttgttgctcaagagcagagaaggatcttgcaatagttatttttgtacccgatgttcaacaagcttatgatgcagtgttagctacaggttattttgaggaggactctatacatacttctcttgattga

SEQ ID NO: 72538 - DNA, 2139 bp, Pseudomonas extremaustralis 14-3 substr. 14-3b
atgcacatatcgaaactgtcggtagtcaactaccgcaactttgccaatacgacactcgtgctcagcaaaggcgttaacacgatcattggcgagaatggatctggtaagaccaatctctttcgcgctatacgcctgctgctggatgacaacatggtccgcgcggcgttcaagctggatgagtcggactttcaccggggactcgagcagtggcggggccactggatcatcatcagcctggagttcgatgaaatagggcctgacgaggcaatccaggcgctattcctgcatggcgctggggttataggggatgctgccgttggccgggcaacctacaaccttatctttcggccgaagaaagaagtgcgcctaaagctggcaagtctggatgatggcgatttggccggattggccgctatccgacaggccataactattgctgactatgagacactcttcactggcaggagcgaggctaacttcggtaacgaggtagtctacaagagtcttgtgggcgactttgataactgcgtattcagtggggaggttgacgatcctcgaattggatcgcgtttgcctgtgttcttgtcggtgagtcaggaggtctcctttaccttcattcaggctctccgcgacgtcgtcgccgagttccacaacaatcggacgaacccactactcacactgctcaagagcaagagcggtgagatagcacccgccacaatggcgccgatagtggcgcaagtgctggcgttgaacaattcgattgaggcacttgaggacgtgcaaacggtccggacggacattcgcgacacgatcaaagatgcggcaggggagacctactctccgagttcgctgtcgatcaaatccgatctttcggacgaagcggacaagctctttcagtcgctcaagctctttgtcggtgagtcggccgagggctacgaaggcgggattcacgaactgagcctggggggcgcaaacctcatatttctgacgctgaagctgcttgagttcaagtatcagaaggcgcaccaatccatagcgaactttctcgtcatcgaggagccggaagcacatatccacacccacatccaaaagacgctctttgaccgcattgcctacgacgacactcagatcatctattcaacgcattcaacgcatatctctgaggtcagcagcgtccagaacgtgaacattcttggtcgtcgcggcgttgcatgcgaggcctatcagccggcaacaggcctgtcgcctagcgagatcgggaatattcagcgctatctcgacgccgttcgtagcaacctactgtttgccaaaagcgttgtcctagttgagggtgacgcagaggaaatcctaatcccgattctgttcaagaaagttgtcggcctaagcttggatgagctcggagtcagtttgatcaacattcgcagtacgggtttccagaacgtagcggtcctcttccacgacacgagaatcaggaagcgctgcagcatcatcaccgacctggacgcagcgattgtggacacgacccccattcccggcgagccagaagctgaagcaaagttcaaagcgaaatgcctagcatcacaagtggttggtgctgcacgcaaggttgcgctcgatgcgttcgcgaatggcaacgattggctctcggtgcactacgcagaccacacgctggaggtcgacttcatttcagccggcaatggacgtcaaatggcttcgattgtaccgcttgtctatacgcaagcggccactaaggcgaccgccattgcggagcttatgtcgggggacaaggcacagtacggcaggcgagtgcttacgatggcggcgaatcagggcaaaggctggttcgcgattcttcttggcgagcacatcaatcacaagacggtccttcccgggtacataagtaaggccatcttctttgcgcgggagagcttgaccgtggagctcttcttcaatatctacagctacagagtcaagtgcgcgctttcgggaggggacatcccgcaggctgtggcagatgttgcgacagcacggctcaacgcttataggcagggcacgcttgacctagtggcgctcaaggcagctatgggacctgcgctccgcaacgaccagattcacgccatcctggccgacgtggagtga

SEQ ID NO: 72539 - DNA, 1794 bp, Pseudomonas extremaustralis 14-3 substr. 14-3b
atgttcacctggacgagccgggagctgaacgccgagcagagcgaggcggtcctgctgcccggaagtgtgtttctggtggcatgtcctggcagcggaaagacgagggccctaacctacaagattgcatacgagctctcacgcctggagtcggacaggcaattcatcgttgccatcacctacacgcaccgggcggcggacgaaatccaggagcgcattgaagatctcggggtggatacgtcgcggctctggatcggcacgattcactctttctgcctggaatggatcatcaaaccatatggcatctatgcgcctgagcttgcgcccgggtaccgggtaatcgatcagcatgaacgagagaagttgctggagcggttatgcgcgccatacgcatctcaacgagtctctcactacgattgcgattatttcttcaccactgacggctactacctgggctgcccgaacgcgggaaagcacgcaatcattcatcgggttttggctgagtatttcaggattctggccgagaacaggcaaatagactttgagctgatcctgtggcatgccagccagctgatcgacctgaatccggcgatcagtgtgctgttgtcgaagctcttcgcactcattcttgtcgacgagtatcaggatacgaagcagattcagtacagtattttggggtcaattcttcgtgcgggggcaggcgcaacgcggcttttcatggtgggcgacccgaatcaggcaatctatggttcgttgggtggctacccgattgaaattggcgagctgaggaggctgaccgaagttcggattgctgagcagcagttgtcgcagaactatcggtcgtccagccgcatcatcgactatttcggcaatttcaatgtgtacagcacggcgatagcggctgcaggcgacgggcgcgtctacccgagccttgtttcgtacgacagtggggttacccgagatgatctggtacacgaaattgtcagactcattcggcacaacgttgagacgttaggaataccgccgagcgaggtttgcgtacttgctccgcagtggctccatttagcctctatgacccgacagcttgtcgtcaatatgcctgactaccagttcgatggtccaggtatggtgccgtttgccagagacatcgaaaacttctggtacaagctgtcgagacttgcccttacggagccgtcaccgtccctctatgttcgccggcttcgctgggcgggagaggtgatcagtgagatgaaggacgcaggcattgagacctcacgactatcgcgaaagtccttccttagggagtgcaatgcgattcccatcgacgaggacaacggtttggcctacctgcggcgcttctttgcaactttgttcgagcgacttggtattcagatcagcgatttcgcgcagttgcaggagcaccatcaagcgttcttcgaaagctctgaatcgcgcattgcgaagctcgaagcggaaggggttgacgcaattggggacattgctttcttcaggaaagtattccaaaaccgcacaggaatcaccgtgtctactattcatggtgtgaagggtgccgagtttgatgtcgttattgcgtatgcgctgctggaaggaatggtgccgcacttcaatgacgcggacggggatacgagcgcgcagaagctgctctacgtcgtgggctcgcgtgccagaaagaacctacatcttttttcggagaccggccgtaaaagggggagatacaacgtgtatgtgcccacgcgaatgctagcggcctgcgtattcaactacgacgacgtatga

SEQ ID NO: 72540 - DNA, 1827 bp, Lachnospiraceae bacterium 7_1_58FAA
ttgggagttcggttagctctcttaccaaaagatgtttctaatttatttaatgagtatcgagaagcgtactcttcagctcgcaccacagaacatgcaagggttgaaaaaagttctttcaatctcttcccaaaagacttgtgtgaatttcttgatagaaaattgactacatatttttctatcaaggcatttatccttgatccgtcacatttcgaagatgcccctgtacaaccaacatcctttgaggcagaatgtttaacagataacccactaaaggacatcgtaagggttgacatgattgacgcacaacgcggatttgcagatcctgacagttcagaaggaacagaaaaggttcggaaacagttatctgcccaaatgcgcaattattatgaaaaacatctagatccagaaaaggctccttctccagaagatttagatattttagaagctactgaaggcgcacgccaagtttttgataagacacttgcattaaaatttgctcctgcaataaaagaattagaagggttgggttatccgggtattagtgatcccaaacttacaataacaactaaagttatgactagcgaaacattaaaacacgattcagccgtacaatatgcgctcagtaaaaccgacaatactttgaaactaccagaaaagtataatgggttgggttatcaaaaccttatttcaatggtttttgatttgatgggttttagagatgactggatgcgtgaaggaaaagctaaagatactaataccgtaattgagccgatgcatttggtgctggtagaggaaccagaagctcacctccatattcaagtgcagcaagtttttatacgccaagcatataaagttttaactaaccataaatttctcaagcaaaacttgaattttacaacgcaattggtgatcagcacccattcgagccatattgctatagaaactacttttggaaatttaagatatttcaaacggctaccagaagggactgaatgcgcagtagcgacatccaaagtaattaacttatctgatgtatttggggattcagatcagaccaacaaatttgttacacgttatctgcaatcaacccattgtgatttgttttttgctgatgcagcaattctggtcgaaggtgtagccgaaagtatgctattaccacattttatacgctcaaagtttccagaactatatcagcggtatattacaattcttggggttaatggacgtcatgctcaccggttaagtcctctgattgaaaagttatgcctcccaacattggttattacagatttagatccagcagaaaaagaaggttatcacaaatctgtagttctcaagagaggagaaggccaaatcagtggaaactacgctattgcaaagtggctgatgaaagaaaaagacatcgacaagttggtagattattcagaagataaaaaggaattttcttttgcttctccgtatcgattttctattcgtttagcctatcaaactcctgtaaaagtggactttgaaggagaagaaaaagaggccatacctggaacttttgaagattgtcttatatatacaaattatgatcttttcaagaagataaaagtcactgattctgggaacttggttgaacaaacgcatgatttacttaactctaatgacacattcgaaatgatccatgaaaaaatttataaaatgctgcgtgcaggaaaatcagagcagaaggcagaattcgcattagacgtaatttttgaaattagtccagacgagctttcggttccaccatatattaaccaaggtttaatgtggctacaggactatttacatccggaggattaa

SEQ ID NO: 72541 - DNA, 1863 bp, Lachnospiraceae bacterium 7_1_58FAA
atggataaaataaaagaggtaaccgaagaattattagatgatcatgtagatgaccatgtagatgaagaaattcagagatgctttttaaaagaagatccaaaatgtttctttgtttttgcgggagctgggtcagggaaaactcgaagcttaataaaaaccttaactttcttggatgaaacactaggtgactggcttctaacgaatagaaaacagatagccgtaattacttacaccaatgcagcttgcgatgaaatatccaggcgattacattacaagtcgattttctcagtctcaactatacatagtttcttgtgggagcttattaaaaactatcagtcagatatcaaagcgtgggtaatcaattcgataaaccttgaaatcgcagaacttgaagaaaagcaaagaaaaagcaaaacgggaaaaacttcagaaaaacgagcagaggatatacgaaaaaagcaagagcgactagctaaaatcaatacggtaagaaggtttacctataatccaaatggagataatgtaggatatgattctctcaaccatagtgaagtagtaaaaatggggtcgaaatttatctgtgcagaagatactatgcagaacattttgatttcccaatatcctattctcctcattgatgaaagccaagatacaaaaaaagaactggtagatgccatttttaccgtatgcgaaaggcacaaaggaaagttcatagttggcatgtttggggatacaatgcaacgaatctatcaagatggcaaagaaaacctttctcagtgtatccctgatgactgggtaaagccccaaaaaatcatgaaccatcgcagtgcatctcgaatagttactttggcaaatgccataaggtttacagtcgatactcaacaacaacgccctcggtcagacgcagaggtgggaaatgtaaggttgtttatcgtttcttcagatgctaataaagaagtgacggagcagcgagttgcggaaatcatgtctgaagaaactggtgatggtgagtggcgtgacagtaaacaatataaaagtctcatactagaacaccatatggctgctagtcgctttggctttttagaactgtatttaccacttaatgaggttcctgtatttaacacatctttgcgagatgggtcaatttcagaactttcttttctgtcaaaagttatatctccgcttgttcaggcctataaaggcaataatgactttgaagtactaaaaatagtcaaagagtattctcctttaatggaaagcaagaaatggatttctcttgacgatcaaacaaaagcactgcagcaagtcgaaagtgctgtagataaattgatggaactatggaaagatgatgctattccaacttgcttggatgtcctccgctcaattcaagacacagggctatttaaactggatgaacgtgtagataacatattgtcatctcctgccgcagacgaatctataaggataacggctttaagaaaggctctatctgtcccatttaccactttagaaaaatattttgcatatgtctctgataatacgaggtttgcaacacatcagggtgttaaaggcttggaattcccaagagttatggttattatagatgacgcagaagcaaaaggatttctttttagttatgaaaaactttttggcgtcaaactaaaaacagaaactgatatcaagaatgaaagagagggtaaagacaatagtataacaaggacaacccgtctgttttatgttgcttgtactcgcgcacaaaaaagtttggctataattgcttatacatatgactgcgaagcagtgaaagcaactgccatgaaaaataattggtttgaagatgatgaaattcgtcttttggagtaa

SEQ ID NO: 72542 - DNA, 1968 bp, Fusobacterium nucleatum subsp. animalis F0419
atgtttttatcaaagttaaaactaaaaaattttagaaaatatgaaaacctagaagtttcttttaaagatggtttaaatgtgttgataggtgaaaatgatagtggaaaaacaactattattgatgctataagaattctattaggaacacaaagtcatgaatattattatatagatgaaaaagactttaataatccaaatgaagaaatggagatagaatgtacttttagctttaaagataatagttattcaaaagttgctaaatttttggagtggattacttttaatgatgaaaagaagccagaattaatagtgagattaaaagctattaaaaaagaacttaaaataaagagaactattacagctggtgaaatagatttagatactagatttgatttattagatgagttgagagtgacctatttaaaacctttaagggatgctaataatgaattaattgcaggaagaagttcgaggttatctcaaattttaaaaagtcatgaattattttataaaaaagaaaatgaacatccatttatagaatttgctaaagaatttaatgagaatatcaataaatatttttcagatgatgaaggaaaattaattctttcaaatattaataagcatttaggtgaatttttaggaaaagaaaaaaaagaagattatgaaactaatataaatatcacagaggataaacttgatacaatattaaatagtttaaatttaagtttaagtaaaaataaattagggttaggaactttaaatcaattatatatgtctttggagttactactttttgaaattgataaaaatactttaaatttatgcttaatagaggaattagaagcacatctacatcctcaagcacagttgagaacaattaaatatcttcaaaataattttgaaaagaatagtcaaataattttgacaacacatagtgttaatttagcatcatcattaaaattagaaaatttaattttatgtaaaaataagaatgtttatcctttaggaaaagattacactcaacttgaagaagaaaattatatttttttagaaatgtttttagatgcaacaaaagcaaatttattttttgcaaaaggggttatttttgttgaaggaagtgcagaaaatttattagtcccagcaatagctgaaattatagaaagaccacttgacaaatatggggtgtctattgtaaatgtgtctagtacagcttttaacagttattctaagatttttttaagaaaaaatgaagatgaaataatagatatacctattgcaataattacagatttagatataaaagataattctgaaacaaaagttattaagttgactgaggagagaataagggagatagaagataattttgaatatggtaaaggaacttttataagcttaaaagataaattttatttaaatgtatatgatttaaaaaaagatataagaaaaataaaaaatcttaaaaaactgccagatggtttgggagagataatagaaaatttttctatggaagagatcgttatagaagagtatagagatttaataagaaaaagaaaaacagaagactatgagaatggaaaaataaaggtttttataaatttatgtcaaactttagaatatgatttagcaattggggagttggcttattatttatacaatgctattttattaagtaaaaatgaagaagaaatatcaaaagagaaatttgaagaggaatttgaaagtaaatcagagaaagaaaaggtaaaggaaatttttaaagataatttttatactaattatgatgaaaataaaaaaagtaaattatctaaggcagaagtagctttaaatttgtctcatttattaaaagaaaatatagaagaaacaagaaaaatattacttagggacagatattgtgaatatataataaaggcaatagaatatgttacagaacctattaccactaaaggaagtaatgaaaatgattga

SEQ ID NO: 72543 - DNA, 1824 bp, Fusobacterium nucleatum subsp. animalis F0419
atgattgattataaaaaagaatttgagataaatgatgatgaaatagaaaaagtttatgaaattctatttaataaagagggaaattttgaagaagaaaaacaaaaaattataaaatcatttgagagttgttgtattgaggcagtaccaggaagtggaaagacaacaacattagtagctaagttaatgatattagcagaaaaattaaacaaaggaaactatgagaaaggcatttgtattttaacacatactaatattggaatagatattattaaagaaaaattaggaatgaaaggagatgtcctttttagatatcctaattttgttggaacattacaaagttttatagataattatttagctattccttgttataaaaagaaatatagaagaaaagtagatataattgataatgatatggctaataattttaatttaaaccttttaagaaatatgcctttacgaatatttttagagaagcaacacatagatatagaaaaactctattataattttaatgatgaatatttttatatagaagaaaaagcaatattaaagagtaaggatagcaacacttataaatctttattttcaagaattgaaaataatatattaagatatgaagaagcaatacaacttgggaaaatttatgtaaatgaatatcctaacttaaaagaatattttagtgagagatttttcctagttctagttgatgaaatgcaagatacaactcaagatgcttttgaaattttagaaaatctttttgataaagaaaaagtaatagttcaatatataggagatagaaatcagaatttatataatggaactgataaatggtatttaagttcaaaagaaaatccaaaattaaatattagtaatagatttggaaaaaatatagcaaattttttaaattatataagagaaaattcacaagataatctaatagagggaaatcctagtattaaggactataaaccaattttatttttatatgattctttggataaaaatgaagaaggaggaaataatataatttttgataaatttattgaaattataaaagaaaaaggattagatgaaaaaaagggaaactttaaagttataggtcatgtagggatttttaaaaaaggaaaagttacagtatccagttattttaaagattttttaaaaaatgaaaagatattttctttaaataaaataataaagaaaaattctaaatcacaaccagaaaataaaaaaattattaaagaattaaaaagcaaaatagaattatttttaaaaaaagaaaataaagaagaattaaaagaaaaatttgatgaatttataaaaatagaagaaaatagaatagattttaatagaattatctataattatttactattagacaaagatgaagaaaaatttatagacaatttattttattttttagaaagaatattgaaagaaagtttaaaaaaagaaaaattcaatgagatttttaaaataaaagaagttgaaaataaaaataatgataataatgaaatgaatacctatattaaagacaatatcaaattagaaattaatactgttcatggagtaaaaggagaaactcatttagcaactctttatttagatactttttggtataaatatgatattagcgattatttatttgaactattatcatcaaaattaactgatgaacaaaaaaaaggaattcaaaatacacaaagaaatagaaatatatttgttggagctagtcgccctaaacacttactgtgttttgcttgtaaaaaaattgatatttcagataaaattaaagatatatttgaaataatagagatttaa

SEQ ID NO: 72544 - DNA, 2037 bp, Desulfitobacterium dichloroeliminans LMG P-21439
atgaataatcaaccatacatctgcaaggtccatatcgaaaatttcagaaattttcgccgtgctgaattctggctcaacgaaaaacaagttgtcattggtgaaaatgcggttggaaaaagcaacctgttatatgcgttgcagttaatacttgacccgacgctctctgacaaagaccgtatgcttgaggaatccgatttttgggaaggtttggatgacccaatgacaaatggggagcagattcttattgagctttggttcgcaaactttgaaggaaacaagaatgtgcttgcacaattgaccgatgcaaccgtaatgcttgatgagaaagaagcactaaagcttacatacaaattctatccctatcgaaaagttggcgaaacaaacgagtatagctttattatttttaaaggtgatgacgaaaaccgccgattctcctatgacgataggaaattcctgaacattcgtgttatcaaggcaattcgtgatgttgaatccgagatgcgtaattcgaaaacatcaccgttgacgcagatcatcaagcagaaatatacaataagcaaggacgtgcttgccgaaatttctcacgcacttgaagaaaaaggtgcagatactcttaaaataggtcaagttgaagatcttgaatcgcgaattcagaagttgctcaatcaaatggtgtcgtttagccaagatcaatttggtgtttctttaaaaacgataaatattgacgcgactaagcttctttatgctttgcgcccattgattgataaccgggaatcaggaaacaccagtcttggaataaacaatctactctatatagctcttattcttctgttgattgaggatgaaacgataaagacatatctaccaaaagagctttatgaagaattaattgaaaaggacgaaagcgatcttatcgagagttgttattctgaggtggaagaaatcaatgggtacgctttgaatgataacgtattgactaattgtgagaaaagggacgagctctacgatttcatgtctgaaactattccgacagcaaatggcgtaaccattcttgcggttgaagaaccagaggcgcatctacacccaatatatcaacgattgctttatcgtcatgtgatgaataggtcaagcgcctccgtcattattacaacgcattcaacacatatttcatccgtcgcgccgatcacctcaatagttcatttgatctctaaaagaaatagtactagcgtaaagacaacagctcggctcgagcttgatgattctgatttttctgatttagaaagatatatagacgttaagcgtggagaaatatatttggccaaaggcgtcatttttgtcgaaggtgtttcagaggaatatctgattcccagttttgcaaaggctatgggttatgagatagaccgtttgggcattgtggtttgtaatgtcaattcaacaaattttgaaccatatcgtcaatttgctgaatcattaggcgtgccatatattatcgtgacggatggagattattaccaccgggttgaagggaaaattaagtacggggatttggcctcggaagatgatgtcggatacgggtatgccggtattgatcgctcaacaaaattctcgggcattgccgacataatagaggcttatgtggcttcggaatacgaagaaggaataacctttgatgatttggaaattgaagatcagattgagttctttcaaatcagaggaatcttcatcggaatgcatacttttgaagttgatattttctgccaatgcggatctgcaaccacaacagagggacagattatatgtcgtgtttttgatgaattaacagcaggaggactgcagcagaagcagaatttcaaggataggatgtccaatggcgaatataataaatgcttggcacaaattgaatcttctcatagtcaaatcggtaaaggacgattttcgcagcgtctttcttcgtatgcgacgcgctctatggtacctgactacatagaggcagctatcaataagataatcgaacttgtgaggagcaggacaaattga

SEQ ID NO: 72545 - DNA, 1806 bp, Desulfitobacterium dichloroeliminans LMG P-21439
ttgaacgattatttcaagcaaaaattgacggaggtcaccaacgactcagaacagcttcgtgcatacacttcgactgacagcacggttgtaatcgctggccctgggagtggaaagacaacagtgttgacgttaaaagtcatacgtctcttagatgatataattgctgaaccaagaggtttggcttgtttgacatacagcactgagtcagcccgagaattcaaaacaaggctttcaaaattgggactaaggggacgcaagaatgtttttttgggtacagtccacagtttttgcttggcggaaattctaacgccttttgctaaactttatccaaagtacgaaatcccaaatccaataaggattatttcggaagcagaaaaaaagaagttatttgactctgttaacccacctggtggtacttcaataacggagatggataaggagcgaactcgcaatatacgaggtataagccgagttgctcttgaaagttatgaagttgcccttcaaacagctatttcgttcgaagaagcattacaaaaaagcggattcattgattttatcagcatggttaaattttctgtcgaacttatacaaaacgaatctttcgtgcgaaaagctattgaggcaaaattcccgtggtttgtcattgatgaatatcaggatttaggcagaccattgcacgaaatagttttgtctttgctagataagtcgaatattaagatatttgctgtaggtgatgccgaccaatcgatatatgattttcaaggcgcagctccagattaccttgatgagctctcacaaagagatggtatcaaatgtattcgcttgttaaacaactatcgaagcgcacagactatcgtaaatgcgtcggaatatgtattgaacagccgacgtgggtatgtggcatcaggcgcattgagagagtatcctgccacaatggattttattgagtgtgatgccggtatggatgaacagtatcaacaaacagttgaactggttcgacgatttcattcagaagaaattccttaccacgaaatcgcaatacttgttggtaagaacgatgaagtgaaagcattgaaagaccagtttgaaaaacaaggaatccctgtatatttagcacggcaggacttcaggaataccgaatctatattttggcttcaaagctgtgcatcgtggttagaggacaaagctacggcttcatttgacgaaattagtcagaagtggataggttttttatcgcacaaacaggcagtcgcaaattctgatgattatgatttacttttgcgtcggacacttttgaaagtattggaaacaagtaagcagtataaagacaatctctttgaatggctcatgtatttattgaatgaactcgattttcaaaatgtatttgatggttcagaacgttaccctgatgaaatcaaaaatctcaagagtttgattcgagttgcaaaacagactgaaccagtattgacaattgggttcatagcacgacttggagtacccgacaatcaagtggttttatcgacgagacatagtgcaaagggactagaatttgatgtggtaatgatgcttggcatggagaaggacagttttccaaattactacgatacaactcaacggcggattgatgaagctcgaagactttgttttgtggctgtaagcagggctagaaaagcgtgtatcttgctcaggtcaaaacaattgccaaacaaatatggcaaatggtattcaaaagatccatcaccgttttggataacacttaaagaatttcatgatgctaacggattgagtacgtatgatgccgattga

SEQ ID NO: 72546 - DNA, 2136 bp, Desulfitobacterium dichloroeliminans LMG P-21439
atgacagttggcaaaaggaagaagctcgactcgcagaagaacactgtcgttaaaaagatttataagtgtggggggaaggataatatgtacatatccaaaattagaatgataaattttagaaattttaaaaacacagaaatagaatttaatgatggtgtaaatgtaataatcggacataataatgcaggaaaatcaaatctaataaaagcattatcattagtgcttgattctcaagtttcaagacaattagatattgacgatttcaataaatacatttcacttgatgaactaaaagctgatccacccaaaataagtatagctattacaatcaatcaaagtattgacgaagatttaaattctgatgatttagttactgtaggcaattggcttactcagcttaacgaaccttatgagtcattgttgacctatgaatttttccttcctgaaaaagaaaaaagtaattatttgaatataatcacaactgctatagatttgaatatggcatggaagataataaagcacgatttcataagactctttgcatataaagtatggggaggtgacccaataactcaaactgttgcagacagcgagtcattacagaaatttgattttcaatttttagatgcaattcgtgatgttgaaagagatatgcttaccggcaaaaatacgcttctcagaaatgtattagacttttttatggattatgaaattaaatctgatgtcaccaaatcagaagaagataaacgaaaagaaatagaaaagaagaagcaagatttttccgaccatgcagatgcgttacttctcgatcttcaagaaagaatgaagcaaggtaaggatcaaatcctttcatatgcaaaggatacaggtgcctcgtttaataaagccataccaaattttgaggggagcatttcagatgttgaaatgttctctgcacttaagttaattgtagagtatgaaactggtataaaaataccagcgacacacaatggactgggatataataacttgatattcatgtcgttacttttatcaaaaatgcaagtaaattcagatggcaaatacttaggaagtaatgcaaaggtttttcctgttttagcgattgaagaacctgaagcacaccttcaccctgcgatgcagtatcagtttttgagatttttaaaaaagaataaaacagaggaaaaggtaaggcagattttcgtaacgactcactcaacacatattacttcttctgttttaatagatgaattaatttgtctacataatgaagcggggcaaacattagtgggatatccagcaaaagtatttcctagtgatggaaaaagcaaaaaatatgttcaacgttttttagatgcaaccaaatcagatatgctttttgctcaaaaagtgattttagtagaaggattggctgagcaattacttttatcaattttggcaagatatgagggaaaatcactagaagaaaatcatattacagtaataaatgtagctggaagatattttgatcattttttgcatttgtttgactctcaaaagccatatacaataaataaaaaagtggtttgcctaacagatatagaccccgagaggaagaataaagataaaggaataaattttaaaaaatgctatccatttgaattgaatgttgataatacgacttatgagtataagaccaatactagcttagataagtatcaagaaggtaaacaccctaatattgcttcatatactcaagataatatgtacgggaaaacatttgaatatgatttgattataaacaatccaacacttgacttattaataactgaatcgatgagcaatagagaagaaattattggactaatggaactgtataaaagcgggaagcagatttctgactatgaaaagaagttaaatggcagtgatgaaaatcaacgaattatagcaagtataagatcaaattccttatggggagatgatcaaaaagctaaagctatcatagcttctcgatatcttaattcagttgggaaaggagaaaatgcgttggaattagcatatgtactagaagaaaatcttgctaataagggaactgccaaatataaagaatttattgttcctaattatatgaaaagagccatcgcatggatatgtaaatga

SEQ ID NO: 72547 - DNA, 1782 bp, Desulfitobacterium dichloroeliminans LMG P-21439
atgatttcaataaattcagatacattgattccaattgaacaacattttcgagtatctgctggtcccggtgctggtaagacatattggatggtaaatcagataaaaaatgttttacatacgtcaaaaagattaatgaaaactcgtaaaattgcttgtgttacgtatacaaatatcgcggtagaaacaatattaaaacgtttaggaactagtgcaagccaagttgaagtttctacgattcatagttttttatataagcatatagtaaaaccatatgcttcattcctagtcgctgattatggtttggatgcagcagaaatagatggccatgatgattcggttttacacttaaaaaaagttgttgaatggattgaaaatcatcctaatgctaataagttaaagcacccatatgctgtaaatcaattaacaaaattagataccaacaagagagcgcttataggttggttatcatcgttaagttataaaatcgataactccaataatttgagaattgtaggagatagagaaaaagccttttatttagaagaaagaaacggaaagattgaacgtagatatttaaataaaaaatgcctggatattcttgaaacagatttacttggatacaaaaagctttattggcaagaaggttttttagatcacaacgatgttctatttttcagttatcaacttataaaaaagtacccttttattttaaaagttttacaagccaaattcccatattttttcgtggatgaatttcaggataccaatccaattcaagtggctatcttgaaactaatagttgaaaaagaaactattgttggaataataggcgatgaagctcaatctatttattcatttcaaggtgcagacccaaaacaatttcattcttttgaattgccatatattgtggattatgaaatggctgataataggcgaagcaccaacctcatcattgatgtattaaataaaattcgtgtagatataagacaaaataaatttagaaatgtaaatggagaaaaaccaattattatcattggcgagagagttgccgctcttaaaaaagcaaaagaaaacagtaaaaatgaagcaatatattcattgtcaagagataatataacatctaatttaatgaagaaagaaatcggaggtacatcttttgatgatacactaatcgatcaactttcagatatagacaaatcaggtagtagcaatcattatagaagcaaagtgattattggttgtgtaaaagcaacagaacttgctcatgaaggaaaatataaagatgcaattaaagaattagagcaattgtttaaggagaagaataacaagagcgaaagaaaaaaagaaggacttaaatatctatgcttacttttaaagaaatatgatgaattgaaaaataactctctgtttgatttttattcatttgtgaaaagtgaaattaaaccagatatttcaagtttaagaagtggtgcgcctaaaacattttatgaagatcatagttatctacaattagctttatgtgtaaggatcaacgaggatattagtaagaataagaccatccataaagcgaagggcgatgaattcgacaatgtttttgttgtattaaaaaatgaaaaagattttgagttttttttgaaaacaaatctattcggcgatgaagaacatagaattttttatgtagcaataagtagagctgtggagagattatttatcaatataccatcattatctaaagatgatttgccaaagttagaaggtttgttcaatataattgaagtctag

SEQ ID NO: 72548 - DNA, 1995 bp, Desulfitobacterium dehalogenans ATCC 51507
atgaatcagcctcagatttgcaagattcatattaagaattaccggaacttttcatcggttggttttgatttaagcgataggcaagttattatcggtgaaaataacgtcggcaagagcaatttattacgcgctatgcaattgattcttgaccccagtctttcggatgaagataggcggcttgaggagtctgatttctttgacgggcttgaagctcctatggaaaacaaccaagaaatattaatcgaattgtacatagataattatttccacataaaaaacgtactttgccaattaagtgacgcaactgtcgatttagatggtcgtaaagtattaaaactctcctataaatttttcccgcaagaagatgcgtctggtaaagttaattatacttatataatttacaaaggagacgatgaaactaatttttttacgcatggagataggaaatatttgaatatgcgagtaatcaaagcgatacgcgatgtagaagccgaaatgcgaaactccagaacatcgcctttaacacgcataatcaagcagaaatatgatatcagaaaagaagatctcattgagatttctgaagcattaaaatcgtccggagcaaacatgcttaaccttccggagattaacgacctccaaacaaagatcagtaagctctttaactctataatttcatattcagaagatgaatttggcatttcgttgcggacaatggatattgacgcgtctcgactgctttacgctctgcgcccattaatcgacaaaagagagtccggaaatacaagtttaggtataaataatgttttgtacattacccttactcttttgctgatccaggatgatacgattaaaacttacttatctccgactctttacaaaaagttgacggaacaagacggggacgagattgtgcaaaggtattatcgaggtgacgatcagaccggctaccatttaacctacgatttaaaagatgtggactcgcaactttatgattttttatatgagcataattcaaatacaaacggagttacaattctggccattgaagaacccgaggctcaccttcatccaatttttcaacgattgctctataaatatgtcgtgctagaagcaaatgcctcattgattattacaacacattcaacgcatatctcgtccgtggctcccatcaaatccatcattcacttagtgggaaataagtctggcacagaagtctatacagcggcaaacttaaactctccggataaggaaatttccgatttagaaagatatattgacgtaaaaagaggcgaaatatatttagctaaaggcatcatctttgtagaaggaattgctgaagaatatctcgtacctagttttgcaaaacgcctggggtgtgaccttgaccgcttaggcgtgattgtatgtaacataaattcaactaacttctggccgtacaaacagtttgccgacttgctaggcatacctaacgtaattataacggacggagactattatcatactgtcaatggagagaagatatttggagatttatcggacgaaagccatgcaaattttgggtatttcggaaatgaacgaatggaagagttatatgaattatttatagatgaagatgaatttgcacggtttgcggagcttgatattacccaacaagatgaaaaattgaataaacatgggatttttgtcggcttctatacgtttgaaacagatatattaaataaaattggtaaagagtcagatagagcaataatttgttctgtttttaatgaattaacagagggtgggcaacaacaaaaagataattttaaagctaatctggtttcaaagaactacaaaaaatgccttgctcaaatagaatcttcacatagtaatgtgggcaaagggcgattctcgcaaagattagcttccatttgtacaagaacgatggttccagactacgttaaggacgccattgaatatatttgtatggaagtccgaggcgaacttgatgaatga

SEQ ID NO: 72549 - DNA, 1815 bp, Desulfitobacterium dehalogenans ATCC 51507
atgaatgagtactttaaaatcaaactttctcaaattagcgatgatgaaaaacaaattgaagcgtataattccacaggtaacaccgttgttattgctggtccaggcagtggaaaaaccacggtcttgacgctgaaagttatgcgtctgttaagcgaagtcattacccctccaagaggattagcctgtcttacctttagccgtgaagcctcccgtgaattccaggaacgtttgaaattactgggactccaaagacgtggtaatgtatttttgggaaccgttcatagcttttgtttatcggaagtattgatgccttttgcaaaactatatcctaattatggaataccttatccgattaaaattatttccgattcgaaaagaaaacggctgtttcagcgtataaaaaaacaaatacctgatgagttaactattgaagagatggataaagagcgaactcgtgacattagtgggttcagtaaggtgtctatacctagttatgacgttgctttgcgggttgccgtagcatttgagagagaactgttcagccgtggttatattgattatattagtatggtaaaaatcgcgaccatgcttatccaaaatgaagcttatgtgcaacaagcgctagaagcaaaatttccatggcttgttattgacgaatatcaggatttgggaaagccattgcatgaaatggttttatcacttttgcaaagtacaaatatcaagatttttgctgttggcgatgcagatcaatcaatatatgattttcaaggggcttcgccagaatatctcgttgaattatccgaatggaaatctattaatcaatgtattcggttaatgaacaattaccgcagtgccaaaggtattatcgaagcatcggagactgttttgaatattaaacgcaattacaaagcacgcggtgcacttaaagattacccggcgaacattgaattttttgtatgcgaagaagggatggacgaacaatatcaggttgcaactagtattattgaagactgtattgcagaaggtataccgtttcatgagattgctattctagccggctacaataatcaattaaaagatttaggaaagctctgtcagagtaagggaattccttattacttagccaagcaagatttcatcagaagcgattttataaaatggatggaaaactgcgctgcatgggtgtcatcttctcgtaaagtcttatttgatgatatctttgaatattgggacttcttgttaatgcagcacaggcaatcaattgattatgataacgggattctagccaagcggaacctctataccattctggataaaagccgccactatgcgaatacgcttgtacagtggtttgattttgttcttgattcgctgcaaatagagactttattgcacgattcggaaatatatccggatgaaatcgaaaatctaaagaaacttaatgagctgctaagcgatgaactttatacggatttttcgttaggccagttcactaatcttgggcttccagagaaccaagttgttttatctacaagacatggagctaaaggtttggaatttgatattgttattatgctcggcatggaagaagggagctttccatattacaaaaacacctctcagcgagaaattgatgaagctcatagactttgctttgtttctgtgagtcgagcaagaaaaaagtgtatactagtacgttcaaagactttaattataccgaaaaaggatggcacttggtggaataaaccatgtgaaccatctaggttctggaatatgttatacagccgccattcccaaataaatggctactcataa

SEQ ID NO: 72550 - DNA, 2007 bp, Leptonema illini DSM 21528
atgctcataaaaagtgctagaatcaagaattacagattattaaaaaatctaacgcttacttttgatgaaagaacaacagtaatcgttggccgaaacaactcaggcaaaacatcattggcagagattttccgaagttttttagggccatccggacccaaattacgttacgaagactttacccagacgtgtctatgcggttttgaaaacgggctggctgcgttcaaagaagaaaaatctgaagccgagatacggaagctgattccaactattgaattggaattgttactggattatacgaatgataaagatgagtacggagttttgggtgagttcatcatagatctcgatgaaacactatttgaaaccaaggttttggtagcctatcagcttaaagatggaaaaatcaaagatttttttcagcctttaagcgtagagaatagacgcaaatacttttcggatttaaaagcactgattaatcagcactttgaagctgtaatttacgcaattgaaccgaccaattctgaaaacagagtcagactcgatttttcgaagttcaaaaagctaattttgtccggtcttatcaatgcccagcggggtttggatgacgaaacgcacagtgaacgcgatgtgcttggaaaatcccttggaaaaatatttaacagtgcgaatagctccggggccaccgcggagtttaaggaaaaatctgaagaagttcgaagggttgcagaagagctacaagaaaaagttgatactgattttcaagagaaggtgaaagctcttttgcctgctctaagtatttttggttatccaggcctacaggatcccaatctcaatgccgtaaccgaactcaatgtcaaatctttgttggagagcaataccaaggtcttttatcaaggagaagactacttcactttgccagaaacctataatggcctgggtatacgaaatcttatttttattctgttccgtatttatgaatattttcgtgaattccagtcccagactacaccacctaaaggccatttaatctttattgaagagcccgaagcacatttgcatccacaaatgcaggaagttttcattcgtcagctcgatcaaattgtccaagaatttcaacaacagctcaatgatggaaaaatctggccggtacagtttgtggtcagtacccactcatcacatattgcgaatgaagcggatttcagaaaagtccgatactttttgtctaagcatggcaaggaaaccagagtgaaggatctcggggcagcattcaaagaagacgatgtcaaagatgataaagagttcctgcataagtacttaacacttacaaagtgtgatctttattttgcagacagagccatcttaatcgaaggaccaacggaacgaatcattttaccagagattattcgtaaggtggatgaaactcaggctaccaaactgaggcggaagtatttatcggttgttgagattgggggtgcttttgctcatcatttctataagtttatagactttcttgagcttaaaacgctatttattaccgatttagattcggtacgaaaaactaccgagggtaagagaacaacctatactgcttcaagtgtcggtgaaggcactgactcaagcaatgcaggcatttccaaatggtatgggattgatggatatggcgatctcaagaaaattctggcatacgacgaaaaggcaagggttgttggataccggcgcatcgcttatcaaatcccggagaaaaagggaggagtttgcgggcgaagtttcgaagatgctttcatgttggcaaatgctgatgtctttgatttgagtcgtttgaaaggtaaggaattagagaaagccgtttttgagaaagcgcaagaaatagggaaatcaagcaaagcaaattttgcgattgagtattcggtcgacaaaacggattggactgtaccaaaatatatcgcagaagggcttaaatggcttgatactgatgaagaagtcgttgtcggggaggggaaagaatga

SEQ ID NO: 72551 - DNA, 1758 bp, Leptonema illini DSM 21528
atgacccgtcaaagcccagcagagcaagcttccatcgaagccttaaaacaactaagatcttgcatcgataataaccagtgttttcgccttgaggcgggagcaggggctggaaaaacatactctctgatagagacgattaagtatcttatagagcagcgagctagtgaatttctattaaacgagcaacaaattgcctgcattacttatacgaatgtggcaaaagacgaaattaaagatagaacggaccatcatccggttatttttgctgatacgattcatgcgttttgctggagtatcttgcagaattatcaaatcaagttgagagagctgcttcctagtcttggagaaagatgggaagaacggatcaaggaagcgggtgggattgcagaacagattgttaaatatgatttggggtatcccagaattaacaatagggaaatctctctccaccatgatgatgtggttttcttgatggcgcgcatactttcctatcctaagtttcagaaactcgtaaagagtaaatttcctataatcttaatcgatgaatatcaagacactgatgtccatctggcagagagcgtcgttactaatcttgtagataacgagtctggtgtaattattggtttatttggtgatcattggcagaaaatctatggttctgcggcatgtgggctgatttccagtaaggcaggaaagatcgttgagataggtaagaaagccaacttcaggtcagacaaaaatattgttgcttgcctcaatcggatgcgccctgaactaccacaagcggaatcaaatccgcaatctcagggagcagtaagaatctttcactctaatttatgggtcggtacaaggcgggggggaggtcattggaccggcgatctaccaaccgcaaatgcaaaagagcacattgaaaaagttaaagagttaatggtagcagatggatgggatatgtcgcccacaaaaacaaaaatactcttccttacgaataacctcattgcgactgagcagaatttcaagaaccttgctgattgttttccttatccagacgactacttaaaaaaaggcgataaatatattcagttctttattgatattattgagccaacagcttcagcattcgagcgtcgtgaatatggcgagttattccagattggcaacaagaatcatcccagccttcaatctcaacgtgacaaaaaaatatggaccgacaacttgaatcggttaatggaattaaggaataccgggtctataggtgaggtgctggatctgttattagaatccaaaacacccagagcgtcagcaaaagtagaagaatcggaaagaaaattcaatctattaagtgacggcgccgctgatagtcattccgaagaggagaagagatttttagaaaagatccgatcaatcagaactgttaaatatcgggaagttataaaccttcatgagtatattgacgaaaaaacgcctttttcgaccaagcacggtgtgaaaggggccgagtttgataatgtgctggttgtatttggacgaggttggaatcaatataattggaatcaaatgctcgaatggatgagcgatggatatccggccgacaagcgggaaacgttcgagcgcaatcgtaatctgttttatgtcagttgttcaagagcaaagcataatttaactctgctctttacccaggaattgtcacagaaagcactttccatgattcaaaagatatttgaaacgaggaatgtaataggcgatccgtttgaacaataa

SEQ ID NO: 72552 - DNA, 2043 bp, Leptospira santarosai str. HAI1380
atgtatattacagaaatagaagttaaaaattttagattgcttaagaatgttcgtatttcgcttcaagagacttcaacaataattgttggtagaaataattctgggaagacgtccttaacagaaatatttcgacgatttttctctgataaaaaaattcatttctatttagaggattttcacctttcctctttggctttattcaaagaagcattgactgttaaacaaagcggcggatcggaagaagatattcgcaaaatcataccgaaaattgaattaaatttcacaataaactacgaagacgataaagcggattttggaatattaagtgattatattattgatctcgatgaaaattctacaaatgtaaatataaaaatctcatacgaaatcgctgatggaaaaatcggattactattcgaagaattgtcatttgaaaatgaattagattcttttattagaaaaatgaaggaacgaattccagctttattttcaactaagatttatacaattgatccaactgaccccaataatcgaacaacgattgaatattctaaattaaagaatctaattaacgtggatttcatttcggcgcaaaggggtttagatgatattacacaaaatgagaaaaatatactcgggaaagctctcaataatatatttagaactgctgcaacagaatcagctccgccggatatgaaaaaaatctctcaggagttggaggagataatacaagaaattcaagtaaaagtagacactgattttaaagaaaaagtagattctttaataccttctttgaataattttggacatcccgctttatccgattcaaaactaagtactgaaacaacattgaacattcaatctttattggatactaatacgagaatccaatatttaaaagctgaaggtatctccttaccagagtcctataatggattagggtctcgaaatttattgtatatgattttccaattattcgattattttcgaaagaatcaatctaattcgattcaagcaaagagtcatttaatatttatagaagaaccagaggcgcatctacatccacaaatgcaagaagtatttattaaacagttagaggaggttgcaaatgacttctctgttaaatttaataaaaacataaaatggcctgtacagtttattgtaactactcactccacccatattgcgaatcaggctgattttagttcaatacgatattttaaaacttcaacgaataagcccctccagactaatattaaggattttgggaaggaatttaactcagaagatgcaaaggaagatagagagttcattcataaatatttaacacttactcgatgtgacttattttttgcagataaagcgatgctaattgaaggtgctactgagcgcataatgatgccaattattgtgaataaaattgatagagaggagaatacttcgctattcaatcaatactattctgtcgtagaagtaggaggggcttatgctcatcatttttataagtttatagatttcttagaattaagaactttatttatcacagatttagattctacaaagataggaatttcatctaaaggaaaaaaagttcatatagcttgtgaagtttcggatggaactcactcaagtaacgttggaataaaggaatggtttaagactaaaggagaaatattagatttaaaagaaataaggcgaaaagagccaactgaaaaaataactgggagtagaagacttgcattccaaattccagaagaaaattcgcgagcttgcggtcgtagctttgaagatgcatttctcctttctaatcgggaactttttgacttggcagactttgaagaagataaagttgaatccgaagcctttagtcaggctgaaaaaattaaaaaaacaaattttgcagttaaatattcattagaactcacagattggaatgttcctctttatattaaagagggcattatttggttggcagaatttgaaaacaaagggttgacaaaacggaagggctccaaagcgaaaattaagaatgaaaagaattag

SEQ ID NO: 72553 - DNA, 1755 bp, Leptospira santarosai str. HAI1380
atgaaaagaattaggggaaagactgcggaagaagcttcgaatgaagctttggaaaaaataataatcgccattgaagctgagcattgttttaggttagaggctggagctggagcgggtaagacgtattctttattaaaagttattgaatatattgttaataataaatccaaccaaatgatgaagcttggacatcgagtcgcgtgtattacctacacgaatgtagcaaaagatttaataagaacgaaaacagacaataatcctttaatttatgctgaaacaattcatgctttcgcttggaacttgattagtggtttgcaaaaaccgattcgtgaatatgttccagaaattagtcaaaaatgggcggaaagaataagtgaaatagggggaatccaaaatcaaatcgtaaaatatgattttggattccccaaagccactgtggatgagattactttacatcacgatgatgttataaaaattttttcgaatttattgaagagagataaatttaagaaattaattaaaagcaaatatcctattattttaattgatgagtatcaagatacgaataaggaacttatcaccagcattgtggaaaatataattgaagatgattttaatatcttgattggcttttttggcgatcattggcaaacaattttcggttcagaatcatgcggctttatatcggcgaaggagggaaaaatattagaggtaagcaaaaatgcaaattttcgctcggatcgaattattgtcgaaatgctaaatcggattcgaccagaactaatacaaaatgctaagataaaggatggtaatggagaaattaaaatatttcatacaaatgattgggaaggtcaaaggagaaaagaaaatcattggcaagaggatcttccggctgatacggcaagtaaaatgttgaaaaaagtcgttcaggaattgaaaaagaatggttgggactttaattcgaaggaaacgaaaatattaatgttaaccaacaatgttttagctaatgaacaaggatatagcaatttaatttcagccttcgaagattcagaagaatatcttaaaaaatcaaatccatacataaaatatttaatagatactgttgaggaagtctgtgatttttatattaatcgcgaatatggcgaaatgtttaaaataattggttcaaaccgatcaggtataaaaagaatggaggagaaagttcgctggcacaccgatttaagagaattgattgaattgcgccaaactggtactattcaagatgttttaaaattactaatgaggactaagaagccgagaatttcttcgagggttgagaatgctgaaattaaatataacgaatatttgaacattgtggatccggttgaaaaacaaaaaaatgaaatattttacaaaaaagtttcgactattaaagccgctcaatacacggagctaatcgctttaaaacaatacctaaaagacaatacccctttttctacaaagcatggtgtgaaaggcgaagagtttgagaatgttttggttgtttgcggacgaggttggaaccactataactggaatcaatttcttgagtgggcaaattcgaaagttccaaatggtaaagaggaaacttataaaagaaatagaaatttgttttatgtttcttgttcaaggtctaagcgaaaattaactgtactatttacgcaatatttgtctaaggaagcaatggtaactttaaatcattggttcgactctaagaatattaaatctttaatttaa

SEQ ID NO: 72554 - DNA, 1971 bp, Coprobacillus sp. 8_2_54BFAA
atgcaattatcaaaaattcgtataaaaaactatcgtctgcttattgatgcggaattggatgttgataaaaagacaactctgattgtaggtagaaacaatacggcaaaaacttcttgtattgattgtatcaatacagtattgagcgggaaaaatttttcttatgatgattatcctttggaaaaacgcaaggagttttttgagttgattacaaaatttatgtcgaagaaaatctcttttacagaactttgtgataatctttcaataatttcgatagaattcttagtcgattattcatctgatggtattgaagataatttaggtgcactatctccatttattattgatgttgatttggatacaacagaagccatcattcgtgtggaatataaaataaaaacagacgaaaaaattttgtggaccttattggaaaacagtttttacacagacggtgtatattcggcaaacattgaagaagtgcacgatgaaattgtcagtagttttacaaaaatatttgaattgaaaatttatgcaataaaccccaaaaacgacgaggataaacagttgaagacctataatgaattagctgagctttttccgttttattcaattcccgcagagagaactcttggtgaagacggtggtcaaaataataatactcttagctcattgatttctagcttttttgatgtgaatgaagaagaccttgactctaatgtcgccacagaagttataaaattgcgtcaaattattggagatgcaaacaaaggccttcagaagcaaagcaatgagattcttagttctatagttaatagtgctattgggtttgggtatccaaatggagaggagttacaacttggtgtaacaactcaattaaaaatagatgatgaaattaaaaataaaacaatgctctcatatacttcggggacattgggggaaagcttaccaagtacgcataatggacttggttataaaaatttgattaaaatggaatttcttctcgttgctttttcaaaagatatagaaaaacatggtgaagcttgtataccattattatttattgaagaacctgaatcacatatgcatccgcaaatgcaacactcctttgcgagttaccttgaaacatttttagagagaatttccaatatacatattcaaacattcttgacttctcattctgcacatattgcgaatacgatggacttttcaaaaattcgttatgcacaaaaaacaatttcaggagtaatatacaaaaatctgcattcatttgctaaaagtaatgcagataatatggactttatcaagaagtatctcactcttagtcgatgtgacttattctttgcagataaaataatatttgtggaaggtgcatctgaacgactactattgcctgatgtgatttcaaaatgcgagaaggcaggtttatttgacactcaaacatataaattgactgctcaatattatgctctaattgaaatagggggagcatatgcatataaatttataccttttgttaattttcttggagttccatgcttaatccttacagatattgattcaatgatagatggaagaacaaaagcagttgttagcgaaggaaagacaacatcaaattcaacattgaaatggttaatgagaaaaattaaatccttacccgaaaaagataaatctaaaatagatttggctgatattattgctttaacagcagaacaaaaaacatacggaaaatgtcatattgaatttcaaactaaagaaaatgaattatgtggaagatcattagaagaagcaattaagaatgtgaatagaaatcattatggtttaactggtaaagttacagaagacttattgaaatttgaggaaaaaagtaaaactgattttgctttaaatttgatttgtaattatcctgattatgaaataccacagtatattaaagatggtttaatatggttaaatgagcaaaaagttcttgaataa

SEQ ID NO: 72555 - DNA, 1755 bp, Coprobacillus sp. 8_2_54BFAA
atgaatgatattaacaaatgtgtcaattatgaaattgcaaaggctgaggctgacaaggtagatgaacaaattattactactctacaggaaggttatagttttcgtgttgaggctggagctggttctggaaagacttattcattaaacaaagtaattgaatggattcaggcaaataaatgggctgattatagtcgaaaaaagcaaaatgtaatatgtataacttatactaatgctgctgtaaatgttattgaagaacgattatcaaaggattctttcatccttccttcgacaatacactcttttgcttggaatgcaataaagcaatatcagagtaccttgttagagtatattgaaaagaatgagaatttacatgcagacgaaggagactttattaaggcatcagaagtaaaatataattttggccataggtacaaagaaaatggagtacattatttatatcatgatgatgtattgaaaattttctgtttgtttttggataatgaaaagtttcgacgcgttttttcaaacaaatatccgttgattctgattgatgaatatcaagattcttataagccaattattgatcgttttattgaatattttatttctgttaagcagggtccacaatttggattttttggtgatgcgtggcagacaatctaccagtcgaataaagcttgtggagtaatagtacacgataatattaaggaaatcaagaaagtgtctaattttagatctgcaccaaggattgtacagtttctcaatgatattagacctgaactgccacaacaatctgcaatagataattttgagggtgaagtaatcgtcgttacttgtgacgattattctggagaaagacgaacggatcataattttaaagatgatctccctgcaaaagaactgaagaaaaggttagatgtattgacaaatgtaataaaaagtattactccttctgatgaaagtttgagagtattaatgattacgcacagggtacttgcaatccaacaaggatatgaacgccttttgaacattttagctgatggattacgtgataaacaagatcaatttcttttgttttttatgaatacagttgaacctatttatgaggcgcttaataaatcaaatatgcagttgctatttgatactctcggcgttagacgatatcctatcactaaaaaagcagaaaaagcaaagtggaaagaactagaacaattgttggcagctgctcgcactaaaaaagcgattgatgttcttaaagaggttattgtttctaatctcattcctataccaccacaggtggaaggatggttaagactttattatgatactcctgaaacaatatatgggttagatacatcgattcaagaatttttggaattagagtataatgaatttttggcagctataaattttttatatcctcaagctgaattttctactgagcatggtgtgaaaggtgaagagtatgataacgtaatttttgttattagtaagggatggaatcaatatcaatttgatacttatgcaccaatgataaatggctctgtcgctattccaaaaggaaaggaattatcttttgaacgaaatcggaacttattttatgtttgttgttcgaggcctaagaaaagattgataatattcgtcacagtgcctataggtccttcatttcgaagttttttaacatctttagttggtacaaataacatctttacatatatacaatttatagataaattagaaactaaaaataattga

SEQ ID NO: 72556 - DNA, 1845 bp, Saccharomonospora marina XMU15
gtgagggtacgacgagtatcgatcagcaacttccgcggcatcagtagcggtaatgtcctgctggactcgcatagcctactggtgggcgggaacgcggcggggaaatccacggtgtgcgaagccctcgagcttgtcttgggtttggaaaggctctatcgccggcccgtcatcgacgagtacgacttccaccgaacccactaccgagcagccgacgattccaccgagccgacagaggtgcgcatcgaggtcgtgctcaccgacctctcagaggaggcgcgccgtcgcttccgcggtcatctgcggccctggtccagcgacaacaacgacttcgccccgcctgcggccgaggacgcggtcgacctggtcgaaggcgagtggtgcctgcccgtggtgttcctcgggcggttcaacgccgccgacgacgacttcgaaggtggtaccttcttcgcgcatcctcgccgccccgaaggcgactatgccgaagacgatctcggcggtgcactctcgccgttccggcgagacgacaaacgttactgcggattcctatatctgcggccaaatcgcaccggcaaccgcgcgttgagcttcggacgcggctcgctgatcgacaccatcgtccggctggaatcggaccggactgggtcattgtggaccagcgcactcgatgcgctgggggagatcgacttggccgagagtacatcagcgttctccgagatccgcgccgcggtgctgtctcgtgtccgaaacttcctgtcgatgcccgccagcgacagcgcgatcggtgtacgtccctcggacctgacccgtgaacacttacgcgaagtgttgcgcatgttcatcgccacccagcctggcacgtatcctgtgcccttcaatcgcctgtcgaccggtgcgctcaacgtcctggtgttcgcgctgctgacctatatcgccgaccttcgcgggccggattcggtcatcttcgccatggaggagcccgagatcgccctgcccccacatacgcagcgacgcctcgtcgatttcgtcaccggcaccatggggcaggccatcgtcacctcccactcgccctacgtgatcgagcggtttgaccctagccagatcgtagtgctcaaacgcgacgacgacggagtgctgacgagcaaaccgatcgaactcggtaacgaactcaagccgaagcggtaccgccaggaacggcgtcagttcgccgaggccgtactcgcccgcggcgttctcgtcgtcgaaggtgccaccgaagtcgtgacccttctcgcgatcgccgacgccctcgacgccgaccccgccactacctaccaacaccccgatgtcgcaggtctgagcctgttcaacgccggcagcgatacgaatgtcccacactacggaccgatcttctccgctatgggcaagacggtgttcggagtacacgacactccgaacacgccgttgacacccgagcaggacaccaacacccagtcgttcgccatccacattgacgtcggctatccagggattgaagacctcctcgtcaccgagatcccgccggccgtccaacgcaacttcctcacctcggtctccacacgcagcgattaccccgcccaatgcggccaactccccgagcaggcgagcgacgagcaagctcgtgatctcgcgcgagaggtcctgaagaagagaaaaggcaccgagtcgttcgcgccactgctcatcgccgagtgcagccgcggtgaattgccaacgaccctggtgacccttctgctcgacatccaccagcacctgtccccgctcccgcacgccgaaaacccgccgccaccggaagacgcaccccagtccaacgatcttggcgacgcgtga

SEQ ID NO: 72557 - DNA, 1725 bp, Saccharomonospora marina XMU15
atgcagctcgacgacacccgcaagcagatcctcgcagcgtccggccacctgctcatccaaggtggtccaggaagcgggaaaactacgatcgctctgctcaaagccgcccgaacgctggagacgctggcagccgagcagcacgtcatcttcctgtcgttctcccgcgccgccgtgcggcagatctccgaccgcgtcggcgagcacctgcccctggccatccgcccccacttggaggtccgcacctttcacgcgttcttcctcgacttcgtccgctcccacggccacatgctcaccggcacctccgcagtgttcctggcccccgacggcgaacggcaacgccaagccgaccacgagggcgactgggacaccgagaccatcaaactggccagccgtggcatcttcgtcttcgatcagctcgccgccacgacagccaccctcctcgaacgcagtcccgctctgcgagccctctacagcgaccgctatccgctggtgatcgtcgacgagttccaagacaccaacgtcgaccaatggcgcgtcatccaggccctcgccgacacgtccaccgtgatctgcctggctgacccagaccaacgcatctacgaaggcttcgtcaaaggcgttgacgaagaacgcctgcaacacgccgtcacagctctacggcccacgccgttcgacctcgccggcgacaaccaccgcagcgcgggcaacggcatcctcgactacggcaacgccgtcctccgcaacagccccgctgaacagccagcatccgtccagtacgtccgctacagcttcccgcatactcccgaggtcgtcacccaccatgtgatagttcacctccaagccttgctggccaaacaactcggacgagagcccacgatcgtcgtcctcggaccatccagtgctttcgttgccggtatctccgaagcagtatccgctgagcaaaccgtcaacggaacccaactgccggccgtcgaccacgagttggtctgggaccccgttctcgcggcggctgcaggctacgtcgtggcgagcatcctcgagtggccaacgctcccacgagacgaggccatcaccaccactctccgaaggatcgcggacttctatcgtgtcaaattcacggacaagcaagcaaagacagcccgatcctcgataaaggccaccaacaacgcaattcaagccttcagcgacggcaagacccctcgcacgaagaccggcaagtcagtaatagtggaagtcgacaacgggatccagctcactggaaatccagtcacagactggcagctcgcacgcgcccgcttgcgcggatcaaccgaactgagcgagatattcgacaaggcccgcatgctccggttgctgcacgccaccgatgcgctggcatggggcttggccgacgcctgggacggccaaagctcctaccccggcgccacggagatcgtgcggcgcgtcctcgcggacgagcttgtcgacggccgtccggcggaaccgcgagccgtcacgttgatgaatatgcataagtcaaaaggcaaagagtttgacggggtcatcatcgccgagggcgtacatacgccgaagctcatcgatcccgactgggatgagaaacgtatcatacagcaacgtcgcgtgatacgagtggccatcacacgcgcgcgtcacaaagtcttctttgttcgcccaaagaacgcatttccacttgtgccacgctcgcaacatcccccggctagctag

SEQ ID NO: 72558 - DNA, 2064 bp, Staphylococcus epidermidis VCU041; identical to SEQ ID NO: 72502

SEQ ID NO: 72559 - DNA, 1749 bp, Staphylococcus epidermidis VCU041; identical to SEQ ID NO: 72503

SEQ ID NO: 72560 - DNA, 1998 bp, Pseudomonas aeruginosa MPAO1/P1; identical to SEQ ID NO: 71676

SEQ ID NO: 72561 - DNA, 429 bp, Pseudomonas aeruginosa MPAO1/P1
atgatcattgaaacggccgcgccagacttcgatgagagcgccgacgtacagatacgggcctgtctgaatcccgccgcgccgcaaagcttttttctctacgccggggcaggatccggtaagacgcgctctctgaaaagggcgctcgacacctttcgcgaagatcatggcgcgacctttaggcggactggtaagaagatcgcggtcattacatatacgaacgtcgcggccgacgaaatcgccgaacgtgtcggagaggatccgctgtttcctatatcgacgatccacagcttctgctggcgccatatcgaggcctaccatcgtgatatccaggcgtggctcctcaacagacttccggttgagcttgccgacctacgcgagaagcaagcgaaggggcgctctggcaccaaggccgcgcaagaccgcgtgtag

SEQ ID NO: 72562 - DNA, 2115 bp, Pseudomonas aeruginosa MPAO1/P2
atgcgaatcaagtttgtggagatttccaatttccgaaagctgaagtctacccatctcgatttagataaaaacacgacgattctggtcggtgccaacaacagcggaaagacctctgcaatgctggcgctgcgcatcttcctactatcacctacgcgcttgaatcttcgcgacgtcacaattgcaaattggaccaagattgatctactggggagcgagtgggaagccggtgcggagcccaccgtcgatctggattcgctgcttccctcgctggatgtctggcttgacgttccgctccgcgagatccagcacgtcgtcgatatcctaccaacgttagattggtccggcgggctgctgggggttcgactagcgtttcgaataaaaaatctcgacaaactcaagagcgaatatatcgcgcaacgaactgcggcgcgggacgcggctatcgttgggccgaacggtgagtcgatcaagattgcagtctggccacgcaaccttacagactttctggagcgtcggctgcgagcacatcttgaactcctagcctatccccttgacccggctgctgttgttccgccgggaagaagcggcctcgcgacgccgcaaaggctccccgccagcgcacttgcgttcgagcatccaccattcaaaaaactcatcaagattgacgaaatcgccgcgcagcgcgacttcgccgacgctagcagcagtgacggcggtgaagacaagggggaggcgaacaatcgtcggttcaaacgtcgcctctcagaccagttacgctcctattatgatcgccatctcgacccgacgaagacgccatcggacaaggactatgaagcgctcggagcaattcaagcggctgagcgcagttttgacgcgcgacttgaggaaggcttttccgctgcctttcaagagctagaggatctgggttatccaggcatgagtaatcccaagctcaagatctcgacccttcttcggggaacggatgggctcaagcatggatcgtccgtgcagtaccaggttgcagacccttcaggggacggcagcaacaccctccaactaccagaggactattcggggctcgggtatcagaacctgattgccatggtgttcatgttgatgggcttccgcgacgagtggatgcgcgtagagaaagccggcattctcgagggggccgacgtgtcacacgagatacagccactgcacctcgtgctagtagaggaacccgaagcccatcttcatgcacaggtccagcaggtcttcattaacaaggcctatacactactccgaaagcacgccgatctgggtgtcgcggaaaactattgcactcaactgatcgtcagtacgcactcgagtcacgtcgcgcacgaagctgacttcgccaatttacgctattttcggcgccggccggcggccagcatgggggagacgccgaccactacggtggccaatctgtcctacatcttcggtgatggggacgagacaaagcgcttcgtgaaacgctacctcaaggcgacccactgcgatctcttcttcgcagacggcgtcatcttcgtcgagggacaggcggagcgcatcctggtgcctcacttcatccgccatcattttccagagctgtcgcggcgctacgttacgttgctcgaactcggcggaagtcacgtgcacagcttccgcaatttagtcgacgcgctcggcatcgcgacgctgatcattggcgatctggatgccacaacggcggttaagattatcgataaaaatatgcgagaaacaactcgttggaagtcggctcgccccgagcagggcaaagctcagcaaaccgcaaactcagttctcaaagattggcaccccgggaaaaagcttattgatgaactcgtcgcgctaccgcccgatggacacatttcaacggctggcggcgactatgagctgtatgtcgcctatcaaaagccagtcaacgtgaagggtgcttccgaagacagcgacctcatcattccgcgaacctttgaggacgccttgatcctggagaatttggcagtcgctggaaagatcgaaggttcgatcacctcggccaaggttcgcggcattgtcgctcaggatctgtccggagatgaggggcggtag

SEQ ID NO: 72563 - DNA, 429 bp, Pseudomonas aeruginosa MPAO1/P2; identical to SEQ ID NO: 72561

SEQ ID NO: 72564 - DNA, 2190 bp, Staphylococcus aureus subsp. aureus CIG1114; identical to SEQ ID NO: 71982

SEQ ID NO: 72565 - DNA, 1794 bp, Staphylococcus aureus subsp. aureus CIG1114; identical to SEQ ID NO: 71697

SEQ ID NO: 72566 - DNA, 2190 bp, Staphylococcus aureus subsp. aureus CIG1612; identical to SEQ ID NO: 71982

SEQ ID NO: 72567 - DNA, 1794 bp, Staphylococcus aureus subsp. aureus CIG1612; identical to SEQ ID NO: 71697

SEQ ID NO: 72568 - DNA, 2190 bp, Staphylococcus aureus subsp. aureus CIG1770; identical to SEQ ID NO: 71982

SEQ ID NO: 72569 - DNA, 1794 bp, Staphylococcus aureus subsp. aureus CIG1770; identical to SEQ ID NO: 71697

SEQ ID NO: 72570 - DNA, 2190 bp, Staphylococcus aureus subsp. aureus CIG2018; identical to SEQ ID NO: 71982

SEQ ID NO: 72571 - DNA, 1794 bp, Staphylococcus aureus subsp. aureus CIG2018; identical to SEQ ID NO: 71697

SEQ ID NO: 72572 - DNA, 1962 bp, Escherichia coli DEC1A; identical to SEQ ID NO: 72254

SEQ ID NO: 72573 - DNA, 1866 bp, Escherichia coli DEC1A; identical to SEQ ID NO: 72255

SEQ ID NO: 72574 - DNA, 1962 bp, Escherichia coli DEC1B; identical to SEQ ID NO: 72254

SEQ ID NO: 72575 - DNA, 1866 bp, Escherichia coli DEC1B; identical to SEQ ID NO: 72255

SEQ ID NO: 72576 - DNA, 1962 bp, Escherichia coli DEC1C; identical to SEQ ID NO: 72254

SEQ ID NO: 72577 - DNA, 1866 bp, Escherichia coli DEC1C; identical to SEQ ID NO: 72255

SEQ ID NO: 72578 - DNA, 1962 bp, Escherichia coli DEC1E; identical to SEQ ID NO: 72254

SEQ ID NO: 72579 - DNA, 1866 bp, Escherichia coli DEC1E
atgacccgcgtaagcagagacgactgggtacctcagggtgtcggtggtctggaagggagagcgtgggaggctttacgtgaaaccgatagcagcatccttgtgaccgctggtgccggtgccggaaaaactgagtttctggcacagaaggcgacctatcttctgcagacaggtatttgtccggcacccaaacgtattctggccatcagctttaaaaaagatgccgcccaaaacctcgccgaaagggttgcaaagcgttgcccgagagatcaggcgcggcgctttgattcgatgacttttgatgcctttaccaaggggcttctggaccggtttcgtccggctttacctgagccgttcaatgcgcccggtacgtatcagattgttaatccgttttgtagggattatgacgattttattgagcgacatggctatcacggagtgagtgctcaacagcttgagagaagactgcttctgacagacctgccaattgacttgtcaaatggatctgaagtacatcgtgcgttagcagattactggcatgaacaattcttcgggggcgacgagatatccctgtccttcccgatgataaacaggcttgtaaaactgctgcttcaggaaaattcatatatccgccgggccttacaggcaacatatcccatcgtctttcttgatgaataccaggacaccacctatgcccagtatgacatgctgctaacggcattcgatggtagcgatgctgtctttacggcagtcggcgatgataagcagcgtatcatgggatgggcgggagccatgaatgacgcctttgaccagtttgaaaacgactttgctgccagacgcataacactgctttctaactggcggtcacatgtggatctggttcgtattcagcacgagattgcccgccggatagacgataatgtggaagaagtgcaggcacaagggacccgtgaaatcgaaggtgaggtttctgctatctggcaattccggagcgcagatgacgagaacaattatctggctgaatgggtgagccgtgaggttcagtcagagcgtgttgcaccacatgatgtagcgattctgatcagaatgcgggcagatcaggttgagggtgaaatagccccctcttttgcggcacgaggtctcaggatcagaaatgcggcccggtcagtcggtgaaattcagatacaggatctgcttggtgaagagctgaccggtatatttgttcctttactccgcctgggagcgacggagcgaagcccggaaaactgggagcagacccagcagaactatctgtttttggaggctgccgatccggataacgatctcacgcaggaacgattgctggttaagcttgaagcattcgtccgtaaattaaggacagagctagcgcatcgccagcctagtccggattcggcggaagagattgcagagatgcttcttgaatttgtcgggacccctaggcttcggcaatcctttcccgcttaccagcgtgcaagagattttgagagggtgtggagtggatttgtcactctcctgaaagagtgtgcagaacacagcagcagctggacggaggcgctggatgagttcgaaggtattggccaggtagctctgatgaccgtccataaaagcaaaggtcttgagttccatacgatgatattttatgggctcgacaatcagacttggtggagccttacgccgcaacggggtgaagagctaaacactttttttgttgcctttaccagagcaaagcagcgtgcgtttttctcccagtgcgttgagcgagggcatgctattggctggatacagcaattattggccccggcgggagtcgaaaccatagatggtacgactatattgggtactacgtga

SEQ ID NO: 72580 - DNA, 1962 bp, Escherichia coli DEC2A; identical to SEQ ID NO: 72254

SEQ ID NO: 72581 - DNA, 1866 bp, Escherichia coli DEC2A; identical to SEQ ID NO: 72255

SEQ ID NO: 72582 - DNA, 1962 bp, Escherichia coli DEC2B; identical to SEQ ID NO: 72254

SEQ ID NO: 72583 - DNA, 1866 bp, Escherichia coli DEC2B; identical to SEQ ID NO: 72255

SEQ ID NO: 72584 - DNA, 1962 bp, Escherichia coli DEC2C; identical to SEQ ID NO: 72254

SEQ ID NO: 72585 - DNA, 1866 bp, Escherichia coli DEC2C; identical to SEQ ID NO: 72255

SEQ ID NO: 72586 - DNA, 1962 bp, Escherichia coli DEC2D; identical to SEQ ID NO: 72254

SEQ ID NO: 72587 - DNA, 1866 bp, Escherichia coli DEC2D; identical to SEQ ID NO: 72255

SEQ ID NO: 72588 - DNA, 1962 bp, Escherichia coli DEC2E; identical to SEQ ID NO: 72254

SEQ ID NO: 72589 - DNA, 1866 bp, Escherichia coli DEC2E; identical to SEQ ID NO: 72255

SEQ ID NO: 72590 - DNA, 1143 bp, Escherichia coli DEC6B
ttgtccgagctgagtgacggtcagcgctctctgttccatatcgctcttacagcggcaacgctcgaaaccgagcgggaagcattttctttgcctgctgatgacagctcatttgaacaggataagttacgccgtattcacctgacgattcttgccatcgaagaaccagaaaacagcctgtcaccgttctttttatctcgcatcatcaagcaggcgagagagattggcgcactgccttccgcgcaggttctgctatctagccattccccatctatcctgagccggatagagccggaggaagtgagatattttcgtatggaccggagcgctcggtgctcatcgatccgagaactgaccctgcctgaagatgatgttgaggcaagcgtttatgtcaggctggctgtaaaggcataccccgaactttattttgcgcgatttgtaatcctgggtgagggagactcagagcgagtagttattccgaaaattgcggaagagatgggtgtttcccttgatccatcattcgttcccgtcgttccgctcggtggacggttcgtagcgcatttctggcggctgctgaatgatcttgagattccacatgccactttgctcgatcttgatctggggcgccgacatggtggggcgaatgccatgagaagctgccttcagaatttggccgctatcgggagtaatttggggagcaccaatggtgctaatgctgctcagcttaccgaccaacagctttataatgaaggcctgcaaggtcaatggcttcaagcattcaggagggaaggagttttcttttcctatcccattgatctcgattttgccatgttgctcgcctttccaaccgcttatcaggttgccaatccaggtggcaatggaccccagagtagtgctgctgctattcaagccaaaaaggtcagtacgctgaaaacaggtggtaatcctgccttgtataccgcgcattatgatgacgctttcaaatggtatccgtatctgttcctgagccgcagtaagcccgaaactcaccttgcggctttttcccgtatcgcgggcggcggtgttactgcgtccgctcctgtagagctcagggcgctcattgagtacgttacggataagcttaatctgtcaggagagaatgaatga

SEQ ID NO: 72591 - DNA, 1317 bp, Escherichia coli DEC6B
atgacccgcgtaagcagagacgactgggtacctcagggtgtcggtggtctggaagggagagcgtgggaggctttacgtgaaaccgatagcagcatccttgtgaccgctggtgccggtgccggaaaaactgagtttctggcacagaaggcgacctatcttctgcagacaggtatttgtccggcacccaaacgtattctggccatcagctttaaaaaagatgccgcccaaaacctcgccgaaagggttgcaaagcgttgcccgagagatcaggcgcggcgctttgattcgatgacttttgatgcctttaccaaggggcttctggaccggtttcgtccggctttacctgagccgttcaatgcgcccggtacgtatcagattgttaatccgtttcgtagggattatgacgattttattgagcgacatggctatcacggagtgagtgctcaacagcttgagagaagactgcttctgacagacctgccaattgacttgtcaaatggatctgaagtacatcgtgcgttagcagattactggcatgaacaattcttcgggggcgacgagatatccctgtccttcccgatgataaacaggcttgtaaaactgctgcttcaggaaaattcatatatccgccgggccttacaggcaacatatcccatcgtctttcttgatgaataccaggacaccacctatgcccagtatgacatgctgctaacggcattcgatggtagcgatgctgtctttacggcagtcggcgatgataagcagcgtatcatgggatgggcgggagccatgaatgacgcctttgaccagtttgaaaacgactttgctgccagacgcataacactgctttctaactggcggtcacatgtggatctggttcgtattcagcacgagattgcccgccggatagacgataatgtggaagaagtgcaggcacaagggacccgtgaaatcgaaggtgaggtttctgctatctggcaattccggagcgcagatgacgagaacaattatctggctgaatgggtgagccgtgaggttcagtcagagcgtgttgcaccacatgatgtagcgattctgatcagaatgcgggcagatcaggttgagggtgaaatagccccctcttttgcggcacgaggtctcaggatcagaaatgcggcccggtcagtcggtgaaattcagatacaggatctgcttggtgaagagctgaccggtatatttgttcctttactccgcctgggagcgacggagcgaagcccggaaaactgggagcagacccagcagaactatctgtttttggaggctgccgatccggattga

SEQ ID NO: 72592 - DNA, 1962 bp, Escherichia coli DEC9D; identical to SEQ ID NO: 72254

SEQ ID NO: 72593 - DNA, 1866 bp, Escherichia coli DEC9D
atgacccgcgtaagcagagacgactgggtacctcagggtgtcggtggtctggaagggagagcgtgggaggctttacgtgaaaccgatagcagcatccttgtgaccgctggtgccggtgccggaaaaactgagtttctggcacagaaggcgacctatcttctgcagacaggtatttgtccggcacccaaacgtattctggccatcagctttaaaaaagatgccgcccaaaacctcgccgaaagggttgcaaagcgttgcccgagagatcaggcgcggcgctttgattcgatgacttttgatgcctttaccaaggggcttctggaccggtttcgtccggctttacctgagccgttcaatgcgcccggtacgtatcagattgttaatccgtttcgtagggattatgacgattttattgagcgacatggctatcacggagtgagtgctcaacagcttgagagaagactgcttctgacagacctgccaattgacttgtcaaatggatctgaagtacatcgtgcgttagcagattactggcatgaacaattcttcgggggcgacgagatatccctgtccttcccgatgataaacaggcttgtaaaactgctgcttcaggaaaattcatatatccgccgggccttacaggcaacatatcccatcgtctttcttgatgaataccaggacaccacctatgcccaatatgacatgctgctaacggcattcgatggtagcgatgctgtctttacggcagtcggcgatgataagcagcgtatcatgggatgggcgggagccatgaatgacgcctttgaccagtttgaaaacgactttgctgccagacgcataacactgctttctaactggcggtcacatgtggatctggttcgtattcagcacgagattgcccgccggatagacgataatgtggaagaagtgcaggcacaagggacccgtgaaatcgaaggtgaggtttctgctatctggcaattccggagcgcagatgacgagaacaattatctggctgaatgggtgagccgtgaggttcagtcagagcgtgttgcaccacatgatgtagcgattctgatcagaatgcgggcagatcaggttgagggtgaaatagccccctcttttgcggcacgaggtctcaggatcagaaatgcggcccggtcagtcggtgaaattcagatacaggatctgcttggtgaagagctgaccggtatatttgttcctttactccgcctgggagcgacggagcgaagcccggaaaactgggagcagacccagcagaactatctgtttttggaggctgccgatccggataacgatctcacgcaggaacgattgctggttaagcttgaagcattcgtccgtaaattaaggacagagctagcgcatcgccagcctagtccggattcggcggaagagattgcagagatgcttcttgaatttgtcgggacccctaggcttcggcaatcctttcccgcttaccagcgtgcaagagattttgagagggtgtggagtggatttgtcactctcctgaaagagtgtgcagaacacagcagcagctggacggaggcgctggatgagttcgaaggtattggccaggtagctctgatgaccgtccataaaagcaaaggtcttgagttccatacgatgatattttatgggctcgacaatcagacttggtggagccttacgccgcaacggggtgaagagctaaacactttttttgttgcctttaccagagcaaagcagcgtgcgtttttctcccagtgcgttgagcgagggcatgctattggctggatacagcaattattggccccggcgggagtcgaaaccatagatggtacgactatattgggtactacgtga

SEQ ID NO: 72594 - DNA, 1929 bp, Listeria monocytogenes FSL J1-208
atgtatttatcatcgcttaagttgaggaattttagatcatttggctctgcaagtcatgaaataaagttcaacaaaggcctcacagttctggttggagaaaacgactctggcaagtctgctattttagatgctatccgtattgttttaggaacaacagattttagttggtacaggattaacgattacgatttttataatgaagatagctcactcgaaatagaaatttcttgcaagtttactgacttatcttcgatagaagcttctgcatttctagaatatttaacatacgaagatgatgacaaagggaaaaagattccctcgctatatctgaactggaaatgcagatatatgcagtcatttaaaccaccaaggccggtaagttctatgactactggtaaaaatggtgatggtccagtcttgtcaccagaatctcgtgagatactgagggtcacttatctacgtgcattgagagacgcatatagtgatatgcaatctggaagaaattcaaggttgtctcaagttgttcagaacgttcctgccataagtgaaggtgaagctgacctagaagaaggagtagaacttaatgaattatccttggttggcatcttcaatttatctaataagctattggctgaatatccggctttaaaaacagttaaaaatcaaatgacagatatactaaagaatcaaatgttgttagatggtgataacttagctactagatttgaagttacgggctctgacactgctgacgcgaaaaagctcacgagtttattggaaaaattagacttaacgattgataaagatacagcttcactcaaaggaatccctgggctaggaacaagtaatatcatgagtatggcttgcgagctgttattaaggagaagttcacaagaagcatgtcaactactacttatagaagaaccagaagcccatatacatgctcagagacaaatgaaattagtcaaatctcttcagcgtgaggcggaagccaattcgcagcaaattattttaacaacacactctcctttgttagcgtcagcagtcaagctggaaaatataattttaataaaaaatggaaatgcttatccactttctaaaagtgagacaagcctagacgaaaatgactatattttccttgaaaggtatctagatgctacaaaagcgaatttgttttttgctcggaacgtgatgatcgttgaaggaccgggcgaggcacttctactgccaactctttctcgattattaaatagggactttgtagatttcggtgtatctttagttgatgttcgaagtactgggctgagacggtattccaaaatatttcaaaggaaaaacaaagataactcgcagtactctgatgactggcttaatattaaagttgcttgtattaccgatagagatattatgccaaattgcgcaccaagaatttgtcttaaaaaagaatataatgatgataacacgagctggcctgaaacaaatgatagaagatggagagccgaaagcgattttagtgatactcagaaaaaagtacacctgaatgacataaaggccaaggctgatggtcagaacgtcaaaacgtttgtgtcagatagatggactctggaatatgatttagcgtattatggactgagtagtgaagatatgaagagttccttaattaaagctatagtaaaaaccacctatctacaagttaattggaaaagtaaaattactgagatatcaacagcgttagacacacgaaccaatatagaagaaaaagcctcatacttttatagtttttttgcaaaaggaaatacttctaaagctgaattttctcaacagttagcattagaacttgaaaaagatttctctggcaatgagaaagcattaaaagattcattaccgccatatatagtgaatgctattttgtttgtaactaaaaattga

SEQ ID NO: 72595 - DNA, 1908 bp, Listeria monocytogenes FSL J1-208
gtgaatttcattgatgaaataacgataactgatatagatatagattgggttgagggaatacttgatggagacattagattcgaccagtctagaagaaatataattaagaatctggaatcgatagatattcaggcatttcctggaagtggaaagacaactattcttgttgcaaaattagcaattttggcaaaaaaatggacagctgcgacttcaggaatttgtgttctttctcatacaaatgtggcaagagaggaaattgagaaaagattaggtgatacggaaattggtgctaaacttctaagataccctcactttattggaactgtccattctttcttcaattctttcgtaggactgccttggataaggtcaaaaggtaatcctattgaaattgtagatacagattttgtatgtgccaatagatggaagagcttgccagtacagtttcataaaaccttactgaacaggagaaagacttatatggacctttgtttcaaaaatgagttagggaaaatcgatctgggaaatcttggcgagaatactctaacctacaaaacaatcaaaacaatcgtcaaaaattctcaagaaaaaggctatttcacttttggagaaactttgttgtttgctcaagaagctgtatcgaacaatccccaaatagtaggttatattcaaaagaggtttccacttctgttcattgatgaagctcaagataccaattccttccagtgggatttaatcaactctacttttccagcctcaatacagcaaggatttggtgatgaaaatcaagcaatttataattatgttggcgaaaacgaaactgatagttttcctaggaataatccattggttttacctgaaagtaagaggtttaatagcaatatatctaaaatagcaaatcctttagcgatatctaatgcagagatgattggtatgagtacgacatttgattgtaagaacactatatttctttttgcaacagataaaattgataaagtactcgaggagtattccaaacttgttttattaacatttacagatgaagaattgaaaaaataccaagcagacggttgtcatgcgatcggtatggttcatacaaagaaagaagagacagtgcctgatcagcttccaaaaggggtttttgactattggcacaattataatcacaagtcaatctctagaaagacagcgccagactatttagttgagtattttatattaggtagaaatgaactagatttaactggtgaagcacatcttcaagtagaatgggtgttaaaaggattaaaaattttaatcaataaggttgctgatacaattgttattgaaaataagacctcattggttaattcatttttaagtaagttagataatgagaaacaaaatatctttagagaaaaattgttattgatattgaataaaacttcttttatagaaactgaatgggtagaaatgcaaaatgtaatctcctcaattttaagtctttttaatttggaaattggaacttctgactttatggaatggagtaataacatcgatattgctacttcttatgatagtggcggattatgtcctaaaaatgtatttagatattcagatgagagtaacagaagtgtggatgttactttagggagtatccactccgtaaaaggccaaactcatttatcaactttagtcttagagacgttctcatataaccataacattaactctatactacctttcatctctggtgctcctcctaaaaagaaaccaggtgtgcgtgatagaggtaggctaaagtgtcattatgtagctatgactagagcgcgaggcttattgtgtctagccattccaaaagataaagttgacgaaaattccatctcaaatcttgagttattaggatggaatatacgtgttattgaatag

SEQ ID NO: 72596 - DNA, 2190 bp, Enterococcus faecium Aus0004; identical to SEQ ID NO: 71696

SEQ ID NO: 72597 - DNA, 1251 bp, Enterococcus faecium Aus0004
atgacaaatatcttcgaaaaaatcgtaaatgatttaaatttagaacaaaaagatgttgtggaaagtgaagataacctttatgtaaatgcatgtcctgggagtgggaaaacaagggtacttacaaggaaaattgcttaccaagcaattaaacacgatggatcactaaaaagaataattgctatcacatacactaatagagctgctgaagaaattaaggaacgcctaagtttacttagtatagatgatgatattaatatttgggtggggacaatacatcagttttgtcttgaatttattatttatccttttaaaatgaatctctcaagagtatcaaaaggatttacaattattgatgattatactcaaagagcttacgtcagccaaattaataatatgctgaatttaaatctcaaaacgtatgaactgaacaaaattgatttgtcactttctcatgattttaaaattaatgaagttcagtatactcaagtttctgaaatgtatcacactatgttggaaaaaaataaagaaattgattttgatatgattttactagtagcgtataaaattttaactgtaaacagtaacgttgcacgtaatattgctagtaatataagggcgatttatgtggatgaatttcaagatactagagaattacaatacaatgtaatagctaaattacttcaaaacaaccctcaaattcagtcaatgtttgttggagatattgaccaagcaatttatggatcattagatggtatagctaaatcagttgaagaactagaaatgctaactagtcacacttttcaatcaaagacgctacatggctgttacaggtctaatcagagattagtagacttctactctaattttcagagttgtccttacgagattgaaagcagagggaataataaaaacgaccgtggttttataagttatgattgcaaagttactaaggaggatttacccaacataataaaaaatataataaaggaaaagattgaaagcggcattcatgaaaaagatatttgtgtacttgctcctcaacactatcctctgttttcactgggtgagtatttaaagaaagaattaccgtattgcaattttgatgctataaatatatcaccaattaaggtaaataatcatagtttatttttcaagttagcaattttgtactttactgaatcaggtgaaaaggttcgaagaagaaagctaattgcaaacgatattttaattatacgccgtttgtataattaa

SEQ ID NO: 72598 - DNA, 1938 bp, Streptococcus pneumoniae GA05245
atgaagttaacaaaaatggttattaataattttaaatcttttggggagtgtcaagcaattaactttaataatcaaactgtactgatagggaataatagttcaggaaagacaactgtattacaggcattgagtaagttgttttcagataaacaaagtgatagaatcattcgaaaaagtgattttcatttaccaaaagggttaagacctggtgaaaacacaagaaatctttttatagaaactatttttgagtttgatgaacttgatggaactgtctatggaccagccattccaacatttttcgagcactttacagtttctcaagatggtgcaaaaccttttttacgaatcagattagaatcttcctgggaagatgatggaacagttgaaggaagtattgatactcaaatttattatatttcatctgatgaagatactattagagatgaagacaaacatcgtgctcctagaaaggatttggataaaattagggtactttatgtaccagcttcaagaacgcctgagaaggagttgggtaatgcttcaggtagtatgttaagtaggttggtaaatagtataaattggactgaagatgagataaaagaaattaaagataaaattgatgagttgaataacacttttttatctgaaaatggagcattaactcagatcaacaatgagattcagaaatcatgggaattatatcatgaagataaccgtttttctcaagcagagttgattattaattcttctgagatggcggcagcacttagacagattgccttaaaattttcaccaacaaccactgaagaagcatttacagtttcagatctaggagatggactgagatctattttttatttttcacttgttgattcgatacttgatattgagttagaaattaccaaagatcgtgaagagaatcctgataatccaagatttaagttggtacctccaatactaactatcttagcaatagaggaaccagaaaatcatattgctccacatcacattggaaaactgataaaaaggtttaagcaattaggcaataatgacaactctcaattaattttaacttcacattctccagttattgtaaaaagaattgacccagaagatttgaggtatttaagaatagaaaataatgacagtgttcttcaaaccattgtttctgatatacagttacctcaatcgaatgatgagtcttataaatacattaagggagcaattcaagcctatcctgaactatattttgcaaagttagtagtactgggtgaaggtgatagtgaggaactgctattaccaaagttttttgatttacttggactggaaattgatagttctcagatttcagtagttcctttaggaggtaggcatgttaattatttttggaaattattgaacgctctcaggattcctcatattaccttattagatttcgataacgaaagatatggaggtggctggggaagaattcaatatgcaataaaacaattgatactaaatggggttgctaaagaaaaacttgttactgtaacagccgaatctcaaaaatcacgagttctagatgatgatgagattgataaaataaaggactggaagattgatagacctgataatcagttgcttgaggggtggattaaaatgttagaaaaattcaatgttttcttttctgcaccacttgatattgatttcttaatgttacagtattataaagaacattatctggaaactttatctaccaatgagggacctgttgtttcttatactgatgaaaatagtgacaataaaaaaataaaattaactaaaatggatagaacaaatgattatcaattaattggttttaaaaatcgcatcagtgaagctatacaagcaactttaaaagataagagcggacccggtgatagcttcactgaagaggaaaaggaactaatgatttga

SEQ ID NO: 72599 - DNA, 1818 bp, Streptococcus pneumoniae GA05245; identical to SEQ ID NO: 72387

SEQ ID NO: 72600 - DNA, 2070 bp, Streptococcus pneumoniae GA47179; identical to SEQ ID NO: 71808

SEQ ID NO: 72601 - DNA, 1818 bp, Streptococcus pneumoniae GA47179; identical to SEQ ID NO: 71809

SEQ ID NO: 72602 - DNA, 1596 bp, Streptococcus pneumoniae GA47794
ttggataaaattagggtactttatgtacctgcttcaagaacgcctgagaaggagttgggtaatgcttcaggtagtatgttaagtaggttggtaaatagtataaattggaccgaagatgagataaatgaaattacagataaaattgatgagttgaataacacctttttatctgaaaatggagcattgactcagatcaacaatgagattcagaagtcatgggaattatatcatgaagataaccgtttttctcaagcagagttgattattaattcttctgagatggcggcagcacttagacagattgccttaaaattttcaccaacaaccactgaagaagcatttacagtttcagatctaggagatggactgagatctattttttatttttcacttgttgattcgatacttgatattgagttagaaattaccaaagaccgtgaagaaaatcctgataatccaagatttaagttgattccaccagtactaactatcctagcaatagaagaaccagaaaatcatattgctccacatcacattggaaaactgataaaaaggtttaagcaattaggcaataatgacaactcccaagtaattttaacgtcacattctccagctattgtaaaaagaattgacccagaagatttgaagtatttaagaatagaaaataatgacagagttcttcaaaccattgtttctgatatacagctacctccagctatagatgaatcttataaatatattaaaggagcaattcaagcttatcctgaactatattttgcgaagttagtagttctaggtgaaggcgacagtgaggaactgctattaccaaagttttttgatttacttgggaaagaggtagatagctctcagatttcaattgtccctttagggggcagacatgtcaactatttttggaaattattgaatgctctcagaattcctcatattaccttgttggattttgataatgagagatacggaggtggttggggaagaataaaatacatttctcaacatctgtatgagctgaacacagagtttcaagaatggttccatactcagagacttgattttaatgaaattgggtcacgaggttgtgaatcgataggagctcaacgtctgattaattggtttaataaactcgaagaatttaatgtctacttttcatcgcctttagatattgatttcttgatgctacaacattataaagacaattatctgaatactttatccccaatagaaggaccagttgtttcatataatgattcggatggaagtagtaaaaaagtgaaattgagtgatttagactgtcttgatagattgcagttagaaggtttcaacaaacgtaaagaggaagcaataagagctactttaaaagataagagtggacatggcgatagtttcaatgaagaagaaaaagaattaatgatttggtatcaatatttctttttaggtagaggaaaaccaacaactcatatgcaatttttatcatctattagtgatgatgaattaacaagaaatctaccccctgtatttgaaaaaatagttaacagtgctgaagaattacttggagatattcaacatggtaaagagtga

SEQ ID NO: 72603 - DNA, 1818 bp, Streptococcus pneumoniae GA47794; identical to SEQ ID NO: 71809

SEQ ID NO: 72604 - DNA, 2010 bp, Flavobacterium frigoris PS1
ttgttgattatgtatatagaaaaacttacaattaaaaaattcaggtctattgagtatttagtagtagaatttaataaaggactaaatattattgttggagaaaacaatgtaggaaaaacgaccataattgacgcaatcaggatatgcttaagcttaggaagacaatggagagatattggtgtgaaaaatccggaagatttttatattgacaacttggttatttcagatgtccttgaacctatagaatttactatagagtttaaaattgaagaagctgaagacagaaatctttttcattcactattatggcaagacccagcaaagaaagaatccccaaacttaaggttgaattttcattatgatattgaaaaagacattaggggaaatgaaaaattaaaatggaaagtatggggaggacatgatactatcgtagatatggcagagttacagcagatatattactcttatctggaaccattaagaaatgccgaacaggaattaaggccttatgcaaacaataataaagttacttccttatttagggatatgacttcgtatgagaaagctgatccagcaggaaaaaaaacagtcagccttacacatgacaaaaaaaacgagctttcacaagcaattgaaaaagtgcttcaaaacgatgactggactggtttaatcagtacaggacaaagttatataaatgaacatctagaaaaagcagatatcaagaaaaagagttctaaggtccatttaaagctgttggaatataaatatgacaatattgttaaggggctccttacaaggaaacctgtttactcacaagcggttttgggtactgatttacaccttcaaaaatattttgatatcagccagaatggattgggagataataatataatattggcatcggcagttttaggggatctgaaaagcaggagagatcaggaaattgaacattattatgctttattgatagaggaacccgaagctcatttacatccgcaacgtcaaaacacattttttaattatctaaatactttacaagatttaggtgtgcaaatatttataacttcacattctccaacaatcactgcaaaatcaaatcttgataatctactgatattacaaaaagatgaattgtataaaacatcttttttcacgaccaggaaatcgatccttacaggcaagaacaaagattatttgagaaaatttttagacgttaccaaatcgcaactgtttttcgcaagcgggtgtatattggttgaaggtatatcagaagcattattacttcctgtatttgctaaaatgactggaaaagattatgatcttgataagaatggtattgaaatagtaaatatcaatggagttgcttttgagccatttgccaatctttttaacgcacctgataaagaaaagagattggcgacttattgttcgctaatcactgatgatgacaaaagtatcataaaatctggaaattttattagcaaaggtgagggaatcaataaggctcaagctgttgaagttttcaaagagcttaaaggtctaaaaataattgaccacagtaatcgtatagtggattttgacgtgacaaaggatctaaaaatcacagattttgagtccaatgaagtttttattaaggcagtattgtcaaacaaatacaataagttatctgaccgtgcctcaaaagcacaaaaattagccaataaaaatctaagagttgaattagcgaatcatacatttgagtatgagcttataacagcagatgactacaatgccagattaattgcccgaatttataacgatatgcattctaaaaaatatgttgatgtttttgctaataagcacttgctagcggctgatattttgaagaagttgaaatccaataaagataaatcagtgttagcagaaaacttagcttatttacttgagcaaaaacctggaatgtggaggcattttgtaattcctaaataccttgaaaattcaattcgttgggtaatcgataaaaaggtctaa

SEQ ID NO: 72605 - DNA, 1821 bp, Flavobacterium frigoris PS1
atgtatagcaaattatcagatggccaacgaaaaattttagattacaatcagggtacagtagttgtaaaggcttgtcccggcagtggtaaaacatattcgttggcggcacgaatatcgcgtctgctcagagagcctgatttaggaaaaaaaggcctggcaataatttcatttacaaatattgcatgtagggaaatcgaagataagctcttaactgatttttcaactccaattcctttaagccaccctcattttttgggaaccatagatagttttatcaatacgtttatcttccttccttttggtcatttaataatgggatgttcttccaggccggaattggtaggggaaccacatggcccatggagtgtgaagaagtttgatatggattatgaccagtattttgataagacaacttttgattcgaatgatatcctaactcgtatagcgccttatcaagcattccattttaaatgggtttataacaacattagcggtggtatcaacggtaatatcacaaatattatcaattctaaatgggctttgtttaaaaaaggttatgctaatcagtctgatgcaaattatattgctcttaaagtgttagaaaaatatcctataatagctgaaaatattgctaaaaagtttgctaattttttaattgatgaatgtcaagatacgaatgacatacatatgaaaatcattgacatatttaatagtaaaggcaacaacaatattatgctgatcggtgatcgtgaccagtcgatatttgaatggaatgaagcccggcctgaattatttgatgcgaaatatgatgtatgggacaagatacttttgtatgagaatagaagaagctcccagcatatttgtgatttcatacagaatctatcgtcattttcagaaataaaagctgtaaatgaacgagttaaggactctgttttaatacctgcaatttctggctataaaatgccaaagaaagcgactaaaaaagatattacagttataaccactgaagaaagccatgaggcttttggagaaattttaaaagatttccttaaggaatgtgataataatggaataatagtaaataaagaaaatgtagcggtattgtatagaggtactgcgagttcgagatacttaggacttagttctgatgtgcatagttttgagactatcccctggctaaagaatcattatcatgtgaaaggcataatcaaaggaaagcatatgtatgaacatgggggattaaacaaaggatataaattattggaaaaatcatattttgaggctctattgcgtccggccgattcacgattctactgcagcagtcaatttataagtgataagatagcggttttaggaatcaaaaattatagaagagaaatttttagatttattgacagcctgccttatactaaagataagaccttaaatgtatgggtgaaggaggctaatgcagcgttaaaaagctcagggattaatattaatttaaatattgatagcaaatacggggatattttaattgatgattattttggtgaagatttaaacagtgagcgactgcatccattttattttgggaccgttcattcggtaaaaggcaaaacttttcaggctgtcttgttgttattggggaaaaaatcggttcttaagaattatgataccattttaaattctgacccaaaacttttaaatccaaacgatttggaagaattgcggattgtatatgttgctttatcgcgtcctgagctatttttaaaattggtagttcctgactcagatgtgaaattatggactgataaactactcaggcagaacaatgtttag

SEQ ID NO: 72606 - DNA, 978 bp, Xenorhabdus nematophila ATCC 19061
atgggaacacgcagttgggcttcaatgttaacgattaagtctttcgtcgagattttgagtcacagacatattgccgaatctgagcctttattcccaattctgacagttgaagagccagaagcgcatttgcatccgaatgcacagaaaacactttatcgccaactctcagatacaaatggtcaattaattttaagtacgcattctccatttttggctgccatggctgacctttatcaaataagatcattggtaaaaacaaaaaatgggattgtggcacataaaatttctcacccaatgaccgatgacgagaaaaaatcaatttcacgtagtatattagctaaaaatggtgaattgctgtttgctaagtgcatgcttttatgtgaaggagtcactgaggagcaggtgcttcccgctatgtttgagatttatgcatcagctactccttggtctgtcggcctttcttgtgtcaatgttggtggaaaagataaatatattcattttgcgttgttgccatttagcttcggtataccaacatgtattatcagtgataacgacattaatcctaactctgggactaaaacacaggatgatgtcacgcaacaaatagaaaaattatcgaaaaaaatgtgtctgtcactgacaaaagatttttacgatatttattttcttgatgatggaaatgattttgaaaaagaattgattgaccacggcttgcgtgatgagattattgatgcttttgttttacttgcaacaacaggaaataaaaataacgagaaatttagagacgcaaaatataatgaatttaatcaacttactgatgaacaattattagaaaaaatgagtaaggaaaaagcatcttatgctggtttcttagcagatgtgcttctagcaaataaaagaataaaatcagttgatgatttagtaccacctaatgttcgagctagtttcgattgtataaaaggatggttagcatgttaa

SEQ ID NO: 72607 - DNA, 1896 bp, Xenorhabdus nematophila ATCC 19061
atgttaaatttatctaagggtcaagaggccgtagtccacgctgagatcggtctgcctatgcaggtacttgcagcagcgggatctggtaaaactagagtgctaactgaacgtgtacgttatttaatcgaaaacacacgcaaagatggtatcatcgcgttgacattttccaataaagcagccgaagaaatgcaaattcgtttagctgacctagatgtgcttagcgaacgatgctggatagctacaattcatgctgtagctcagcggattttagatcaatatggtcatactattggcttaccttctgaactgcatatttatgaacgcgatttagatcgaaaaactgtttttcttcaatctttaagagaaagtggcattggtattgatgatttccttaatgctggagatgaaaaaacgcgaaaaaatcgtgagcgtattattcataattacttagaacaattctcagtagttaaacgagaacttttaacagaagaggaaataaaagaaaaatatacttctaatgagtcatttttaagtgtttttcaagcataccaaggtgccttagtgagaagtggtggcttagattttgatgatattttagtttacgcccatagaattttgatggagcagccatggtgcgctaatatttatagagctaaatataaacatatatgtgtcgatgaggcacaagacttaaacaaagctcagtatgaatttatcaaagtgttgtgtggagaccaaattaagagtgtaatgatggtaggtgatcccaatcaaatgatttatggattcaatggttcatcgtccgattacttatgcaaattatttttacaggatttttctgctcaggttttcgaactgaaagaaaattatcgcagctcaaaggcggtaattagtttagctaataaattgaagccaggatcacaagtagaagctgattttgtattagatggacaatatgaaattcataaatgccaaaatgaagaggacgaagctacttggatttgtaataaggtgaatgaacttctttgtcagaaaacaaatattgaaattgaaggcgatatatcgcttaccaatatggttgtgattgcccgaaatcgattcgttttccttaagctagagaaggggcttggtgaaaaaggcattccatacttgttgaagaaaagtgagcgtcaagcagaaccatcatctttatttggtagggtgcttgatcttgcaatacgagttcgtcttaatccaaaagattggattgacggtaaaaaactttgtactgctctgaagatatcagttccctctgtctggggtaacgataatttattacttgatatggctgccgccgttcgccactcagcgatttcattccctgatattcaagctgaccttcttgaggaaattcaaggattagacattgaaaagccaaacatacccaaactatatgatcgttttaatacaattattcaaggattgaatgatgttaatttgcctaaagaagacaatgagcttgagcgttccttgcaagaactagatgacttcaggaattgctggactaccttcaaaaggaagggattaggtgaatccctcatgtcctttcgtaatgcgattgcattggggcaggttgcagaaaactatgatccaactggtctaacattaagtacaatccacacaatgaaagggcttgagaaagatatcgtttttctcatgggtatgtgtgaaggagtatttccagattatcgagctaataccaagaaagaacttgaagaagagcttaatagcgcttttgtagctattacacgcgctaaacgctggatatttgtctcttatccgcttcaaagagttatgccatggggaagtttaaaatcacagaccgtttcacggtttgtaacgatgttgcaaaaatga

SEQ ID NO: 72608 - DNA, 1839 bp, Streptomyces venezuelae ATCC 10712
gtgcaggtacgtcgggtggtcctggagaacttccgtggggtgaagagcgggacgattctcctggacggccactccttgttggtcggctcgaacagcgtcggcaagtcgactgtgtgcgaggggctggagctcgtgctggggcccgagcgcatgttccgacgaccggtggtcgacgaatacgacttctacggcgggtgctaccaggaacgggagggcaagctacccgaagtgaggatcgaagtggtcctcaccaacctgtccgacgctgccgagcgccgattcggaagccatctgcgccgctggtcggcgcagacgagtgacttcctcgacatggttccggccgctatcgaagatgccgagaccggcgaatggtgcctgccggtggtcttcctcggccgctatgaccctcaggaggacgacttcatcgggggtacgttcttcgcgcatcccgagagcgtcccggacggcctagacggggaggagagcgggctcggcgcgggactgaaatcattcacccgggaggacaagcggcactgtggattcctctacctgcggccgaaccgtacgggcaacagggcgctcacctttcagcgtggttcgctgctggacacgatcgtgcggctggaagccgagctggcgggtccgctgtgggagaaggcgctgcgtgacctggagcaggtcgccgtggccgcggccgaatcaggattcggaaagatccgtacggagatccgcgatcgcgtcgaccgctttgtcagcctcggcgacacagcggatccggtcgacctgcaggcgtctgaactcacgcgcgaacacttgcgtgaggtattgcgcctgttcatcgctacccaaccggggccgcacgccgtgccgttcaaccgactgagcaccgggtcgctgaacctgctggtgttcgccctgctcacctacatcgctgaactcaagggcgacaagtcggtgatcttcgcgatggaggagccggagatcgcgctccctccgcacgcgcagcgccgtctcatcgacttcgtggtcaaacgtatgggtcaggtgatcgtcacttctcattcgccgtacgtgatcgagaagttcgagccctcccgcattgtcgtgatcaaccgcgactcaaagggcacgctcagcagcaaccgtgtcgtcctgcctggtgacttcaagctgaagaggtaccgggacaaccgccggcagttcgctgaggccgtcctggggcgtgccgtactggtggtggagggtgctgcggaagcggccctgttcccagccgtatcggatgtgcttgaggctgatccctccgtcgcgggctacgtcccactcgacctggccggtgtcacgatcttcgacgctcagaacgacgtctccgtgcccttgttcgcccccgtcttcaaagggctgggcaagccggtctacgggatccacgaccagcccgacaagccgctcgaccccaaggtcgcggccaagactgccgacttcacgcactacacggtgctgaactataaaagcgtcgaaaagctgctggtagccgaagtaccggtcgatgcccagcgtcgcttcctcgccaccgcggcccagcgcacggactacccctccggatgcgcccgacccgacccgtccgccacggacacggcagtaaacaccctcacccacgaggtgttgcgggcccgcaagggtgacggctatgccgcgctgctcatcgccgagtgcaccggccgaagtcaactacccgccgtgctagccgatctccttctccaaatcgaccgcgacctgggaacctctgcgagcggcggagagaccgacgacaccgcccactcggacgagaccgatggaaattga

SEQ ID NO: 72609 - DNA, 1710 bp, Streptomyces venezuelae ATCC 10712
atggaaattgacccggtcaggcaagagatcctcgatgcctccggccaccttctgatcgtcggcggccccggctgcggcaagaccaccatcgctctgctcaaggcccaggcgagactggccgccctcgaacccgaacagcgagtcctcttcctgagcttctcgcgcgccgccgttcaccagatcacggaccggatgtccggagtgctggaccgagccagccgtcagcgcctggaagtacgcacctttcacgccttcttccttgacgtcgtacgaagccacggacggctgctcacaggtcggccgtcttcgttcatcacgcccgatcgtgaacggcagatccaggcggacttcgacggcgactggatgagcgagcgccgacgcctcgcgaccgaggagggccgctacgtcttcgacctcctcgccgagacaacggcgactctcctggaacgcagcgccgccctgcgtgccctctacagcagcatttacccgctggtcatcgtggacgaattccaggacacaaacaccgaccaatggcgcgtgatcaaggctgtcagcggcgcctccaccgtcatctgcctagccgaccccgaccaacgcattttcgaccacctggacggcgtcgaggagcaacgcctcgacgacgccgtggcgcacctcgcgcctacgcccttcgacctgtccaaggacaaccaccgtagccccggcggcggactcctcgactacgccaacgccgtcctgaataacaccctccacgccgagccggccaacgtccacacctggacctacaccccgggctacggcgttccgtggcagacgcatgtccaccacggggtcatcgccatgcgggattacctcaccacccagctagcgcacacaccgaccatcgcagtcctggcgagtgtcaactccctgctgggccaggtctccgaggctctggccaccgacaccatcaccggcaacaccacacttcccgcagtcgaccacgccctacaatgggatcccgaactgaccgccgcggccggctacgtcgtagcgtcaatcatggaatggcccggtctgccccgtgtggaggcagtcactcgcaccatgcaagccctcgccgacttctaccgggtcaagctgaccagcggcaccgccggcgcacgcgacaagatcaaaaccatggagaacggggtcagcgcgttcacgtccggcaagaccgtccgctccaagaccgtcaaagccgtgaccgccgcctacgacgcggggatctcctacctcggacaaccggttgctgactggccaagcgctcgcgaccgcctccacggctccaacgaactcgaagaagtcctcaagcacgcacgcctgttgcgcctactcaacgctaccgatgcactggcctggggcctatccgatagttgggacggcgactccgcctacaaagacgcggcagccaccgtccgcgctgtccttgccgccgagaccctcaccgccgcccaacaatcaccagagaccgtttccctgatgagcatgcaccgctccaagggcaaggaattcgacggtgtcatcatcgtcgaaggacgctacacaggtaccctgctcgaccctagctggtcacccgaacggctccgtgcccagcgacgcctcctgcgcgtcgctattacgcgggcgcgcactatggtccttttcgtccgcccacagggcagtcaacagctcacgaggacgcgctaa

SEQ ID NO: 72610 - DNA, 1935 bp, Flavobacterium branchiophilum FL-15
atggggatattaatagatagtgttaggattttaaattatagagcaataaaaaatttagaagtgaatttgtctaaattgacactgctagttggtgctaataatgctggaaaaacttcttttttaaaagctttgaatttggctttaggcatagatcgcaaaacagtcaatagggaggatgttcacgaagatggaactcttgatgtgtataaaaaagaaataattattgacattagaataatagctgttgatgatactggaataagaatacaggattttgatgaaaactgggcagaatctgatcgaataagtgggaacattaaaactgatgcagcggactatcaatttttaggaatcagaacaaagtataagtttgataatttgagtcaaacctttaaacaagaatcttacactttaaaacagtggttgccttttgaaaattggacattagaaacgaatgaagataaaaaatttcaaaaaccagatacaataccattaatttttgtagatgcacaaagggatattcaagcagacttaaaagatagaagttcgtttttaggaaaaatgactaataagcccgatataaaacaagatgatattgagccaatagaaaaacaaattaatacacttaatgaatcaataatatcaaaaagtagtaatcttaaaacattaaaagaaaagctaaaagagttaaataaaacggttttatctgcaacagatgaaggtgttgaaattgcacctataaacaaaaagattagcgatattgggagaaacttaaacatcaattttaatgattccggcacacaaagttttccactggaatatcatggaatgggaacccgaagttgggcatctttattaaccttaaacgcatttatttcatggcaagaagaaatcaataatccttattttccgatattagcattagaagaacccgaagcacatttgcacccaaatgcgcaacgccaactgtatcatcaattaaaggaaataacgggacaaaaaatcattagtacacattcgccatttgttgcagcacaatgcgatttgatggatttaagacatttttataaagatagtgatgggttaaaagttgggcaattagaattttcagaaccttacgaaaagagaattgcagaattacaagatcaattaaaagacccattaacagactctaaaataaaacaagccattaatgaagaaaaacaacaattacttatagagaaaagaggtaaaatcaataatgaagagaaaagaaaaattgaacgtaatatttttaatactagaggagaagcattattttcaaaagcattagtgttttttgaaggagaaacagaagaacaagctttaccgattttatttaaggaaaaatttggttgctatccatttgaaataggcatcaattttattggagttggtggaaaggacaactataaaccatttataatttttgctaaatttttaaatataaaatggtacatccttagtgatggtgataatactacagaagtagatgttaaaaggcagattactgaatcttttgggagtaattattttgaagccctttttactttagacgaacttgattttgagctatatgttctaaaatacgggtatagtaatgaaataattgctgaaataaatcaacatgaaacgaaagcggattttttatcggaatatattcaaaaccataactatcagccaaaaggaaaagatgtagaaggaaaagatattccaagaaattatacttctgatgcagatggtggaagaagtcgtgctttattagacgcattacatagtaataaaacaaaatatgccccattaattgctcaggctattttaaaaaagaaagatggtaatggcaaaactatcttcccacctaaaatagacgaattgtttaaaaaaattgcttctgatttaaaaatagatttaccatga

SEQ ID NO: 72611 - DNA, 1953 bp, Flavobacterium branchiophilum FL-15
atgacaatacaagaggaaataataaatcataaagaaggggcattattggtaatggcaagtgctggtagtggaaaaacacgtgtactcacagaaagaatcaaagaattattgaaaaatgaaagtgaaaaatttcatgttttggcactcacctttaccaataaagccgcagaagaactaaaagaaagattatctgatgtaaaaaatattgaaaagagggcttttgtaggtacttttcatagtttttgtcttgaggttattcaaagtcatgggtatgcgattaacaaaagtgtacaaccgcatatatttgaaaaaaatgaagatagaacaaatctattaatacaagtttttgaaaaacctgaaaattgggacttaagaaaacattatgaaaataaagatgcaagagagaagcaactttttattagcaatgcacttacctatatcagtaaaaagaaaaaacaactaaaaggaattgagaaatttgattttttggatggtgataatgaaaaagaactaattcaaaaaatgtacagcgaatataatgaccttttaatacttcaaaatgcaatggattttgacgatgttttgatatatgcatatcaaatattttcggatagacctgctattgcaaaattgtatagaaaccagtttaaatacctatttattgatgaagcacaagatttgaattttgcacaatatgaattattaaagataatttgtaatggagaacacagaaatgtaatgatggttggtgatgtaaaacaatctctttatgatttcaatggttctgattatgtatatatgaaaaataattttattaaagattttaatgctgaaacaaaaaaattaaacacaaactttagatcatcgaaaaaaataattgaagttgctaactctgtttatgctgatgcaatgcaagggtctgattcaattgtaactggaaaatttaaaatatttgataattgcgaagatgaaaaagctgaggcaaatgctattgtagaggagataaaaaaatatttaaaacaaggtaaatatcaagaggatggatttattggtgatactattagctacaaggatattgcaattttagcaagaagtaggtatttattaaaaaatgttgaagatctattaacccaagagggtttgccttcttatcttaaaaaaggtagtgatagtttattttttgatagtcaattaatgaaaattttcgatttagggcttcggattttaattaatcctgttgatgttttgcatttttctgaaatactagaaatatattcaattacaaccaacatttcaaacctcaataatttaagtgggctagaaaagttaaaatctattcataattttattaccgaagatgacaaagtactatactcattgctattagagagttggactattttgaataatcagaataaatttaatttaagagaagctttagttccaataatgagtttatttgaagttgaaaacattttcaaagtaaatgaaccttatgaagagtatgaaggtaaaaccatagatgaaaatacagcaattcgatttgacattgaagaacttgaaaagtattacagcatttatgctagaaacactccagctgaattaaaatcactaactcattttaaaacacaattgtcattaggtttaattctaccagaaaaagaagaaaatggtattgtgttgagtacgattcatttagcaaaagggttagaatatgaaattgtatttgtactaggtttggatgatggttcattgcctttttataaaagtaaacaaagtggcggcaaagcattatcagaagaaaaaaatattttctatgttgctgtaactagggctaaaagagctttatacctgtcttatcctaaaagtagaacaatgccttggaatccttatagtataaaaactatgacgccttcagaatttttaaacggtttaaaagaattagaaaattaa

SEQ ID NO: 72612 - DNA, 2247 bp, Streptococcus thermophilus JIM 8232
atgtatttaaaaagtttgtcgacaaaaaattatagaaaatatggcgaagaagttcagactattaactttgctcatagtaaatggccagaaatgttaggtgttgatgatgaatcgaaaaagataaatataacagaagagtatatatcaaaaagttcatcgttaattgtaggaaaaaataattctggtaaaagtacaattgtcaaattattaaatacactgcagaataccaagtcaggtagtagaaatattttcaagcatacagattttaacttaaaaatgttatcagattggtaccaagagaatattgaaagtaaatctgaagaggagataaaaagtattgataagtttcctagtatggagtttctgttggtattaggaattgatgatgaaaatgatataatttcaagtttcgaagatatactaattttaggtggaatagattcagatgaagttcaagaaaatgcggaggtggcagaagtctcaattaatattaagtatgaagtagcagatgtggtggcttttttagaagagctagttaaaattaagactagctattttgatgatagagaacagcgtgatggacaatacttagtatataaaaaagagattcggtatcgaaaatttttaggtttgtttagcagtaattactttatattaaattgttatccgctgggaagagaggagcctgctaaagaattttctctatcttcattactaaaggtagagacaatagaagcaaatacggttaaaaatgacaagacactttcacaagcttataataaaatagtttcaacttatataaaaaataatgatattgcagcaattgatagtttagttggtgatattaattatcgagtaaaggatatggttgatgccaatataaaggatattcttcaaagtgcagtatctagtattgagtcaactaagaatttacagatgaatttacatccagatgtaactttagaaaagatttttgcaaacagcattatttatgagtaccaagagggaaataataatatacctgaaagccagtttggtatgggatatactaatttgatggttattatcgcaaagattgttgactatattgagttatatagcgagaaggatattaatggttcagtaaacattctctgtattgaagaaccagagtcatttatgcatcctcagatgcaagaattatttataaagaatgtttcaaaagcaattgctaccttactaggtaaaaaacaacaactagatacatttcaaattctcatcacaactcactcaacacatatattaaacagtaagattcaatcaggaaatacgcttaataatattagttatctaggtcaaacaggtgtaaataattttataaaaaatataagtgatgatgcaatagtatccggtatagatattgataagaaagcttataaatatatcaaaaaatattttaggctagaggtttcagatattttctttgctgatgcagttattttggttgagggagtttctgaagaaacttatcttagatatgaaattgatagacatccaatattgaaatatcatcacattaaggtttatagaattgatggtgcatatgcccaccagtttattagtttgctagaattgttgaatattaaaacaattatttttacggatttggatttaaaaagaactgaggatgaaatgacggtcgatataaaggataatgatgttcctaatattattccatctaatatttctgatttagcaggaatatatgctattgcagaaagttctttgactacaaatggtactcttcaatattttataaaaaaagaactatccgatgagaatgctgaatacagtaggataaatagcaagttaattgaaatgcttactgataaagaagaattgattgttgagtataaaaatgtttccgcacattctcaaggtaaaatcaatggatactatgctaccagctttgaagaagcaattattttaactaatgctgtaaacaacaatgatgagaatctaaataaaaaatctttaattaaacttttacagtatgtacatcctagaatgaaatattttggagatattgacgaaacatcggaaatcgctgacaaatcttatatgtatcaagttaaattatctgatggaaaatcaaaattttctacagggatagtattcttatctataactgatgatacctttaatctcaaacttcctaaatatattgaatcaggtttagagtcgctttgtgattatttcaaggagtaa

SEQ ID NO: 72613 - DNA, 2016 bp, Streptococcus thermophilus JIM 8232
atgacacatacgattagtccagaaaatagagaactagagttaggcattcagcaaaaaattaatgaatgtttagataattttgagagcttttgtttcaatgctggtgctggagctggaaaaacctatgcacttcaaaaatcaattgagcatattttgaagacgaagggagaaaatttaaagttaagtaatcaaaaaatcttatgtatcacttatactaatgctgcaaaagatgagattcttaatcgacttggcaaaaattcctcgtcagtagtttctacaattcatgaatttctttggggatttatttctatccagcaagggttattgactgtagagcataataacaagatcaaagaggaacttaataaaattgaacaaaagataaacgcgaacccactttctggaagtgtagatctggaggttttccataaggaaattagtgatgaagaatttttgaaaatattctacagtacaccaataacccctgcaagtaattttaaagatgagattataggatataataaatactttagcgtttatctaggcaatgtaaaaaattttaccagtttggttaaggatgttgaaaagaagtgcaaacttgaagaaacgttgaaagaaattgagaataagaaatctagaaaaatcgtctataaccctattcgaaatcaagataaacttgaaaattatgtcattagtcatgatacgttgttactttactgcaaaaatattattacaagtcataatttattaaagagattattttcagatagatatccttatatcttagttgatgagtatcaagatacagatgaaaaagttgttgctattattgatagtgtcagggaatattcaaattctaagaaaaacttagtagtaggattttttggtgattccttacaaaatatttacggttcaggagtaggtgttctgccaaataaagaagaatataagagtattgagaaaatctttaatcgccgttcttctaagcaaatagtagagttaattgaaaaaattaggaatgacaattttggtcaacaatctatatatagtgattttgataatggatcttataatttttacatagctggtaaagattttaatttagatacttttttacaggaaaatagcctgactaataatacatcctgtcttctaatgaaaaatgatgatatttcaaaagctcgaggatttgatgaactattatcagtgttgaagaagtttccacgatttagtggtgctaactacgaaaacgtgacaaatgaatttttacagaagaatttacagcagatgggatggtttttaagagagattttaacttttatagatttaattcaaaagtcaagggataataattcaacggtcagggagattgtccagtttgtgactccatctaaattaatgataacatttgcagagatgaaacagtttattagtagctcgagagagattaacctatcaacattgacaattgataaatgtattactgaaattgctaatattcagggacgaatctcaggtgaagatattctaagaaaaatattctcgatagatgatactgccgagaacattttattgaatataaagaatcgtgcctatgattatttttactattctcaagattcggaggagtacgaaagagaagtaacagttattgatgaattttttaatctagatgtttctcgttttatcaaatggtatagttatatttttgatgatctaaataacaaggcaatctgttactacacattacacggttccaaaggtctagaatttgataatgtagttgttgtgttacaagataattttgctaggaagagaaattattgtaaatatttttttgaaaactataatactttaactgattctgattcacaatttcaagaagttcgcaatcttctctatgttgcttgttccagagcaaaaataaatcttcatgtgatatatattgctgatatacaagaagacatagtagataatatcaaaaacatttttgatgatataaaatatttaccataa

SEQ ID NO: 72614 - DNA, 2004 bp, Corallococcus coralloides DSM 2259
atgctaacgaaggtcagtattcgaaattttcgcctactacgcaatgtcgaaatgctcttcgacgagcaatccacactcatcatcggacgaaacaacagcggaaaaacatctctcgcagaactctttcgccgccttgtagaggatggaattcccgccttcaccttgcaagacttctcattagacactcacgaggagttctggaatgcatatctcctcagcacacaaggccagctagacaaggcccgagacacccttccctcgattaaagtcacactcacattaagctacgatcaagaaacactcgatcttggacacctagcagacttcatcgttgaccttaatcctgaatgctcagaggtccagattgagatcacctacgcacttatcccggaaaaggcgaagccgttcttcgaaacgccagcaacaactcatgagcaaccacctccagacaaagcgctttttttccgaaccctcaaggagcgactgcctcaccacttcaggtgcacgctcgcatcggtcgaccctaacgacgcaacgaaccgcaagcacatagagtggtcaaaactacgcctactagttcaaggcaatttcatcagcgcccagcgcggcctggacgacataacgcacaaagaaaacgacactctagggaaaatattaaactccctcttcaacaccgcagaatcggaatcagctcaccaggacgatcgaaaaacaacacacgatctgcgagcagccgtcagcgacatccaagccaagctcgacaccggcttcaacgaaaaactcaagaacctactcccagcaatcaacatgtttgggtaccctggactagcagaccccaacattctcaccgaaaccctactagacgtcggtctgcttttaagaaacaacacaaaaatacgatattcaggcaacaacggagtgcatctaccggaatcatacaatggcctaggcacaagaaacttaatctacatcctcctaaagcttcttgaggcattcaagacattcgaggccaaaccaacaacaccaagcgcacacgtcatattcattgaagagccagaagcgcatttgcatccacaaatgcaggaagttttcatcaagcaacttgcactcctgtcggaaatgttcaccaagaagtccaatctcacaggcaagtggccagtccaattcgtggtgtcaacacactcctcccacatcacaaacaaggtttcttttgaggcaatgcgctacttcctccctgcctcggggattcccggcgcgccagccactacgacaaaaatcaaagacctaaagaagggccttaaagaaattccaaccaaagatcaggaattccttcaccaatacctaaccttgactcgatgcgatcttttgtttgccgacaaggccgtgctcattgaagggacggctgaacggctcatgatgccccgcatcattgagaagctcgatgctcagctagccgctagtcaaggcctcggccgccaatacgtatcgatcgtagaggttggcggggcctacgcacataagttcttgggactgcttgacttcctggaactcaagacattgatcataacagacttggactccgtgtcggcatcacgaagcatctgtccagtctcacaagggacgctaaccagtaacgcatgcattaatcactggttcgacaagagctactcccctgccgaactcatcctcaaaaccgccgaagagaaaaccaaagggcttgtgcgattggcctatcaagtgcccgagcagccctctgggccctgcggccggagcttcgaagacgcattcatccttgcaaatctcgccatctttcctggctgccaaaacgatgaatcgcacgcgatggacgaggcaaggcaaaagaagaaatcaacctttgcgctcacatacgccatccatgaaaccaactggcacatcccccgatacatagcagaggggctcaattggcttgccgctagctcgactccagtacatccatcggcaaaaattcaggtggcagcatga

SEQ ID NO: 72615 - DNA, 1758 bp, Corallococcus coralloides DSM 2259
atgactgttaccacgccaattgaccccgctgcggcagctgccaacgaagctatttccaagattcgcgactgcatagatctcggtaagagcttttgccttgaggccggcgccggttcgggaaaaacacactcgctcgtcagcgccttgacccacatagtcgaaaaacgtggaagagagctcgtaagaaagcatcaacaggtcgcatgcatcagctacaccaacgcggccagcaaaattatttccgcaagaactgatgaacaccccgccgtctttgcatcgaccattcactccttctgttggtcgctaatcaaggactatcagccatacttgcgcgctgaactatcaaacgctcccaattggactgaacggctcaccaccattggcggaatcgggaacagaagcgtcgaatacaatctcggtcatcccgtcgccaacaaggaggaagccagcgtttcccttggccatggggacgtcctcaagctcgcgacaaagttactaggcaacagcaagttcagaagactgctcgcatcgaaacatcccataatcttcatcgacgagtatcaagacaccgacatagacttcattgaagcaatcaagactcacatccttgagaaatccagcggccttgtttttggattctttggagatccgtggcagagaatttacgggcgctcttgcggagccttcgattcctcgaaaattgtctccattcaacaaggggcaaacttcagatcacgtcccaaaattgtcgagacactaaatcgaattcgtccgagcctgccgcagtccgtccgtcctcacgaagaacgtggttcagtcagtgcttatcataccaacgactgggctggagaacgccaaaccggcgctcaatggaaaggtgacttaccaccaaacatcgctcgcgatcacatcagagcaatgcgttccaatcttgaggcgcaggggtgggatttttcccccaaacggacaaaaatcctaatgctgacgcacaacgtcctagctcaagagcagggctacagcggaatagcgcaagtattcaaagggcggaatgacgactatgccagcaaggaggacgatcacatcaaattcctcgtagaggtgatcgaaccagcatgccgcgcctatgagaagaaacaatatggcgacatgttttctgcacttgagtcaaccatgccaaccgtgcgctctccttctgacaagcaatcatggacgaaggatatggatatgctgatagcacttcgaacaaccgcaaccattggtgcggtactagaccatatagccgcaacaaaacgtccaccattgcctgatgttcttgaagggaaagagcgagagttcaagaatactcaagtggcggacgatgaagccacctcgtggatgaccaggcttcgagctctccgacaagtgccttaccgagagatagtcgctctggcgaacttcctcgatgcatcaaccctctactcgacaaaacatggggtcaaaggggatgaattcgagaatgtactagtcgtcgtcggtcgaggatggaatctttatgacttcaatgaactactagaactctcctcctcgccaaactctataaaccctaagcgagcagacgcctacgaacgaaatcgtaatctgctttatgtagctctctcgcgcgccaaggtacgccttgccgttctcttcacacagaagttgtcaaaccaagcaacggaaacattgtcgtcttggtttgggggagaaaatgtttattcactcaaactccagggcacctaa

SEQ ID NO: 72616 - DNA, 2091 bp, Ruminiclostridium thermocellum YS; identical to SEQ ID NO: 72214

SEQ ID NO: 72617 - DNA, 1743 bp, Ruminiclostridium thermocellum YS
atgatgataataaattctgatactagaataccaattgaaaaccattttagagtttctgcaggtccaggcgctggtaaaacacattggcttgtaaatcatataaaaaatgtgttgcaaaattcaacaaggttatctaatgcaaggaaaattgcatgcataacttatactaatatcgcagtagagacaatactaaaacgtttgggaacagcagctgatcaagttgaagtatcaacaattcatagttttttgtatagacatgtagtaaagccatattgttcgtttattgcctctgatgtaggtttgaatttggaaaagtttaatggtcacaatgatactattgttagtaattctagaataaaacattggttagaaaatcttccttgcaaagatcagttaaaaaagccttgtgaatgtaaccagcttttatattcgaaagtccataggaaagcactgattaagtggctcgaaacattatattatagctttgataatgataagttatacataactggagatagtaaaaaggcatattacgggaaattgcatttgactaatcaatgtttgaaaatactcgaatcagaattatttcaatataagaaattatattggaaagacggtatagttgaccataatgatattctatattttagttataagcttatagaaaaatatccttttataatacaaatactaagagctaaattcccatacttttttattgatgagtttcaggatacaaatcctatacaactttctttaataagaaaaataggccaaaaggagactatagtaggggttattggcgataaagcccaatctatatattcatttcaaggtgctagtatgacacaatttgaaaaattttatcttccaaatttaattgattatgttatggtagacaatcgtagaagtacaaatcaaattgtcgatgtattgaatttaattcggaaagatattcagcaaaataaatttcgcaaggtagaaggtgatttgccagttattttagttggtgatagaaataaagggtatgaaaaagcaaaagagttatgcaataatagtgaaatctgtactttaactagagacaatgcaactgcgaatagtatgaaaaaggaaattgatgaaaatatttcagataaaaatttatttcttgaactaaaaatcctagatagtaattcaaaaaggtgcaatgtagtttattcatgtatacaagcagttgaattagcaaataatggtaattacaaagaagctataaaaaagctagaatatttatttacagaaaggaatgataaacacgcagttaaaaagatggctttgagttgtttatgtttgttaataaataactataatagttttaaagataaaactttaatggatttttacagctttgttaaagataaaatctttacagatttatcaaagtttcggaaaggaaatattaaaactttttatgaaaaacatacataccaacagttggccgcatatgtaaatatagtagatgatattagttactttaaaactattcataaagcgaaaggtgatgaatttaataatgttttactcatattaaaagaaaaagatttagattttttattgaagcctaatcttcttaaaaatgaagaacataggatttattatgttgcaattagtagagctaaagagaaactatttatttgtgttgataatttaaatccgcaaaatattttaaagttaaatacactctttaatattgttattttaaattga

SEQ ID NO: 72618 - DNA, 2091 bp, Ruminiclostridium thermocellum AD2; identical to SEQ ID NO: 72214

SEQ ID NO: 72619 - DNA, 1740 bp, Ruminiclostridium thermocellum AD2; identical to SEQ ID NO: 72215

SEQ ID NO: 72620 - DNA, 1752 bp, Escherichia coli KO11FL
gtgaaaccccatcatgaaaaggaattttttactttaaagagggattttaagttggaaatatcatctctgaaacttaaaggttttagaaattttaaagatgcatacatcaattttaattcgaacactctgatcatcggagctaatgatgttggcaaaagtaatatgctgcattcgctaagaatgctattagataaaagtatctcagattcagaaattgaaccaaatgaacttgattttcatttagaaaatggaaattcatgtgaagaatttgaaattattattcattttaaaaatatcaatgaagatgcagtactttctattttgaaagggaatgtcagtgactcaggtgaatcgttcattaagtatttcgcacaaaaatcggatctcagctataaactttttattggtgattctttagagtctttacaagaaatcaattctcgctattatcttaaatttgttaatttaaaatatattcagtctcaacgagatttagagagatttattcgaaaagaaaaaagacaactcttaaaaatcgcacagcaatcactgaactctgatgaaagagaagaagatgattatttattaggagagataagttcagatttacagttaattaatgataagatatctcagcttatatatgtagaaagagcaacaaaagaagtcaacgatgaacttaaaaaacttgcacatcattactctgaatattctgttcagttagatactggagccattggaataaatgactttattgataacctacaacttggagctaatacaaatggttctaacgtaatgcttggaggagacggacgaaataatcaaatcttattagcattatggaaagcgaaaagtattaaggaacatgatgtcgataacgaagttatcttctatgttatcgaagaacctgaagcacacctacaccctcatcaacaaagaaaattagctgattatttgatagctgaacttccaggtcaaacaatcatttcatcccactccccacaaatagcggtaaacttcgagccagattcaataataagattgcttgaccggggggggcacactgtagccgcaagtgaaggatgctcgaaaggtatttcagatggctgggaagatatgagctatcggatgagtatattgccagcagaatcattcttttcaaatggtgttttcttaatcgaagggccatccgaaattttattttaccattccttggctaaaagtttaaatattgatctggattatttgaatatttcattaatttcagtggatggaatatcatttaaaatatatgcagcaatacttgatgctttagaaattccatgggtaatgcgaactgataacgatatatcaaagctaaaaggtcaagagaagtggaactatgcaggtataaaccgatgtttagatatagttggtatcgaaaagtttgagcatagcgataaaaaaataacatctctagatactcttaccaacggtgactggcaaacagtatctgaggtaataaataaatcgggagtatatttgtcaaaaattgatttagaaaccgaccttgtcgaggaattgagtgctccaatattagatgcgttagataaaaaagataatcaaagtgcaattgaatacttacaaaagaaaaaagcaataagaatgcgtatacttctaaaaaaaatcaaaaaagaccttcataaacttaatgcgggtgatttggttaaaccgttaaaccatcttgtaaaaatagttaaaggtgaatga

SEQ ID NO: 72621 - DNA, 1626 bp, Escherichia coli KO11FL; identical to SEQ ID NO: 71985

SEQ ID NO: 72622 - DNA, 1752 bp, Escherichia coli W; identical to SEQ ID NO: 72620

SEQ ID NO: 72623 - DNA, 1626 bp, Escherichia coli W; identical to SEQ ID NO: 71985

SEQ ID NO: 72624 - DNA, 1857 bp, Geobacillus thermoglucosidans TNO-09.020
atgtatatttccaagatttcgattaaaaattaccgtaattttggaaacaaaccttttaaaatgaagttgaataaatttactgcaattattggcgaaaataatgtaggcaaaacgaatttgcttgattcaataggattaattttaagtcaagatattactatgttcaaaaaaagaatgcttgaactggaagatataaactatgaaagccggaaaaaatttaagtacgatgtattgaacgcttcaattaagccagagaacgttgaatttcccgaagttgaaatccaaattatccttgaaggcatgaataaaaaacaactgtcagtagttggagattggttttgtgatacctcattggaaaaagcacgattaacctatatttttaaacccagaagcggttttgatcgaaaagaatgggtaaaagaacaaagagaactaatagataaaatcagaaaggaaaaaggaattgaaaatccggactatcttgtaaaactgatagaatttccgataaaacagtacgaatatacaatttatgggggcaatgacgtaacaaatcgctgcgatccgtattttctgagaatgttaaagtttgagttactagatgctttgcgtgattctaagcgcgaactaattgccaacggagagtctaaactgttatacaaaattttaaattacagaagtgaaggagcatatgaagatatcaaagaagttttaagtagtttggatgagaaaatgcaaaataatcctcgattgaaggatattaaagaaacactagtcagtcagttaaataagctttccttacaagaaaaggaagggtataacaatattgattttcatttctcatcgcccgaaacaggggagttgctgaaaaaattaagtttaatctatggacaagatcctattacaatcgaacgaaacggactgggaagaaataatttgttatatatttccctgattctttctcgtttggctgaggataaaatttcagaagatatctgttttcgggttgtgggaattgaagagccggaagcacatttgcatcctcacttacaaatgcatcttgcaacgaatatcgaaagtataaatagtgacagagatgacttacaaattatattgacttctcattcatcacatattactagttcattaaatttagacaacattgctattttatataaggaaaataatgaaattaaggcacattacataactcatggctttcaaagcgataaaaaaggcaaaaatcatcgccgatatcttgaaaaatatttggatgcaacaaagtcaaatatgttttttgcccgaaaaattatccttgtagaaggcattgccgaacaaatacttattcccaagttatttgaattacatacaggcaaaaccttagagcgcatagggtgcaacatagtaaatgtaaatggcgttgcttttagtcatttcctagaaataataagaaatggctattttataaaatgtgttgttttaacagatggcgatttaggaaccaaaaccgaagaacgtgcggaaaaactcaaggaagagtatgaagatgattatatcaaagtagaaattaacaaagaaacttttgaaaaagaacttatagaagcaaacaaaacaggagaagggaagcaaattttactgagagccttaaagcagaccagaatccaaaaaggtcctaaatatgaagaagaaataggagatagagcattggataccgacagtttttttacgttaattgaagattataaatcagaatttgcttttaacttgcatgaagaattaaaaggactgaaacaaggggaagcagcctcgtttaatctgcctgagtacataagaagagcatttgatttcctagaggggtaa

SEQ ID NO: 72625 - DNA, 1545 bp, Geobacillus thermoglucosidans TNO-09.020
atgtccaaaaaattaaagccgatactagtcattgcgggtccgggtgcaggaaaaactcattatttggttgaaaaaatttgcgaaagtcttccatcactggaatctcacaggtttcttgcagttataacatatacaaacacagcaaccagcgaaatcagggagcgtttatcaaaaaagatagaaataccgcaaaatgtatttatcgggacaatacatagttttttgattcgttttatacttaaaccattcggaagtatatatggagtgttgccgaataacccaatatataaagaagtaaatgtaaatgccaaagataaaaaagaagaacatattataaaaagccaaattgtaaaaaagggcgttgttccttatgaaaaaataattagtttgtctaagaatttaatgaaagactatgaaaaggtgagagtccttgtttctgaaaggttgcaatatctatttgttgatgaatttcaggatatcgattctggacaatatgaaattttcgagagtattcggaaacaacaaaaaacaaaaatgtattttgtaggggaccctgaacaaagtattatgacttttcgaaataacggtcgtaaaaagccgctaaataaacggccaatttatgaggctatgcagtctaaaatgattgaaaaaaagtttttatacaacaatcatcgttctagtgttaccattattgattttttaaacaaatttcatacttccttgaagcaagtaaaaagcaatgaagagattgactcacaaaataaagttgtttttattgacgcgcaagatattagaaagataattgaagaatttaaccgtctctgtaatgaccaaaagtattgcagaaataaacctaaatcgcgtttttttcttggatttaagggagatacctatacaaaagttgaaaatgaatatggattaatacaaaaagagagcaacgaatcaaaccagcctaagttcattgaagaaacttcacattttattactaagctcttaaatacaaatcagaataatattattagttatatgggtattgacgatttgcaatatagaatgctttgtttaagtgtaatagatataattaagcaaaacccgtttataagcagcaaaagtttgattgattatataaaagtaatatttaagggggatccttacaagacaattcataacaagattcagcataaaccggatgagcttgctgaagagtttataaaaaaaattaattctgaattacaaggaaggtttaatttacaaaaaactgaagattaccacttaactattcataaatccaaagggcttcaggcagacgccgtactggttattgctagaagcaaaaaagaattaatgaaatggcttgaaacagatgtggaggctaggctggcagataaacaggatacttgccgcgtgggatatgtggcgtttagccgtgcgaaggagtttttatgcattgcttgtttggaaaaagttgatagtgaattgcgtgaacatatgattaaactagatatagagatagtaccattggctgagaagttattgaaagtttaa

SEQ ID NO: 72626 - DNA, 2124 bp, Vibrio tubiashii NCIMB 1337 = ATCC 19106
atgtttataagtgagctttgtatagaaaactttagatgtttcgggtcagggcaagataaattggtcatgccattacagctagggcttaatactctagtcggcgagaatgatgcgggaaaaacagctatcatcgatgctattcgcatgcttttaggtactagagatcaggagagtatcagacctagtattgatgatttccattactctgactcaaaagaccaatctaaaagtctttctattgcggttactttcttaggtttaacacttccagagcgggtgagttttgctgaatatctcacttatcagcctgagaatacggagaatcctgtgatcttgaaggtcactttacgagcagtgctacagaacgataaagttcgcacgactatattttctggtaatccgacaggttcccatggtcttagagaaattgatattgaaacaagggacaaactgcgttcaacctaccttcgtccgttgagagatgctgaaaaagaaatggacgcgggaaggagctctagaatttccaagatcttaaaaaggcaatcagcgattgatgaaggagaatcgatactagatatttctgccgtgtcagaagataaatttggcgaagtagtagagaagttaggagtcgttggtattgctcgactagttaaccaattattagaaggtcatcctgctgtaaattcaaccacgaatgaactaaatgttaactttctaaaacccctacaaatgttgggtgataaccttcaagcaaatttggggattggtccaaacgccgatgatgaaatgttaaagaggcagatgcttgagaaaataggcatagctttagataacgttggcggtaagcgtgggcttggctcgaataatttattatatatagcatgtgaaatgctattactgtctgagtctaaagatgaacttgcattattgataatcgaagagcctgaggcgcatttacaccctcaaagacaattgaagttaattcaatatctacaagataaagtgaacaagcataagcaagatcacgagattcatctacaggttttattgtcaactcacagtcccactctagcgtctaaattaccgataaagtgtatggtaatggtacataaaggtaaggtgttacctcttagcatggcaggtagtacagacggtgactatacatttcttgaacgttttatagatgcgacaaagtcgaatttatttttctgcaggggtctgatgattgtagagggggatgcagaaaacctcttattaccatcggttgcgaaaatactaggtctcgattttacagaaaacggtgtatcaatagtgaacgtaggtcacactggccttagtcgctatgctaatgttttttcgggcacaagcgagtatccaaaccctggaattaaagtggcgtgtttacacgatttagatttaattccttatcaagcagcacgggaacttaatctggagtcggtgaaagacaaaactgaactatctgacttgtgggatagctttaacacatccttaaaagcaggtgaacaggttgactttgaacttcttaactcgcaattgccccaaaatgttatttctggctttgagctcaactccttcgaccaatctaaggtgaccagtgccaatagggagtataaaggggactttgttaatggtttttactctagtccttggacattagagtactcgcttgcatttcatggtttagcgaaagaagttaccatcgctgcttgccttgccaaggccgaaccatccaagcgctacgatcaatctaatcatgaaaaaatagtttcagttgccgaagattattatgagtacttgaatgggacgtacagtgaaagtgaagtcttggcaggtaaggtttatgaactatttctatcatctgttaacgtttcaactcatattgaaaacgaacatgctggtttagttcttagcggtaaagcatctaaagccgcggctgggcaacaccttggtcggttgctcgaaatgatggaccaaaagttagaaagtgatggatacacacaaagggatcgaatcgaacattggaaggatttacttccaattgcagtggtagaagcagttgagcatgtaatcccatcaatgcttttggagaccgaaagtgactaa

SEQ ID NO: 72627 - DNA, 2220 bp, Vibrio tubiashii NCIMB 1337 = ATCC 19106; identical to SEQ ID NO: 72447

SEQ ID NO: 72628 - DNA, 2130 bp, Streptococcus sp. SK643
atgagaattgataaaattactattgagggatatagacgctttaataagagtacaataaatttaaatcatggaaattttgctattttagcaggagctaataatagtggaaaaacttcgcttattcagctgttagacattgttttcaataataaatcaagaaagtcagtggattttaatgatttttctatctcattaaagtctttgttggataaaaaagttaaggaattagatctttcctcagattttaatgatgagaagttcattgaatttataaattatattaatgaacatataaaaataaaacttcaaattgtattgtcctatgatgtggaggaatccataggtctatttgcaaactacctaatggatctagaagatgatatgcggaacttttattttgaatacaattataaactcaatacagaggtaataaaagaagaatttattaaacaagatatcaaatcagctacaatacttcaagaaatcatagaacaaaatacagaaagtatttatttttatgctgataaagatttcaataataagaaaattattgaatataaagattttaaaaaattattccattttgaatatatatctgctgatagagaactagatgatgaaaatcttaaaaataaaaagataactacatcaattatttcatcatccgattccactaatcgtgattctgtatgggatagtaaatttgatgaattaaaaaataaaatagctaatgatttggctgaatcagaaattgattatagttttcaaaaagaaacacaaaaaattttatctgacttaaaaggtagtctagataatgtatcaaaaaatgaaattgaagctttagaagcgaaatttcattttaacgaaaagaatttattgaacttgattaaggatagtttattaataaattattcacacagtactgatgaatttttgtttagtttaactgaagaatcccagggtctgggtattagtaatttaatttatatgagtcttcaaattgatagatttagtagaactattcaaccaactactgttaatttatttgttatagaagaacctgaagcacatatgcatatacagatgcagaaagtgctagttagttatattgaaacgatttttagtagcaaaaaaaatctacagggaattattacaactcattccactgaaattgtgaaaaatgtagatgttaatgatataaaggtaattcgttcagaaaataactttatgaatcgtattgttgatttacatcaatttattaacgataatggagaaaaagaattttatgaaacattctttaagttgaatttcgcagacttaattttttcagatgctgttattttttatgaaggagatgcagagcgaatgtattttgaaagtttgattaataggaaggattcaaagtacagtaatttagcccgacaatatttaagttattgtcaatgtggtggtgcttatgcacataaatattttccactattaaatgaattggaaattatggcctgtgtttttaccgatattgattatgataaagaaagagaggagttagatggaatatgcagagataaatcttctaatacgactttaaattcaatattatctgctgacaataaagatgttgctgatatttatcaacagcagcgtcaagatagagaaaagaatatagaaatttttacccaaacatatagagatggatatgctagaacattagaagatgctttattatataaaattatttctccaacaggggaaatgaaaagtgtgtttgaaaaatttaacaaatcggagtgggacaaatttaatgaatcttttgaattgacactacctaatattacttctggcaaagagtgtagtatgaaaagagaggaaatatataatagattagatatatcaaaagaaaataggaaaattgactatctgagagataaccatcctgaagagtatgctgagtatgagaaattcaaagaaacatgtgaaccaaaacgttcaataagagatatagtttcaattattgataaaacaaattttatgtactcaattatttttaaagataaagtaaatgaagtgttacctaattatatcgaggagggattatcgtggctcaacaacaaaataacttctacaaaataa

SEQ ID NO: 72629 - DNA, 1977 bp, Streptococcus sp. SK643
gtggctcaacaacaaaataacttctacaaaataaatgctcctgctggaagtggcaagacttactttattagtaagactattaacgatattcttaataatgaaccatttgttaaaattttgtgtattacctatactaatagagcctcccaagtaatgcaggaaagaattgtttctccaaacgttgaaatatcaactattcatagtttcttaaataagtttttaaagccattctttagaaatgagaaagttatagactattatcttgaaatttataaagaagaaattgagactacactcaaagaagaaacaaaattaaatagatataaagaaagatttcaagtagagggtgaagtttctgaggagacaataaaatcaaatttatatgaaatttattataatgaacgacaatactcatccgtgttaaatggtggtttatctcatgatgatttattgaacttttcatttaaattaatagatagatttcctaaaattgggtttaagttacgtgagatgtatgattatattttcattgatgaggttcaagatacaaatgcagatattttgagatttttttataattcggctaaagatagttcaacaaatgtttattttcttggagacaagatgcaagaaatttataataaatatgatggttcgtttgaaactgaatttagagaatttgatggtaatctctcaaaaacctttaccaccaattaccgatcctctgaagaaatagttgatttattaaataatttataccaatcttcttctagagtaaaacaagtcgcttacaaaggcaaaaaaggtcaattccctcaattagtcttcacagataacattgaaaaatatttatttgataatagagaggcttacgaaaagttttataaattaagaacaattaataaaaaaaggtttcaaaacatcaataatagtggaaagtctgctgaagaaatctataaaatatatcagaaaatataccctaataatggtcgtgttagtgtaatggatgttctggttaacagtaactatgatgaaaatcctgatgtgctaatgtcttttttaggtttgctatttcaggtattgagtgaatatcatagtaaaaattatggtgaaatgatacgactcttaaaaaatagcaaaaataacttatcttttggtaaatctgttccagtttttgacagcaacattttgaaaattgaatttcatcaggataaggtaaagatgaaagaaaaaatggatctctttgttaagctattggaatctaaggatcttttaggaattgtaatccaagaattggtagctaataaagttattagtgatgacttttataaatttatatttttatatgacaaaaacggagattttctttatactgatttattttgctcttcaattgaattatttaaattgatagatgaatataatagaactcccatggtgtcaacacaacatggggttaaaggagaagggcataaaaagatactatttgtagcagaaaattcaagtaccccaggtattaagatatatgaatttctaaatctattttcaagtttttatactcaaaatattgtatttaatttcgatagttttcaacagttttattatgattttaatcatgatattttatcactagaagaaaaattaggaaaaaaaataagaaaaattgatgtaggtgatagagaacgatactttagtgattttcaagagatttttaataagtacctagataatgattattttaaatttatttgtttaaaagaaaataaacttaactttcaaaagaaaacagcaataaagaagatacaagaaaatatttttaataataatttagttagatcagtcttaacagcttacaaacttttttatgttggatgttctcgagcagaggaagaattagttgtattgattgatgcaaatcaaattgacaatatggaggaatttaaaaattgtttcaaccaaattggttttcagatatag

SEQ ID NO: 72630 - DNA, 2190 bp, Staphylococcus aureus subsp. aureus IS-125; identical to SEQ ID NO: 71904

SEQ ID NO: 72631 - DNA, 1794 bp, Staphylococcus aureus subsp. aureus IS-125; identical to SEQ ID NO: 71697

SEQ ID NO: 72632 - DNA, 2190 bp, Staphylococcus aureus subsp. aureus IS-157; identical to SEQ ID NO: 71904

SEQ ID NO: 72633 - DNA, 1794 bp, Staphylococcus aureus subsp. aureus IS-157; identical to SEQ ID NO: 71697

SEQ ID NO: 72634 - DNA, 1707 bp, Staphylococcus aureus subsp. aureus IS-189
atgtttatatctactcttcaaattcgaaattttagaaattatgaatccgaaatctttcgattcgataatgagacaaatactattataggtgagaatgattcagggaaaaccaatgctcttactgcattgagaatcttattagatgatagttattactatagtagtaaaacactgaaagaatcagatttttttcatggaattcaaaatgggtggcaagggcattggattattatctctgcgacatttgaaggaatcagcgaagaagaatttgacaatgagatttgtgcttccatttctttaaattctgaaagtcaaacaatcttagaagaattgatttcaaatgcagataaaggtgtaggtagtatttctctatttattagacctaacaaagctattagaaagcaattatttgatatttccactgaattagactctcatcaatttaacgaatttagaaattctattcgtctatccgactatgaattttactacacatctaaatcaaatctaaatttctgtatcaatgaaaattatgataaattggtaggaagactcaatgacaatatagctagtaatcctgaagaagacgatgaagctctgttgggctcaagaattgacatgtcagatattttcaagcatatttcggttgtttatgttgacgctcttcgagatgttcttagagaaatgaaaaacaatcgaaacccagtcaaaagaatcatggaaacaattgaatcaaaaatatcatcagataatgttgagtcattaaaaacaattatacagcaattaaatgagactattaccagtgttcctgaaattaggaaaattggcgaaaatattaatcggcaactaaatagcataattggttcagtgtattctcctaatcttcttctttcctcaactatgtcagatgatatgggttctttagcaaaatttctttcaatgaagccagaacaaaatatcgacttagacttactagggttaggacatctaaatatgatttatttagctttgaaaatagtcgaatttgaagcgtgtcgttcaagagaactacttaatattatgttgattgaagaaccagaagctcatattcatcatcatattcaaaaaactctgttcgaaggattaaatcttcaaaaaaactatactcagattctcatgaccacacattctgtacatttagctgaagtgtctgaaatatctcggatgaatgtattaaaatcgtttaatggcaaatctatcgttatgaatccagcaaataatctgaactcatttgctaaagaaaagttaaaaaagaacaatctaaatctaataaacgcagtagagagatatttagatgttaaaagaaatggattgcttttttctaaaggtgttatcttagttgaaggagatgctgaagaaatacttattcctcaaatagtaaaaaaattatttggtataaacttagacgaacttggaataggtttgattaatgttggtagtacttcgtttgaatatatcgctagcttgtttgacgatgatagaatacagagaaagtgtgctattgtaactgatttagatgaacaggcaatcccatcagaacatcgattgtataaaagcactgcacaagagaaaggtcaagcaagaaaagaaaattatcctccctttttaatgaaaacaattgggttaattgtttttatgctaatacaacatttgaaattgagtttttag

SEQ ID NO: 72635 - DNA, 1794 bp, Staphylococcus aureus subsp. aureus IS-189; identical to SEQ ID NO: 71697

SEQ ID NO: 72636 - DNA, 2034 bp, Streptococcus infantis ATCC 700779; identical to SEQ ID NO: 72288

SEQ ID NO: 72637 - DNA, 1923 bp, Streptococcus infantis ATCC 700779; identical to SEQ ID NO: 72289

SEQ ID NO: 72638 - DNA, 2028 bp, Pectobacterium sp. SCC3193
atgcagctaacaaaaatttttatctctggctttaaaagtatatctactgatcacccacaaacaatatcgtttgacaaaaacattacaacatttattggctcaaacgggacgggtaagagcacagtaatggaagctttatgtaagctgttttgtgttgatcactcgttgagaggaatatctgccaacgatttttataacaattcagaaggttcagaaaatgataaacatttaataattgaagcttggtttaattttccagaacctaattctggtgaattgtgcattcctcctttgatagaacatttaacctttgatgatgttaccgatgaacttgtttttcgtattcgtttagaagcaactttaagctatgagttgaatccattaggagacatagaggaaaacgtgtggatcttaaatagtagtgatgaggatcctgacgaaaatgatatgactaaatgctcttctgcaattagaaactctatacagttaagctatgtgccagccaatcgtgatcctttaattcagttgaaatattcatcaaaagcagttttagggagactacttaaagcaatagaatggtctgatgaaaatagagaattgcttgaagaacaagctaatagccttaatcaattgactgatacgaaccccgcatttgcagaaatagcacaagcaattaataagagttggaatagtgtatacaggggaaggtatttatctcaggctcaacttaaattcccaatatcgaatattgatgaaatattaaagctcttacagttacagtttgacccagatgagttaggaagcaaggttagtgttgaaagactgagtgatggtcaaaaatcattggtatatttctctctcattaaagctatgtttgatattgataggaatactagaaaacttttgtcagaaggaaaagattgtaattttaatcatgaaaagatgcgattaccaatatttaatatgatttgtcttgaagagccagagaaccatttatctcctcattatctaggcagaattatatctttggttaaagaatatggtgacaatgacttttgtcaagttattgtatcatcgcattcaccttcaattctaagtcgaattgaaccagaacaaatccgtcattttagaatggataatgaaaatagaagcactgttatatgtaaactcgcccttccagacgatgctgatgaacattccaaatttgtaaaagaggctgttaaggcttatccagaaatatatttttctaaacttgttatatttggagagggggatagcgaagaagttattttacctaaattgcttgaaatttattcgagaaatatggattcgcattctatatcagtcgttccacttggaggaaggcatgttaatcatttttggcgattgttaaaatcactaaaaataccttatgtaacactacttgatttcgatattggtcgtaatggcggtggttttggaaggatgaaatatgctgttgaacaagtaattaaagtaggcggagggacaaggtttattaaagattcaatattaaaaatcatcccatcctggaatgaatcatgtaaccctaataaatataaaattaaatatattaaagatcatcctgagccaatttcaaagcgtgttgttgagtctctagaagaatgtaatgtatatttttcttctcctttagacattgactattctatgattagcgcttttccatatatattttgcaataaagatgaagcatatggagaacaggggccaaataaaataaatgaaaataaagaaaaacaactaatagatgctgttttgaaaagtgataatattggggttcaagacggtttcggtaatgattatattaataagtttctttggtataggtatcgatttttatcaaataaaagtaaaccagcttcgcatttgagaatgttttcactaattgaagataaatactctaatgatgaaataattgaaaagttacctccagagttgattcgattattggataaagtagtcaagctttcagaggagacagtagaatga

SEQ ID NO: 72639 - DNA, 1230 bp, Pectobacterium sp. SCC3193
atgagatctctcgctattaaaataattaaattaaatcctgatatagcgaaggttttttcgataagctacagccatgtttttattgatgaatttcaagatacgaggtctgatcaatatgaattaataaagttattatttttgaataataaaactatattagttgctgttggggatataaatcaaagtataatgctttgggctgatgcttgtcctacagtctttagagattttcaaaatgattttttagcgaagaacaaatttttattaaagaattaccggtcaagtaaagaaatacaagatgttctgtcatgctttatcagttttatcgactcttcccatgagcctaatatggttaagaataaaccagagaattgctctattcatgtttatgataatgaatataaagaagctgatgatttggttcataaactgaaagaactgatagcttctggagtaaatgaaaaagatatttgtgttttaacaaagcaacaatcctctttatacacatctgttcttagagataagttaacacaaactggaattaataatcttgacatgacagatctccaagattttttaaaagaacctttaggcaggatattttccagtttatttagtatttatactgataaatcgcactccagctatagagagttttgtgacttatatttggaagtgaataatgttagtagcggtgatgaacaggaggccgatcttattagaaaattgtcttaccatctttcagagagtaaatctacactttctgttgattctaatgctgattcgatagtaagttcaattaacaaaaccctcaaatttatccaaataggaaaagtagtttcaaaatggggacagtataaatctaaatctttcagagataaagtctggagtaaccttgaatatcatttacgttataccattgatactacaaactccttatcagaagcatcgaagatgttcagagctgaaaattgtgttcaattaatgaatatacataaatgtaaaggcttggaatataaagttgttgttttccttggtattgaagatcaagctttttggaaatattctccagaaaactttgaagataagtgtgctatttatgtggctttatcaagagcaaaaaataaaatcattattactacagctaagaatagagaatttagattgaatgggcgatatgacaacagaacatcggaatatgttaaagtaaaagaaatatataatttttaa

SEQ ID NO: 72640 - DNA, 1569 bp, Serratia plymuthica PRI-2C
atggaggcgcatatccatgtccagtataccgatatggataagacgggacgattcaaagtccggcgctggtgcggtgatcacccagaagtttcgcttacctcagatatgatggagaaccttcggggggtctatctcccacctctccgcgatgccgcgcagggccttcgtcctaaccgtaacagccagttggctcgattacttcatttgctcaccgatgatgcaggtcgtgacacgataaacacggctttgaagcaacttgacgaaacacttaaacaagacaaatccattcagagtacccataaagcgatatcaaccagacatgattccatgatgggtgctcagttagcgcaggagcttgccgtcgggctcagcgtgactgattttcagcgcctctcttcccgactgaccctgacggctgaagccatggagattgagaagaatggattgggcttcaataatctgatcttcatggcggtagtactcagtgaattggctaaaaatactgattctgctttcaggagtttgattattgaggaaccagaagcgcatttgcatccccaactgcagcgcgtgttgctgcagtaccttgcagggattccaacgggtgaaggcgaaaagcctgtacaactgtttgtcaccagccattccccaaattttgccagtaattcaaagctggactctcttgtatgcttgatcgagaacgaggctggcgttgagaccttctttccacgtgatatcaaatttgaaaagggaaaacgtgaaaagctagagcggtatctggacgtaactagggctgaactgttttttgcacgccgggtgattttcgttgagggcgcagcagaactcatgttgattgacgcacttgctaagaagatgaactttgatctcagggaatatggggtcagtctaattagcgttgagggacttaattttgactccttcctcccgctttttggagagcaggggctgcgaatccccgtcgctgtagtaaccgatgcagatccatttgaagaagaagaagttgaagccgtggcagagggtgaacaggctgaagaggaaattgacgacttactttctgaagctgcctaccaggaagaaacagactctcctgacgacgaagagcctgctggcgatgctgagaaaaagaaaaaagttaaaaggaaagaggtgtatccagcgttgggagatcaggtgcggttgtcggcaaataccatcaagatgaagaatctggaggatgatttcgtgaaggtttttcatggattgaaaaccctggaatatgatctggcactccttgaggcgaaccgcgacccaatgcttactgcattagccgacccgcatccaaaaatctctaaagctctgcgtaagatagttgatgcccagccagacaatacagcaaaaaccaaagcgttgttctgcggtatgtttgagcgaaaaggcaacggcaatattcagaaaggtcgattcgcccaggcattagctgaacagatttcgaaagaaaatggttttgaagtccctgagtaccttaaaaaagctattcagcatgtctgtcagggagtggtcaagccgtga

SEQ ID NO: 72641 - DNA, 1728 bp, Serratia plymuthica PRI-2C
gtgaaactatcaaaggaacagatagatattatagaagcgccgttagggccaattgctgtcactgcgtgtgcaggaagcgggaagacagctacagccattcggcgcctgatcgccattcggcagaaaatgcaaaacagtcgcggtcgcgttgtgctgttgtctttctccaatgttgctgtcaataccttcaatgcaggatatgcggagctcgctgctggcctaccggacgatgctaatcgtcgaagggtggaagtcgatacacttgacggtttttttaccaaacatattttacgtccccatgcctacaggactatggccgcgccgcaggctgcgtacttggtgtcaggttcggagccttttcttgccaggtttaaatattggcgtgaaggccaccctcctttgccattaaaagacataaaattaatcatactggatggggatttcgtcttttattccgatacaagaaatgaccctgaaattcttgataaaggtaaggttttaaagatcattcatgaccttggacgtttaggtgcttacactcatgagattggtcggtactgggtgtataggaccctagattctcaacctgcagtattgagggcgctggcggcccgctacccgcaaatccttgtcgatgagtctcaggatttgggaacactgcataaggaaatcttaaagctactcattactgcaggggttcagcttacgcttatcggggatgttaatcaggggatttatggcttcgctggtgctgacggtgagttcctgaatagctacgaggatcgtgcagaggtgaccggctacaagcttactcgcaattatcgttccctgcctccaatcataaatatcgccaacattctctgtggccgtcatgacgaaccagaccggctggaggaacaaggcggagcatatttcattggatacaaggattcagaactgtccaaattaactgaagcattcaaggctcatattgatgagttaggcatgcaacatcaggatgctgtgatcctctgccggggtgcagacagagccgcagtaattgcgggtaaaaccgccccgtcgggacaaggtatggtcaaggtgttagcagaagcatcgttgttaagggatcagcatagtaactatcatggatgctttaaattggtctgccgggctatcattaacttactggaggatgtacctcatggactcagttccggacttcaggggttatcacatgatgacgagatgaaaggacttaagcggctactatggcgtttcagtcgcagcgctgatgttggactcccttcgtctgccctaattgcgaaaacagactggcactccaagctattaacgaatgtcagagtgcttctcgcagagattgaaaaacactacggatataaagttgctggcaaggtaggcactaagctcacaaaaaaattattaccagatcagccactggccagtgcagtttcggctcaaggacatggactcagagtcgagacggttcaccaggttaagggtgagtctatcgacgcggttatgtatgtggccaagaaagccaatatcaaagcgctgctttcaggtacaagtgatgaagaaggacgtatcgggtatgtcgcaatcactagggcaaagaacttgttctggctggctgtgccacaatcatgcctaaaggaattaaaggagaatctcattaacgctggttttcaggaacggatcaaacctgccgtcattgaccctgcctga

SEQ ID NO: 72642 - DNA, 2082 bp, Pseudomonas pseudoalcaligenes KF707
atgcctgggaaaacggcgcagctggagaggtcaatcatcaatgatctgctacccagcctcgacttctggctcgatgtccctctctccgaaatccagcatgtcgttcatatccttccaaccttggactggaatggtggtctgctcggcgttaggctgaaataccaagtcgagctgatcgcgaagctcaaagccgactacgtcgcacagcgcagcgccgctctcgaagcgggcgcgaaagccccgggaggtcaagtaggaaacattcaagtctggcccacctgtctcaccgaattcctcgaacgacgcctgcgaacctacatcgcacttgaggctttcgcccttgatcctgccgcccacacccccccagtgaaaggattggcgacgccgcaaacattaccggagaacatgcttccgctggagaagaatcctttcaagcacctgatcaaaattgacgaaatcgcggcccagcgtgacttcgccgatgctggtgagcgggctccgacaggcgaggactcccaggatatgtcgacacgccggtataagcgccgtctttcggaccaactacgctcttactatgatcgtcacctcgatcctgcgaaaacgccatccgcagaggactatgaggctctcgacgcaatccagactgctgagcagaatttcgataagcgcctcgaggttggtttcgccgctgccttcgaggaacttgaggatcttggctatcccggaatcagcaatccaaaactgaaaatcaccacacaactgcgggcgactgacgggctgaagcatggctccgcggtgcagtatcaggtgacggaccttgctggagaaggattaaagcccctccaacttccggaagactattccggtctcggttatcagaacctcatcgccatggttttcatgctgatgggctatcgtgacgagtggatgcgggtgggaaaggcttcggcggacaccgaccctggggcacaaacgcagatccaaccgctgcacttggttctggtggaggagccggaggcaaatcttcacgcgcaggtccagcaggtcttcattaagaaggcctataagcttctgcgcaagcacgatgaacttggcgacagcacaacgttctcgacgcaattggtcgtcagcactcattcgagccatgtggcgcatgaggctgacttcgcaaatctgcgttacttccgcagacttccggcgacttcatctggtgagacgccgactacgaccgtcgccaacctgtcatatatcttcggtgaaggggacgaaactcagcgattcgtcaagcgctatctgaaagcaacacactgtgatctgtttttcgccgacggcatcatattcgtcgaaggccaggctgaacgcattctggttccccatttcatccggcatcacttcgactcgctatcccgccgctatatcagcctgcttgatctgggcggcagtcacgcccacagtttcaagaggcttgtcgacggacttgggctgacgacgccgatcatcgccgatctcgatgcgaccgtcgccacaaaggtgcagactcaggccggaaccgaagcgatccgctggaaggcgacgaagccccagcgtggagcagaccaaaagaccggcagtcccgtcctcaaggactggcacccatcgaaggaattcatcgacgagcttgtggcactcaagtccgaagagcatgagtcatcgagctgcgaggggtatgacctttacgtcgcataccagaagccactcttgataccgtcaggtgacggtagcggagttgagatcattccgcggaccttcgaggacgccctcattctggagaatctcgaggttctggcgaacattaccggatcaaggacaagcgacaagataaaggcaattgtcacggacggcctgtctggtgatgaactggcggatgagctattccaactgctgaaaacagcggagaaggccgcgttcgcgcttgactgcctgatgctggaggacgcgagggcggtcatcccgcctcgctacatccatgacggcctgacttggttcgagcgcgccgttgggaaggacatcgcggaaaacgaaccgacggcggtaagcgtatga

SEQ ID NO: 72643 - DNA, 1068 bp, Pseudomonas pseudoalcaligenes KF707
atgactgtagaagtgatagcactcggttcatctgatactgacgacgctgacgacgctgacgacgctgacgacgctgtcgacgccgagatcggcgcgtgcctggaccccaaggcgccgaagagcttcttcctctacgccggcgccggctcaggaaagacacgttctctcaagagcgctctgcaaagctttcgagagagatacggggctggcttccggcgtgccggcaagaaggtcgcggtcatcacatacacaaatgccgctgccgacgagatcgcgtcgcgtgtcggtcaagatgcgctctttcccatttcgacgattcacagcttttgttggtctcagatcggctcctatcacgctgacattcaagcctggctgctcgcaaacctaccgcgggatcttgccgagttgcaggagaagcaggtcaaggggcgcgccggcacgaaggccgcactggatcgcgagcgtggaatcacagccattctcaagcgcatcggatggcttcacacaccccgtcgtttcacctataacccaaatggagacaacttcggctccgactcgctctcacattccgaagtcttgaaaatcaccgcggacttcatcgtctccaagccatcgatgcaggctgttcttgtcagtaagttccctttccttctcatcgacgagagtcaggacacgagcaaagtcctgatggacgccttcctcgcactggcagcggcgaatacgggccgatttgcattaggactattcggcgacaccatgcagagaatttgcgcggacggcaagccggatcttgggcgagatgttcctgaggattgggccaagccggtcaagagaatgaatcatcggtcgccgcagcgggtgatccagttgggcaattccctgcgatctgcagtcgacggtcagcgccaattggctcgggacgatagcgcggccggcatcgtcagactgttcatcacatcggccaccacgctggacaaacccgcggtcgagcagcaaatccgcgagcggatggcggaaatctgcgatacgaaggctgggaggaaggggaaacagccgtcaagaccctga

SEQ ID NO: 72644 - DNA, 1737 bp, Xanthomonas citri pv. mangiferaeindicae LMG 941
gtggatgttgatacgggcgacagcatcgtcatcgtgggtgagaacaaggttggcaagagcaatttcatccgtgctttgcagctgatcctcgatccaggactgtccgagcgagaacggcaactggggctagagcatttctgggacggcctcggtgcagacaagatcggagaaaccatcgaaatctcggtggatttgaccgacttcaccgtcgacccgcgattgatggcccatctcaacgattgcgtgatcgaagctggaccacccatggtggcgcgcctgacctaccgctttcagcccaaagctggactcgccggggcaccggactcgctcagggactacgagtacgtgatcttcggcggcaacgaccccgacatgcgcgtcggcggctcgctccgccgcatgctgcccttggacgtgcaggtcgcattgcgtgatgcagagaaagacctcgccagttggcgtcactctccgttgaggccactcatcgaagacctggcagcatcgcttgatgaggacgcccgcgaggagatccagcagcaggtcgatgaagcgcagcaggagctggccggccatgaagaggtgatcgaggcggccgagcggatcagcgaaaggctgatcgcgctcgcgggcaaccagcacgccgtcccgttggcactgggcttggcgccgacgcgggtcgatgccctgctgcgcagtctgaggctattgatcgacaacggagcgcgcggtatcgccgacgccagcctcggcacagcgaacctgattttcctggcgttgaagagtctggaactcgaccggcttgtgtcggacggagagcgcgaccacactttcttcgtggtcgaagagcccgaggcgcatctgcatccgcacgtgcagagactggtctatcgctacttcctgggcaccggcatccagggcgacgaagacatgcctccgctgacgacgattctgaccacgcactcgccgcatatcgccagcgtcgcgccgatacggtcgatcgtcctgctacgtcacgacgcggcggaggagaagaccgtggcggtctccacggcgaacgccccattcacgacgcgcgacgaggaggatctgcagcgctacatcgacgtgacccgcggcgagatcttcttttcgcggggcgtcattctggtcgagggcgacgcggagcgctttctcgtcccggcattcgccgacgcgctggatatcccgctcgacatgctggggatcacggtgtgctcggtaggcggcaccaacttcactccttacgtgaaactcctgggcccccagggcctggacatcccccacgtgatcttgaccgaccgcgatccgatcgacggaaggccgccgcgcgtgcgtcggcgactcgccaacgtcctcgacgcggttgagccgggcgccgatcacagtgggtgggatgtggacgatgttctggaacgagccgaagagttggggtacttcgtcaacgagaacacgctggagccggaactctttgccggaggcctggccgaggcgatgcagcgggtaatcagacgtgagttgcctttgaatcaggcgaaccgagacgcgttgcaggaatgggtcgacgatcccgaccaactcgatgaagatgcgttgttgctcatgatcgagcgcattggcaaggggcggtttgcacaagcgcttgcggtatcggtgtcggacgacacgtgcccggactacatccgctcggcgcttgagcatatccgtgatgccgtcgtctag

SEQ ID NO: 72645 - DNA, 1821 bp, Xanthomonas citri pv. mangiferaeindicae LMG 941
atgccgtcgtctagcgtcagttcggcctacctggcgtacgccgctgacctggccggcaacccggggcaactggctgcgtacaattcccaggggcactgcgtggtgctcgccggaccaggaagtggcaagaccaagacgctggtgctgaagctcgcgcgcatccttgccgaggatgtacgcgcaccccgtggcgccgcctgcatcacctacagccaggaatgcgcgcgcgaactgactcgccggcttgaaagccttggacttcgggaggccccgaacctgttcatcggaacggtgcatggcttctgcctgcgccatctggtgatgccttacggacgcttggccggactgccgattccgttcccattggcggtggcgacccagcgggtgaacgaccgcctgctgaagcagtctggggacgcgctctttggcgcaaatcatccctacaaggccatcgacctggggcggcaccgacgctcggtccttgaccgcaccagcgccgcgtggcgaagcgaagaggaacttgccgcctgggcgatcgcctacgaagcggcgttgcgcaatgaaggactgatcgactacgacgatatggtggtgttcggccagcggctgattgccgagcacgactgggtgctgccactggtgcaggcgaagtttcaggtgctcgccgtcgatgagtatcaggacctgggtgtcgcgctgcatcgcatcgtcaagcgcttggccttcgacggtggagtccgcttgttcgcggttggtgatgcggatcagtcgatctacggtttcacgggggccgacggcggtttgctcactgagcttgccgcgcggggcgacatcgagcaggtacagcttcagctcaattaccgatcgggcaccagaatcgtcaatgcctcggaactggcgctgggagaagcccgcggctaccgggcgaacgacccgacacgtcaggcgtcgatcgcattcgtgctacgtcctggaggcttggcggaccaggccgcgcatgccatagcgcatatcatcccttcggccctggctgccaagcccggtcggacgctcggcgatatcgccatcctctacaaggactaccgcgcgggcgacgtcgttgccgaggccgcgacgtccggcggactcgactacatccgggtcgacaacgccgcgccttaccgcaaggtgggcctgacgagttgggtcgaggactgcgcggcttggtgcgccgggggctggcgtaccgggcggccgcagctgcgcggtttgatcgaccgctatctggccttccatcgcgcgcatttggatgagagccaagccggacgcgaggctcaagcgctgaccgcgctgttgtggtcgctgcgccaggacgctcaacccgcacgcgagttcgtcgcggcgcttcgggccggtatcctcgatgctgtgctggcggcggaggtcgcgctcgccgaccagaaggagcagttggaccgcatgtcggcggcacttgccgaaggcggcgcactcgcttcgctggatatcgtgagcctcgggggccgagatgggtctccggcgcacttgaatctgctgaccctgcactcggccaagggctgcgagtacgacgtggtcatcatggtcggtctcgatcttgggaatctgccatggcgcaacgagacccccgagaagctgcgggaaagtcgtcggctcttctacgtcggcctgacccgcgctcgtgacgaggttcacatgctctactcgggtttcgtggatggccattacggtccgatgcggcttggccgctcaccgttcctcgacgatctggaggagcgcatgcggatcgcaggcctgcaacagtag

SEQ ID NO: 72646 - DNA, 1743 bp, Cellvibrio sp. BR
atgtatctagcgcaattaaacatttttaattttagaaaaatttttaaggcagaacttcattttcaaaaaggcctcaacgtattggttggtgcaaacaatgttggaaaaacggctgtgatcgatgcgctgcgagctttgttagcagggcatgaagagccatatcctcgattggacacagaagacatccatcgaccgccaagcggtaagtctgtcggtgatatagtgtttaattatattttcaaagatctaaatgcagatgaggaagcagattttctcgcagcgctgaagccgggctctgcggaaaaaatggaggctcacataactattcgctattccgaagccgataaaacggggcgtcttcgagcaaaacgttggtgtggtgattacgaagaggtcggattaaccgctgacatgatggaaaatttaagaggggtctacctacccgcattaagggatgccgctcaaagtttaaaaccaagtcgaacaagtcaattggcaaggctatttcatttgcttgcagatgacgctggacgtgatggaataaatcaagctcttcagtcgcttgatgaagagcttaaaaaacatcagcccatcgtaacaacacatgctgcaataagtggtcggcataattccatgcttgggcctcaaatggctcaacttttaaatttaggattgagcgggagcgattttcaaagattggctgcacgcttgtctatcatggttgatgcttttgaaatcgagcaaaatgggttgggatttaacaatttaatctttatggctgtggtactgagtgaattaactaaaaatccagaatctagttacagtggactaatcattgaggagcctgaggctcatctacacccgcaattgcaggctgtattacttagttatttagaaacaatccaatccaaggaaggtgaaagacctgttcagctgttcgtaacaagccattcccctaatttcgctagcattgcaaatctggatagtttggcctgcttagtagacgcaggtggaaaagtggaaaccttttttccaagaaacataaaatttgaaaagaagaagcgtgaaaagttagagcgctatcttgatgtgactcgtgcagagattttttttgcgaaacgagtgatttttgttgagggagcggcagagttaatgttgattagtgttttggctgagaaagcaggagtgaagttaagagaacatggagtaagtttgatcagcgttgaaggattgaattttgattcgttcatgcctttgtttggagaaaaggcattaaagataccagtagcaatcatcactgatgctgaccctatatctcaaccaactgatgggagtaagcctcaagctctttatccgactttaactgatgttgttactgtttcagacaacaccgcaaaaatgaaaaaaagtgaggatgcaatcgtcaaagtttttcacggagtaaagactcttgagtacgatctcgcacttcatgctaataacagattagctatgttggcagcactcaaggaattacacccacaaataggaacagacctagaaacaattgtcgcagcggcgacggatgatgcagcaaaagcaaaagcactatttcggggaatgtttgagagagatcagaagaatgttcaaaaaggccattttggccaagcactcgctcaaatattttcggacggagctgattgtacggtaccaaactatattttgaatgccattaaacatgcttgccaaattgaggcgaaatga

SEQ ID NO: 72647 - DNA, 1728 bp, Cellvibrio sp. BR
atgatgagcgaaaactctcaacaacaacaggacataatcgatgcgccattgacctcgatgtcaatcatcgcttgtgcgggaagcggaaaaacgcacactgctgtgagacggcttgcagagatgcgacgtcaattgggagagcatcgaggtcgtgttgctttactatctttttcaaatgtagcggtagatacatttacaaaaggatatcgggaattatacgcaggcacctctgtaagctcggcaagcaatagggttgaaatagatactctagatagttttatcatccgaaatgtaattcaccctcacgcgcatcgcacgatgcagtcgaataaggcgccttatctcgtaaccgggggggagcaatttctaaatggattcacgttttggaatggaaagtttccggtgtgtatcagccatatgcacgtcggaataagtaataatatcgaaaacttttactattctcagaatgaaaaaattgttcaattagatcgtgactattctttaaagctcgtgcagcgtttgggatgtacaggtgcctacacgcataatcttggacgttattggtgctatagaactttaagagatcagcctggcgtcctccgagcattagtaacgagatatccttatatcctaattgatgaggctcaagatattgggacaatgcaccaatcgattattgagttgctgatgactgctggagtacgtgtctctcttattggtgatccgaatcagggaatttacgaattcgcgggagctgatggaaaatttctttccgagttcggcaatcgacaaaatgttgtttactatccaatgacgcgaaattatcgatctgtgcctttaattatggatgtggccaaccgaatttctgcaagaaatgatgaggctcatcgcaatgcaccggattctccacatggcgctttttatattccatataagactgctgatcgagagaaaatgattgaaagtttccgaacggctgtgattgctgctggattaagtatcgaaaattccgctgtcttatgtcgggggcgtgaactagccgataagttagcgggcagaacggcacctgatgggcaaggtcttattaaaagctttgcactagcatctttaaatcgagacaagcaccaagattacctcggggcgtttaagttagttacaaaatgtattgttggattgttagctgagcctccttctgatctggttacgatgatcatccagccaaatcgctatccagaaattaggcaaatatctcgcctaatctggggttttacacgtgatgccaacatcggtctcccatcttcgaatttacgagcggataaagaatggcatccactactgttagccagagtcaaagtccttttgattactctggaccaaaaatacggactgaaatctgcggaaaacctaggaaataaattgtcaaaaaaggggcttactgatgcgcccttaatagaccctaatgatcttgttactggtcaaggtgctcgcctgcgcgtagacactgtgcaccaagttaaaggggaaagtcttgatggcgttctctacataacgactaaagaacacataactgcgctattggcaggtgttaattcagagttaggtcgcattggatacgtcgcgattacccgagctaggaatttgttatgggtaggtgtaccagaaagttcattgaaagaatttaagccggcccttgaagcgcacggctttcaattagtgggttcaacatag

SEQ ID NO: 72648 - DNA, 1893 bp, Pseudomonas stutzeri TS44
atgtacctggctgaactcaccataaaaaacttccgcaagctgcgtgacgcgaagctggaattccagcctggactgaatgttctcgtcggcccaaataacgtgggaaaaagcgccgtagtggatgctctccggaccctcttggccggacatgaggagccttatccccgtctcgatatcgccgaccgtcatcggtctacagaaggcgaatcagaaggcgacatcagcttccacttcgtcttcaaggatctcagtcacgacgacgaagccgacttcatcgcggctctgcagcccagtgctgacaacaccatggaagcgcacatccacgtcaggtacacagatgccgatcagactggccgattccgggtgaaacggtggtgtggagatcaccaggacatcccgctcacctcggacatgatggaaaacctgcgcggcgtctacttacaacctctgcgtgatgctgcccagggattacgtccaagccgcaacagccaactggctcgcctgctccacctcctgaccgatgatgaaggtcgggagaagatcaatactgcgttgaaagaactagatgagcagttgcagcagaacgaggcaatcaaaagtactcatgcagcgatctccacgcggcacggctccatgatgggtgagcagttggcgcaggtactagccgtcggactcagcgcaaccgatttccagcgcctttccgcacgtctctccctgagtgctcagtccatggagattgagcaaaacggccttggcttcaacaatctgattttcatggcagttgtgctcagcgagctggccaagaatcctgaagcagcgtaccgaagcttaatcgtggaggagccggaggcccacctccacccccaactgcagcgcgttctcctgagatacctggccggcattccgaccagagaaggtgaaaagccagtgcaattgttcgtcaccagccactcgccgaacttcgccagcaattcgaaacttgagtctctggtgtgcttagtcgagaacgaagccggcgtggagaccttctttccacgtgatgttcagttcgcgaaaggcaagcgggagaaactggaacgctacttggacgtgacccgagctgagctgtttttcgcccgccgcgtcatttttgtagagggcgccgcagaactcatgttggtcgacgcgctcgcgaaggttttgggattcgacctgagggaatatggcgtcagtctcatcagtgttgaggggctgaatttcgactcgttcctgccactgtttggagagaacgggctgcgaattccggtgtcggtcatcaccgatgctgatccgttcgaagaagaagaggtatctgaacccgctgcggctgagcgacctgacgaggaaatccaggaggagctactcgcggaggcagcctatctcgacgaagcaggtgcaaaaaacggggacgtcgccgaacagctcgccgacgaaggtggcgagtcgaagaaaaagaagaagctaaaagctgcatatccctcgcttggcgaagctgttcggatatcgagcaacacactgaaaatgaaggagtccgaagatcagtttgtgaaggtgcatcacggggtgaagactcttgagtacgacctggcgctccaggcggaaaatcgggatgccatgctgaaagcattggccgaacttcatcccaggatctctgtggcgctgcagaaaatcgtagacggcgtgccagacaacacagccaaagccaaggcgctgttctgcgggatgttcgagcgcaaagacaccaatagcaatgtgcagaagggccgcttcggtcaagcgcttgccgaacagattgccttaacgccaggattcaaggtcccagagtacctcgagcaggctattcggcacgtttgccagggagcggacaagccatga

SEQ ID NO: 72649 - DNA, 1719 bp, Pseudomonas stutzeri TS44
atgaagctatccgatgagcagaaagctgtaatcgaagcctccttagaaccgatggcagtcactgcttgcgccggcagtggtaaaacagccaccgctattcggcggctgatcgccattcggcaaaagctggccgatcaccgcggccgcgtcgtgctgttgtcgttctccaatgtggccgtgaataccttcaacatgggctatgcagagctagcctcggatctgccggatgacgctaatcgcaagcgcgtagaagtggacacgctagacgggttcttcacccagcatgttttgcgtccccatgcctaccgcaccatgggcgccacgcaaacctcctatcttgtatcgggttcggaagcgttcttaagcagcttccagtactggaagagcaaaaccgaacgcccaatcccgatcaatgatgtgcaggtaggcgtagaggatggaaagttgatcttcttcatcgacaccagaggggcggtggaaaagcttgattacggaaaggctcaggtgctcatcgaaaagctggggcgcactggcgcatatacccatgatcttgggcgctactgggtggttcgaacgctgcttcaacagcctgccattctgagggcattggctacgcgctatcctcaggtgctggtcgacgaatcgcaggatctgggcacgatgcacaaagtaaccttagaaatactcatcaaggcgggcgtgcaggtatcactgatcggagatgttaaccaaggcatcttcgccttcgccggcgctgatggcatgttcttgaaaacctacgccgaccgctcgggagtgaaagactacaagcttacgcgcaattaccgctccctgcctccaatcatcgatatagcgaaccgtctctgcggccgaaacgacgagccagacaggcaacccgggcaaggtggcgcatttttcgtagggtacaaggacgccgagctccctaagctgatcagctctttcaaagctcgtctcggcgaactgggcatagaggagaaagacgcagtcattctcagcaggaacgcagatcgcgccgccaagcttgcaggaaaaacagaagccccaggacagggagttgtgaacctttttgcagaggctgcattggcccgcgatcaacagcatcgctatcagcatgctttccgtctggtatgtaacgcggttgtgagcctgatcgacgatgccccgcgcggactcagctcggcgctgcagggggcgccccatgaagcctggatgcttgggcttaggcggttgctgtgggcatttacccgcaataccgagactgggctaccgtcctgttcgctcctagccaaagcacagtggcatccgaagctggtcacaaatctgcgcgccttgcttactcaaactgatcaactgttcgggctgaagatagcctctgcgttcggaaataagatggccaagaagcgcttggaggacgtcgcgctcagcggcgccaaagctgatgaccaagaagctcatggcttaagagttgagactgttcaccaagttaaaggcgagtccatcagcgcagtgctctatgtcgcaaccaaggccaatatcaccgcattgctggccggcacggctacggaggacggccgtatcggctacgtggcactgacgagagcgaaaaatctcttttggcttgccgtccccaacagttgcctggacgcaatgcgcacagagttgatcaacgctggcttcatcgaggccgcagcacagtaa

SEQ ID NO: 72650 - DNA, 1980 bp, Escherichia coli 541-1
atgaaaattacacaaatggagatcaaaggttttaagagctttgataatgtagggcaaactataaatataaattcattcaccagcttaattggagggaacggaacagggaaaacggcagttttactcgcattaacaagaatgtttggtgtcaaaagctccgatagaattattcaagttgatgatttttatgttcctcctggggatgaaatcgatactcaagatgaaagagagctatcagttcgtgtaaaattcgaattcgcagatttggaagatggtgaggacaatacagttgcagatttctttaagcatttagtttcaagtgaagcggcagagatcccatactgtactgcaaaattaaaagcaaaatggacaaagactaaccttgcagaaggagatatagaaagcgacctagtgtgggaaatcggggagtatgaaaaaaatataacagcatatgaaagatcgaaaattcatgttcattatgtccctgcataccgagatcctgcccaacaactgaagcaaacagccggaaccatcatgcaccgtctgataaatgcggtcgaatggtctgaaaaaatgggctcaacagttgacgaggtagcggtatcaatcggaaatcaatttcaggaagaagtgggagtcaagacaataacttcatctttaggaaaaaattggaaaacgcttttcagcggaggatatttcgaagaacttcaaatcaagccagtagtgaatggcattgaagatgtattaaaacatatcgatactgtatttttacccagcccgaacactcaaccattaccaactgaaagattgagtgatggtatgaaatcattattttatttatctttagttaaatctgcatttgatattgaagatgagataatcaattcggaaggaaaagaattatcaatatcagtagaagcattagatcctccaaacttaacaataatattaattgaagagccagaaaaccatctctcaccacaatatttaggacgaattgttaagctatgtgaagagatatctgagaatgatcgagcacagattttattaacaacacatgcaccatctttacttaatagagtagagcctgaaaatataaggtatttccgtcttaatgataataaaaatacaatcgtaaaggaaatattattaccaagcgaagaagaagatgatgcagacagtgtcgatactttcacatatgtcaaggaagccgtcaaagcatatccggaaatatattttgcaaaagttgtcattcttggtgaaggagatagtgaagaaatagtcatacctaaaatagctcaggtaaatggcatagagcttgatacttcattgataacatttgctccattaggtgggcgatatgttaatcacttttggaaattactcaatgagctttcaattcctcatgtaactcttcttgattacgatttaagaagaggcggtggtggatgggggcgaataaaatacgttatcaaacaattaatcgcaaatggatgtgataaaaatattatcctcaataccactaaaggaatgatatccgatgcggaactccaagaaatgcatgaatggggagaagatgaaaatattgaaaaatcttggataaagtttttcgaagactataatgtctacttttcctatccttatgatttggattggataatgttaaatgcttttccgacaagctatcattcttttattcctgataatggcggtccaaaaatactcaaaaaaacagatgctaaatatattgataaaacaaaaaatgctatagcttcagtattaaagaaagatgcagaagatattgatatcaaatcttttaaagaccacgaacaatattactggtatcgatatttattccttggtagaggcaaaccgttgtctcataactatgtcttaaataagctcgataatgattcattaaaaaatgatgcaccgattgtattgaaagaactaatcaaaaaagtgagaggattactttaa

SEQ ID NO: 72651 - DNA, 1848 bp, Escherichia coli 541-1
atgccaactattaaagatgcagattgggtattaaaggatatccaagaagtcgaagatgaagcaatgaaagtgatacggaatagtacagagcataatctcgttcttgcaggtcccggttcaggtaaaactgaattattggctcaaaaagcatgttttttaattgaaacgggaaaatgtagtaagaaaaaaatcatcgcactatctttcaaaaaagatgcggcaaaaaacctacaagatcgagtcaactcacggcttaatttaaaatttaggagtaagtttgaatccacgacatttgatgctttctgtaaaagtattgtagatagatttaaaggtactcttccgaagttttatcgtccttcagacgattatgaaattatttctcttaataaaaaagaatttatagcagaaataaaaagagaggcattgggttttgaggggttgacatcatttgaattaagtaaaataaagcattcaaattttgaagaaaaatacattgtaattccttataaagaagaagcaaggcatacaattaatggaaggataagatattttgtatggactcatttattgaaaggtaagtcaagaatttcattcaaaatgataaattaccttgctaatagaattataaagaaaaatagtttcctatcaaacgccattaattcaacgtatgaatatgcctttattgatgagtttcaagacactacatctaagcaatatgaggtatttaaaagtattttctttgatcgagctataaaaatcacagttgttggtgatacaaaacaaagaataatggggtgggcaggagcattacccaatgcctttgatctttttagaaaagactttgccgttgaaaaacataatgaattagcaagaaatagaaggtcattaaaaaatttgataagttatcaaagactaatggaagccttcatgaatgaagctgaaaaaaaagcagagttaattttaaataagggtgagggtttagcaaggttaatgcagtttgatgaagttgaccaagaggcgtgttacatttctttacttattaaaaaatggattgatgaaggcatcgatccaagggatatatgtattttatcaaaaagtgtggccgaacagtactcacaaaaaataatctcagagttagatgattctggtgtgaaatgccgtattgaaaatgattatcaagaattgttgaacgaagcaatagtacaattggttctacagcttctaatgtttgtttgtaatagaaaatccattgagtgctggggagctacaatggaacttttatgcaacattagaggagtaagtaaaagaggtgatgttactcgtttagaaaaagagttaagtaatttcatcaaggctaataaggaagttaaaagtgatgttgttgattatttaaagggcttactaacaatatttggtatccctgagttaaaatcttattttccgcaatatatgaatggtaatggcttagagcataatattaatattctttctaaatatctcgaagcattagatataaaaaataatatgtcaaatgctatagatatgttgagtggaaatgaaactgtacctttcatgactatccataaaagtaaaggtttagaatttaaaaaggtcgttatagtaggacttgaaccggatgcttactttggtgatgaagaaggacaaatagaaaatcaaaaaacagtttttgtaggattttcaagagctattgatgaagtgttcatgactcgttgtaaactaaggagggataattttggtaatgtctccagacaagactttaataaaataccgctgataaccgatatgctaacttattgtggtatcgaggctgaaagctatccaggttga

SEQ ID NO: 72652 - DNA, 2067 bp, Sphingobium indicum B90A
atgcgcatcaaccgagctaagattgaaaacttcaggctcctccgcgacgtggagatcggtttcgaagaacagacgacgctcatcgttggccgcaacaacagcggcaagacgtcgatcgccgagctgttccggcgcttgctgtccgatcgcgccctgagtttccgcctcgaagatttttcgctcgggtgtcacgaatgcttttggacatcgcttgtgtctttccgcgcgcagcaagattcgtccgagacgctcggacagttgccagcaatcaagctcgtgctcgatatcggctatgacgtcgatgcggccgatcttgggccgcttagcgagtgcatcatcgacttgaatcccgattgccacgaggcccggctggagttccggttcgcgccgaaggccaatgcgctacaggcgttgttcgttgatttaacggagccgctcgaagatccggaggcggaccgcgcccggctctaccgcgaactcggaaatcgcattgcctcggcctatgccggatcgctggaagcggtcgatccgaacgacccgaccaaccggaagacactggaaccaaagatcctgtccgcgctcgtcggcggcggcttcatcaatgcccagcgcgggctggatgacgatacattccgcgagcgcgacgtgctcggcaaggtggtcgaggtgctcttccaatcggcattgacggacgaactggatccaacgcgacgcagcaccgccgagcagctcaaggaggcggtcgatcagatccagggcgatctgcatatcggttttaacgccaagctgacctcactgctgcccacgttcgacctgtttggatatcctggccttgtagacccgggattggtgacagagaccagcttcgacgtcgacaagctgctcagcaaccacacgcgcctgcgctaccggggcgtgaacggcgtaaccctgcccgaaacctacaatggcctcggcgcgcgcaacctcgtttacatgctactacagctcctgcgcttcttccgcgagttccagggaacgccaacagcggccggcgtgcatctaatctttatcgaggagcccgaggcgcatctgcatccccagatgcaggaggtgttcatacgccagctggagtacatcgccaacgcgttcgtcgcccaattgaacgccgaccgtccgtggccggtccagttcgtcgtcaccacccactcgccccacatggcgaacgaagcccgcttcgagagcctccgctattttctgtcggttaccgacggcccgggcctccggcgctcagttgtgaaggatctccggcagggtatgggcggcgcgccggaagaggatcgcaattttcttcatcaatatctcacgctatcccgctgcgaccttttctttgcggacaaggcggtgctgatcgaaggaaccgctgaacgccttctccttccggcgatgatccgcaagaccgacgctgccgcgcaaggcgagccgcaactaagcagtcagtacctcactgtcatggaggtcggcggcgcctacgcccatcgcttcttcggcctgctggcgttcctcgagttgcgcacgctgatcatcaccgatatcgattccgttgcgcccggggccaagaacaagcgcgtggcggttcgtgtggccgagggcacattcaccagcaatgcctgtatcaaaagctggtacgagcccgacgtgagcccagcccagctgctcgacaagtcgaccgaggagaagaccgacggcggacgacggctcgcctatcagatccccgagcaggatggcggtccatgtgctcgcagctttgaggatgccttcatcctcgccaatccagaactcttcgatctcggcgagggcgaccaggcgacgctcgcctatgagcatgcggccgaacagaaaaagtccagctttgcgcttgaacatgcgatcgtaaacaccgagtggcggacgccgcgctacatcggcgaagggttgcggtggcttgcccaaggcaatccagcgccgaccctcgggccagacgcgatcgccgccgagttggtcgccgaagtgattgacgcggctgatggggcccaggtcgatggctga

SEQ ID NO: 72653 - DNA, 1788 bp, Sphingobium indicum B90A
atggggcccaggtcgatggctgacgaagagaccgccgccgacgcggccggccgccttgcacttgagcgtgtctatgcgtgcttcgatgccggacaaagcttccggctcgaggcaggcgcgggcgcaggcaagacatattccctagaaaaggcgctgcgccgcctgatcgaacttcgcggtacggaacttgtgcgtaagcgccaacagattggttgcatcacgttcacgaacgtggcgaaggatgagattatcgcgcgcgttcaggcccacccggcggttcggccggagaccattcacggattttgttggtcagtattgcaggactttcagccccagctccgcgcgatcgtgcctgacttgccgggatggggagaacgtctcgccgatgccggggtgggggggctaggcgcgaggaaggtcaattacgacctcggctatccccgggtgacgccagacgaggtgtcattgaagcacgaagacgtgctgacgctgatgacggagctgctggcacggcccaagtttcgcttagtgctagcgaagcgctatcccgtgctgctgattgacgaatatcaggacaccgatgcgggcttcgtagaggctctaaagcagcatttcctaggtacgggtacggggcctatcattggcctgttcggcgaccattggcagaagatctacggtgagggatgcggtgcggtcgagcacgcagcactcgaggtgatcgacaaaaacgccaatttccgatccgccgaacccatcgtcgcggtgctcaatcgcatgcgacccgatctcgaacagatccccagcgacccggatgcgccgggtgaggctcgaatctttcacacgaatgcatggccgggccagcgccgaacgggccagggcggtggtcactggactggcgacacgagccccgaggcggcacgcgcctatctcgatcacctgaagcagcgattgtcggatgagggctgggactttgccgtcgaacgcaccaagatcctgatgctcagccacagcgtgctggcgaaggaacagggctatccgaccatccagagcatttatggccagttcaacgatgcctggctcaagaaagaagacccccacatcaaatttctggccgaccagctcgagccagcatgcgcggcctttcaggcgaagcgctatggcgagatgtttgagagcctaggcgccggcaggccgtgcatccgtcggcatcacgacaaggtcgcatggacgcagtctctcgaacagcttatccaattgcgagcgaccggcacgatcggcgccgtcatcgacctcatcaaaggccaggctcacatgcatctgcccgaggcggtgctggaccgcgagcaacgcttggccgacgccggacccgaaccggtcgaaggcgagtctcggaggatcgcccagctgcgaaggctacgggacgtcgcctacaccgagctgatggcggtggatgcgttcatcgatggtcacacgcccttcgccaccaagcacggcgtgaagggtgcggagttcgagaacgtgctcgtcatcgtcggccgtggctggaacaagtataatttcgcgcagatgctggaacggctcgacccaggccccccggcagacaaggtcgaatccttcgagagcaatcgcaacctgttctacgtcgcgtgctccagaccgaagcgccgattggcgctgttgttcacccagattctaagcgagctcgcgatggcgaaggtgacagctttgttcggcgaggccaatgtgatcccgcttccagcagatcccgcgggcggggccgcgccatga

SEQ ID NO: 72654 - DNA, 1623 bp, Mycobacterium chubuense NBB4
atgagactgactcagtttgaggtccgagggcatcgggtcctccaagacatgacagtggacgttcgcgaccatctagtcatcatcggagccaatgacgtagggaagacttggatcctgcgtctactgcacgctctcctcggagcatcggtgcaacagctgtttcagacctttaccctcaccgacatccgcgaaggcgaagacgagctgagcgtagtcgcacgcctagaggatctggatgcggacgagcttgctctcttcccgtttgagacttccgttgaggccggggagcctaattatcttgtcctacagctagaggttaggccatcagaagaagacccggacaacgtggcaatcacacgtttcttcccagattccggaactcggcgaggcccaagtcgcaatcaactgttggcaattggttggcggtatcttcctgctacacgttcgagcggcccggagttcatggacggccgaacaagccctttccgcacaatgctcgactcggccgatcttggggacgagatcgaggacttcggcgcgctgcttcaagaatttaacaacaagctggaggagaataccgccttacttgaactgcgtaagacaattgcgacgcatttgtctcgatccgtccccaagacttataccgaggatgcgctcgctattagaacgtcggctgatccggtcgatcaacccttacaagacgtaaccatctatctacgggaaggggaccgcttcaagtcattgtcagaacagagtgatggcatgaggcagttgatggcgctgacgtttttcgatcttgctcaggtccggtccaacattgttgccgtggatgagccggagatccacttacacgcatcgagtcagcgcacggtggcggcccttttcgcagaatctcctaagcaacggatcgtcgtaacccactccccctacatcgttcaccgattcgagccgaaacacgtcctcgtcatcaatccggccagcgaggcaaggcaacttgcagaagagaacttttccgatgtcgaaaaggagatgctgcactggtggtcgccatacttgctcgagagcctcacggccaggagggtcctgctcgtcgagggccttgctgaccgaattctgatcgaagctgccgcaagagcacttggcatcggcctcgaccgcattggcgtgtcagtcttagccttggatggagcagataagttcagtcacgtgctaaagattctcggtcgcaatgggttccgccttccagtctgcggtctctgcgacgaggatagggagcaatcttgggctggaacgttaggtctacgaccgcgcgcactcgaacaaaacggcttcttcgttgcacgtaaagaccttgagcacgagtatgttcgcgcggctggcgtcaaaaaggtggtggatgcgctcatagctgcgaaggtcgcacgcactgagggtattacacaatctacaggcgctgcggacattgattctgtcaccccagatcaactggggaccttcctgtcttcggtggatagcaggaaggtgccagcagctagggcagtggcacccatcttgacgccagaaatcgtggcagcaagcccatccctaatggggctaatcagttttttgaaggcagatgcctga

SEQ ID NO: 72655 - DNA, 1656 bp, Mycobacterium chubuense NBB4
atggacactaagaaaccacgcggacgtcaacaggaagcagtagagagtagtgctaactgccttcttgtaattgctcctccgggctgcggtaagactgaggtgctcgctatgcgcgccgagcatcttctcgcctccggaaagatccgtccgaatcgtcgcatcctcgcaattacctttaccaaccgtgcccgcgataatctgcgaagcagactggaagaacaactgggcggaaaccgcttgcgcagctcaatactggtcgcaaatttccacgagctaagcgctcgtatcgtagaggcgcatcatcgcactattgggctggcgcccggctttacctatcctcgccctgcttggctccgtcgcgcactctccgaacttacgtccgatcgagctaggcatcgtcaggtgaaggagattctgggctcgctaaagagagaaccactgacggatgggcagctcgtcgaacgcatcagagagactggaaacagtgacgttttagctctggaggagcgccggctagaagcaaactatattgacttcggagaccttctgcgccacacccaattgttgctacggaacaagcgagtttcgcatctgttccagctacacttcgacgccatccttgtcgatgaatttcaagatctttcgctgcagcagtatgagatcactcagcacatgtgttctcggaatattacctacgttggcgacccgcaccagggcattttcggctgggctggcgcggacccagttcatgttttgcaagacatcaggtctagggcggaccagacaattgatttggacgtcaacttcaggtcatcgcctgcagtcctccgggtaattaattcagtttcatccagcctcggatccgcgcctttacatgcggcagagccggaagaatggaaatccggtgaccatgcttacgccgtgcaatatgcgaccgactcagatgaagctgctggaatcgtatccctgaccgactatcttgccgagaagtgcccggaagacactgtcggcgtaatttgccgagcagagtaccggcgtagtgccctcaattccgcatatgagaacgctcgatatactccacagttctgggactatgcgctagacaacccccgggttacacgcttacttaaaagacactcaaagcatgttgacgcaggcctaacattcgaccaacaagtcgacgaattgcgcgagcgcgcaaccgggtccttcaacccagccgacgtcgacgcaatatctgaggtccatgaggcctgcgagcagctaatgcaacataccgacagcaatcttccgctttccgaattcatgaatagattgcgtgacaccacgatgtctgcaatcagtccaggggtgcacgttctgaatgcgcatgtcggtaaaggccaacaattcgactgggttgtggtcatgggtctcgaggagggtcacgtgccaagttcatactcgacgacgccggcggaggttttggaggaccagagaatcctgctggtaatgctgtcgcgggcgcgaaaaggtgtctttctcacttgcgcgcgctccaatcggaatcaatatggccgcttgtttcataacgaagcgtcgcggtggtggacagacatggagtcgtcgtgccaaccgctttcaccgtctgtcgcggtagcgatgcgcgtgatgtga

SEQ ID NO: 72656 - DNA, 2070 bp, Streptococcus canis FSL Z3-227
atgaagttaacaaaagtaattattaataattttagatcattcggtgaaagtcaaattattgaattaaataatcaaacggtactgattgggaataatagttcgggaaaaacaactgtattacaagcattgagtaagctgttttcggataaacaaaatgatagaataattaaaaaaagtgattttcaccttctaaaaggttcaaggcccggagaaaatactaaaaacctctttatagaaactatttttgagtttgatgaacttgatggaaccctctgtggtccagcaattccatcgtttttcgaacactttacagtttctcaagatggtgccaaaccatttctacgaatcaggttagaatcttcttgggaagatgatggaacagttgaaggaagtgttgatactcaaatctattatatttcatctgatgaagatactattagagatgaagacaaacatcgtgctcctagaaaggatttggataaaattagggtactttatgtacccgcttcaagaacgcctgagaaggagttgggtaatgcttcaggtagtatgttaagtaggttggtaaatagtataaattggaccgaagatgagataaatgaaattacagataaaattgatgagttgaataacacttttttatctgaaaatggagcattaactcagatcaacaaagaggttcaaaaatcatggaaattatatcatgaagataaccgtttttctcaagcagaattgattattaattcttctgagatggcggcagcacttagacagattgccttaaaattttcaccaacaaccactgaagaagcatttacagtttcagatctaggagatggactgagatctattttttatttttcacttgttgattcgatacttgatattgagttagaaattaccaaagatcgtgaagaaaatcctgataatccaagatttaaattgattccaccagtactaactatcttagcaatagaagaaccagaaaatcatattgctccacaccacattggaaaactgataaaaaggtttaagcaattaggcaataatgacaactctcaagtaattttaacgtcacattctccagctattgtaaaaagaattgacccagaagatttgaggtatttaagaatagaaaataatgacagagttcttcaaaccattgtttctgatatacagctacctcaagctatagatgaatcttataaatatattaaaggagcaattcaagcttatcctgaactatattttgcgaagttagtagttctaggtgaaggcgacagtgaggaactgctattaccaaagttttttgatttacttgggaaagaggtagatagctctcagatttcaattgtccctttaggaggcagacatgtcaactatttttggaaattattgaatgctctcagaattcctcatattaccttgttggattttgataatgagagatacggaggcggttggggaagaataaaatatatttctgaatatttgtatgagttgaacacagagttccgagaatggttcgatactcagggacttgatttcagtgagattggagaacgagagtttgaatcaatagatgcaccacgcctgaataattggtttaatagacttgaagaatttagtgtctacttctcttcaccgattgatattgacttcttgatgttacaacattataaggaacattatctggatatgttatcttcgaaagaagggccagtcgtttcatatgctgattcaggtgggaatagtaaaaaagtaaaattaactgatttggattgtattgataaattgcagttagaaggtctcgaaaaacgtatagaggaagcgaaaagagctactttaaaagataagagtggatcgggggttagttttactaaagaagaaaaagaattaatgatttggtatcaatatttctttttaggtagaggaaagccgacaactcatatgcaatttttatcatcaattagtgatgataaattaaagagaaacctacctcctgtgtttgaaaaaatagttagacgtgcggaagaattacttggagatattgactatggtgaagagtga

SEQ ID NO: 72657 - DNA, 1818 bp, Streptococcus canis FSL Z3-227
atggtgaagagtgacgattggtttcctaaaggagtcattaaattagaggatgctgctttagaagtagttaaagatgttactaacagtctagtcattgctggaccaggtgctggaaaaactgaattactggctcaaaagttagactatcttttttctacaaataaatgtatttctccaaaaaagattttagctttaagttttaaaacagatgctgctgcaaatttgaaagatagagttaaaaaacgttatggtgatgaatatgcttctcgttttacctcattaacctattcggcttttgaaaagagaattttagaccaatttagagatgttctacctgaggatatacgaccatcaagagattatttgattgaagattgggatactataaaagaactactctctatgaatggaattaatgttaatggattgaggatgtcatatataagaaatattgtcgaaaatattatacttaatgacgggaatactcacaaattaaaaaaggatttactaaaaggaacacaagataataagccggtcctcttgtataggcaaataacaaagttgagtactcaaataatagctactaacgaatacatccgtaaagcacttcaaatgacatacgattttgtatttctagatgaatttcaggatactacatatgcccagtataatttattaaaaacttgttttttaggttcgtcttgtaaattaacagcagttggagataataagcaagccattatgagatgggcaggtgcaaagcctgatatttttccagactatattcgagactttaattcaaatgaatatcaattgttgatgaatcaccgctctgtacctaaacttgtagaatttcaaaaagaggttcatcagatattaaatagtaatcacagttctattcagacaaataattatccagaatttcaagagggtgaaataacattatttgaatttgaaaatgaaagtttagaagctgagttaattgcaaatgatatagaatcaaaaattcaaggaggtatacgaccatcagaaatttgtatcctagcaaaacagaagattgatgattatagttcaaaattgataactacattaagcagtaaagggattaaagcaagaattgaaaatgaatatcaagagcttttaaaagactctacttgtaacctattattagatttaatatcatgcagtcaaggaaaacgagatcctttaatttgggaaaatattagtaatttttatggaaatatcaatggaatagatgagtttactgatgaattaattttagcaaaatcctataaggagattgacaatatagttagtgatattacttacctaatttcaaattttattcccaatgaagaaagtatgctaaatttaattgattgtattattgaaaaaatagatgaaaaaagaattatttccaacttttcaacatacaatgggaaaagtgacctagatatcattgtcaagaacttttcaaagttattatacaaagaatattctcaaacacaaggtgaatggctagatatagtatctagtttcaagggtgaaaactcaattccaattatgactatccataagagtaaaggattagaatatgaggcagtctattttctaggcttggaggattctgcattctggaattttaataatcaacctgaagaagataaaagtgcgttcttcgttgcactttcacgagcaaaaagtcacctaatcttcacatactgtaaattgagaaataatagggcacaaaacaatagaaatattaacgagatatattcattgctaacccagtctaacctagtaaaggttggtaattaa

SEQ ID NO: 72658 - DNA, 2142 bp, Lactococcus garvieae IPLA 31405
atgattttgtcaaaattacaacttgtgaattttagaaattatcgttcaactaattttaatttttctgagggagcaaatactattattggggaaaatgactctgggaaatcaaatgctgtaacggctcttcgtatgttgctagatgaagaatactattattctgtgaagagtttaaaagagagcgattttaatagggagattaacggattcaaaggacattggattattatttcagcagaatttgataatatttctgagaatgaaatgaataaagaagttattgcaagtttaagaaatgagatgaccaatgtaaatcttgaacaaggacatgtcagtttaataatccgacctaactttaaaaaaaggcaagaaatgtttgaggcttctacaaatgaattagaatttgaaaatgtcagatcttcaattcgtctatcagactatgaatttatatatagaggtaaaatgattacagattttacagatgaacgagtttataaagagattgtgggagattttgaaaattttatctcaccagatccaaatgataagcaggagaatgcacaagtaataggaacaaaaattgatatcaaagatataactgctcacatttctatagtttttattgatgctttaagagatgtattaagaacaatgaactcgagcagcaacccaataaaaaaaattgttggagagattgagaacaaaattcaagagagcgatttcatagatgtcaaaaataaaattaaagatttgaatcaaacaattacaggtataaaagaaattgggaatgtccgtcatgatttaaataataaacttgtagatattttaggattagtatattctccggaactttccctaacttccaatatatctgatgaactgaagtctttatctaaatttttaaatataaaacctaatgatgaagatagcattggttctctgggtttgggtcacttaaatatgatttttattgctttaaaaattgtggagtacaatatctgtagctcaagagaagtgttaaatattatgcttatagaagagccagaagcgcatatacatcatcatattcagagaacattatttcaaaatcttggtatcaaagaaaaaactattcaagttgtcatgacaacccattctccaaatattgcagaaagttctgaaatttctagaatgaacatagtgaaatccattgatggtaaatctgttgccatgtctccaaccagcggtttaaacacctttggttctgaaaaacttaatattaaaattgatctatcgaaagctatagagaggtatttagatgctaaacgtagtgctatattattctctaaaggagttctattggtcgaaggggatgctgaggaaatattaattcctaatctaataaaaaaaactctaggtgtatcattagatgaaattggtgtaggagttgttaatataggtagtacagcatttgagtacattgcaccgatattttctaaagagagaattaatagaaaatgcgctattattactgatttggataaacaagctgtttcagagaaaataatcaaaaagggagaaatagttggtaataaactttataaaaaaaatgctgaagaaaaaggtaatgatcgtagagaaaaaatagaaaatctttttaaagataatgattgggttgaatcattctatgctgaaactacttttgagattgaatttgctaaatcaaatccagataatcaaatttatttgaaaactataagtgatttatataaaagtgaaggagcaattactaattgggagaataaaatatattgtaaggaaaatctatatcatgaaggaatgttggttgcaagtagtgaagaaataagaagtaatggtatattgagcttagcagaaaatattggaaagggatggttggcaactattatgtcagaaaatattttgtcttcccaggaaagatttgtaatacctcattacatcattaaggcactatcgtttatctcatcagagtcaattaatgaaaaaataattaagaaaatgattgtacatagtatggggaaagaagaaagtatagataattttcttttaaataatgataatgcaatatcatatccatgtttatattcattcataaatgagtggaaaaaggaacgggaaaaataa

SEQ ID NO: 72659 - DNA, 1767 bp, Lactococcus garvieae IPLA 31405
atgaataataattttccaagaatcttagagggattatcagaaagtcaaaaaaatattattacagatactactaataatttatatgtaacagcctgtcctggtagtggtaaaacaagaacattaacacgaaagatagcttatactagtaacttatattataaatctttaaagaaaatcattgcattaacgtatacgaagcgtgctgccaatgaaattatagatagattagaaaaaataggagttactgaagatcaaatatgggttggcactattcatcaattttgtttagactttatactacgaaaatttggtcaaaatttagaacgtacatctcgaggaataaaaattattgatgaatatattacagataagtatctcaaagaaggatgtaaggagttgaatataaagtataatccttacaatcctccaaatttaaagcttgatataaaaggaaatacggaggaaacgaatattgagaatattaaattagtaaataattatcataaacgcttaaaggacaataatgagattgactttgacttgatactaacattatcattaaaaattctggaagagaaccctgtagcgtcaacgataatctcaaataatattcgagcagtatatgttgatgaatttcaagacactaatgaacaacagtataagattatttctaatttagcaaagagcgacaatactataaaatttttatttatgggggattcagatcaagccattttcacttcaattggaggtgttgcaaaaactaagaatgaactggaaaagataactgggctgagctttattagtatggagcttaatggatgttatagatcaacccaacgtatagtcaatttatattctcaatttcaacagaaaaattataaaataactagtttagctagatatagaaataaaccaggagtagtgaagtatgacacacatacacataaagatgacttgtctaataaaatttcaataataattcaagatttattaaatgaaaacatccctgaagaagaaatttgtataattgctcctaatcaatttctgctggcacctataacatcggatctaaaagatcgattaccgaatgttagttttcgatcacaagatgtttaccctattaaaccagatgatttgaacatattttataaaatgagttttttagtatttactacttcaggtcaacgggtagctttaagaaaaaaaatagctagtgaaattatagattctttgaaaagagattattatgtaccgttgaacgaagattttaaggggatagatttattagacaaattaaactcaataaaatcggaagaggtcaatggattgatatatttgcacgataaaattacaaggttatttattgaacttgaaattaaaaaagaggaatttaaaaatttatttaaacaaatgtcagaattttttactaaaacagaggaacgaataaataatactagattaaatttaaatactgatattgaaaattttagaaatatttataagactaaaaaaggtattaatatctctacgatacataaagttaagggagaagaatatgaagtagttattgcttttggctttttagaagatatagttccacatttcaagtctaaaaatcgaacagaagaatcaaagaaaattctttatgttgcaatttctagagcaaaacaaagaatttatatattttcagaaagaggaagaaaaaatggaaactatcctgaaaaaaaaccaacaaaagttcttcaggctgctgaaattctatga

SEQ ID NO: 72660 - DNA, 2190 bp, Lactococcus garvieae IPLA 31405; identical to SEQ ID NO: 71982

SEQ ID NO: 72661 - DNA, 1794 bp, Lactococcus garvieae IPLA 31405; identical to SEQ ID NO: 71697

SEQ ID NO: 72662 - DNA, 1788 bp, Parascardovia denticolens IPLA 20019
atgctacttgaatcagttcaaatcaaaggattccgcaattttgtagacacggttgtgcatctcgataagtcgaccctgattgttggcggcaacgataccgggaaaacaaatctgctttacgctattcggattctgcttgacccaacattgagttcgaaagaacttgagcttacggaaagcgatttccatgtcggggatgcatgcgaaaaaattgagataaccgcgaggcttgtcgaagtcaccgagccatgcttgattagcacttttgctggatctctgagcgacgacggggtagtttacatcgcctattccgttaccaaggatggggactataagttcgcaactggatgccctgtaacgggatttactggtgcacacgcagatgataagaacttccctgattttgaagacctagacgaatgcacctctcgatattacttacggcacctttcaatggagtatgtgggcagcagcagagatttgtccggcttcctaaagcggcagcagcgaacgctactcgagcttgcacgcaataacagaaccgatgcggaagaaacggaagatgcgaattcaattcaggacatacagaccagtcttgaaaatctgaatgcggatattagcgaccttcattacattgccgactccctgaaagctgtaaacaatgagatggggagcctgagtgcgaataacgctggttatgaagcgcgtctcgtggcaggcaacacagacgcaaacaagctggttgataatctacgacttgcttatctttacgaagacgctccactgacattcggtggcgatggcaggagcaaccaactgtactttgcaacctggatggcagaacgaaaaatttctcctacttctgctcaggaaaaagtggtgctgtttgcagtagaagaacctgaggcgcatctccatccgcaccaacaaaggcgcctagcccaatatatatcttctgggcttaacgagcagatgctgatgacaacgcattccccgcaaattatttccaatttctatgacggaagaattctgcgactcagtgctctatcagggcagtcaggaaccatggcgcgaggatgtgaagcgacagttgacaccgctctcgagcatttcggctatcgcctgaatccgattactgctgagctgtttttctgtagcggcgtcttcttggtggaaggcgtatcagaaaagatcttctacacagcgctgagcggagacctcgatatcgacctcgatcgacagaacctgtcaatcatttctgtcgagggagttggtttcaaaaaatatgtgcaggtgtgcatcaccttggggattcctttcgtgctacgcaccgacaacgacattttcgcgattccaaagacgagtagttatagatatgccggcgtgcagagagctgtagacctgctaaaaattttgccaacgagtcccgagcgcgatgatgctgtcaagcagagcgagaaagatgcgccgtcactggaatggaacggagcgaacccaggacaggaaaacatcgacgccgggaaacgaatcatagggaaactgaagccctgcggcatctatctcgctgataaagatttggaaacggacttggcaaatagcgccattgctaatcagctgcaaagccactatgaaatctcagacattacaaagctgattgcgaagatgcagcagcgtaaaacggaaaacatgcacggtttcatctctgaagctaacggcctagaccagcttgcgaatagcgcactagcggaacccctctacaccctcgtagcgcaggtcggtagagcgtaa

SEQ ID NO: 72663 - DNA, 1077 bp, Parascardovia denticolens IPLA 20019
atgaatatcaagattgcggagctgcttcaacatgagctgatcatgctgcttgggcgcataggattgcgtgtcgtagccgtaggagacttagaccaagctatttatggctgggcggggaagagctctgcgtacttgcaaaagctggtagatgatcatagctttagccattttgagttgaccagcaaccatagatgccatcattctattatcgcctactctttgcagctgctcggcagagaagacataagcatcgatgatgacaagcgagtcttcctcgctcatctaaatggagacgagagcgcaatcgccgataagataagtcagcttatccctagaataaaaagtaaatacgatattctcgacagccgtgagattgctgtcattgcacgctctaatgacactctcgataggattgcggaatctttaacggtcccttacaaacgctatgaaaactacgttcttgataatggtttcagcaagtggaaacgagttttcggacagttattacaaacgtactattcagaaagtcgtttcttcggggattttctcgttcaatacttcaacgaggacgtgcaggccaagaaaagacaagaatgcgctcagctcattaaggtatttctggatatagatgaaaaccttcttggacagagcagccagatggcagcaaggattgcaaatctatgtgagcccaatatgggaacgccagaagaccttcaagcttatagagatgccactgcggacctagatttgctgcatgcaaactatcgtcaaccgaggcgagacgagattagtttattgacataccacaaggctaagggcctcgagtttgatgcggtgttttgcctagacacttaccagtatgtgatgccaccatacaaatatgagaaaatgccctacgatgctttttctgaaagcctttcaatgcactatgtgggcataacgagggcgcgaaaggtttgctacatacctatagccacatacaggcataacaacaaaggtagccgtttcaagacggttccttcggagtatttgaatcgagaggggctgagaaagctgcgattcgatgttcgatggtaa

SEQ ID NO: 72664 - DNA, 2061 bp, Pelosinus fermentans B4
atgtatataaaaaaggttgaagtaaaaaacttccggctcctcaaagatgtcactcttactcttgaggagaaaacaactgtaattgttggacgtaataattcggggaaaacgtctcttacagaattcttccgtcgcttgttatccgataattctccgagttttgcattggtagactttccgctagttattcaacaagagttttgggatgcatttgttcgtaagagtgaaggggttggggaaagtgagaccgtagaacttcttccaactattgaagcaaaaattacgattgtatatgatcctagagcccatgatttaggactgctcagtgattttattattgatcttgatattaattcgaaagaagccatagctctcattagttataaattgaaagatggaaagatcaatgccttatttgagaatcttacatacatgcctgattccgatcttcccagacaaaaaagagatttctttagaagtatgaaagaacgtattccgaagttgtatgtagcgtctcttagcgctgtggatccaacggatgatagtaaccaaaagtccttagatttattaaaacttcgatctttattacaagctggattcattaatgcgcaacgaggtctggacgatacaactcataaagagcgggacgttcttggaaaagtttttgagagattgttaacttcagcatcggctgagactgcagcagcagatgagcgtaccattgcattagcattagagagagctgtacagggaattcaaagtagtatcgattctgattttaatgagcagttgaatggacttctccctgctttttcaatttttggatatccagggcttaatgatcctcatttgtgcactgagacaatactggacgtacaacgattattggagaataataccagaattcgttatgcaaattcaaatggagttagtcttcctgaaactcacaatggacttggatcacggaatctgatctttattctcctccagctttacgaattttttaaatgctataaaggaaaacaattggcgccgggcgttcatctaatttttatagaagagcctgaggcacatctgcatccccagatgcaggaagtttttattcgcaagctaagcgaattagcaaatgtcttttctgagctctataatgaaggggaatcttggccagtacaatttattgtaacgacacattctactcatatggctaatgaggccccctttgaggcaattagatatttcttgagtacaagagacgacaataaatatactctcattaaggatttaagaagtggtctgcgtggagagtcttgggaacaagatcgagagttcttacataaatatttaacactaacgcggtgtgatcttttttttgctgacaaagccattatgatagagggaccaaccgagcgtttgcttatgccaaaactaattgaaaaggtggaagggtcattatctaccgagcaaaaactttcttgccaatatgtttcaattattgaggtaggtggggcctatgcgcatcatttttttaaattacttgattttcttgagttgcggacattaattattactgatatggattcagtaaaagaaggtcaatcgcagagtggaagacgcacatatccagcttgtaaagttgctgagggtacccgtactagcaatgcttgtatcaagaagtggtttcaagacgatcatgtttctccagatacccttatagggaagttggatgcagaaaaaattgacggattcagacgtattgcgtatgaggtaccagaatctcaagaagcaaccgcatgtggaagaagtttcgaggatgcttttatgctggctaatagaacattatttcacattcaggggattaatgaggcagaggtagctaatgatgcttggaataaagctgaaaatatcgataaaaccgattttgcattaaagtacgcaatcgaatctactgcatggaatgtaccacgctatataaaagagggacttatctggttatctgaatgtgttagtcatcctgcaactgctcgtgaggttgttgggcaggaggaggtagatcatgcctga

SEQ ID NO: 72665 - DNA, 1731 bp, Pelosinus fermentans B4
atgcctgatactccgaacctgaatccagcggaaatagctgctcaggaatctatttcccaaatgatccattgcatcacccagcggaatagttttattcttgaggctggagcgggagcagggaagacctattcgctgattcgtgcacttcggtttttgatagaaacaaaagagcgggagttgcttcggcggaaccaaaaaattgcgtgcattacttacaccaatgtcgctcgagatgaaatcgaagcgcgtactgatcgtaatccagttgtattgtctgctacaattcatgcattttgttggtcacttatcaaggatttccagcctgctttacgctgcatgctcccccaaataggtagatgggccgagcgcttagtggagcacgatgatattagtagatttagcattgaatatgatttaggttatccaaaaattaatgaaagtgaaattttattagctcacgatgatattttgccgttaactgtgatgtttatgagttatcctaagtttcgtgccatagtcactaatcgctatcctattctttttatagatgagtatcaagatacagatagtgcatttgtcgaagctttgaagcggcattttcttgatacgggtgaaggaccgtttattggattttttggtgaccattggcaaaaaatttatggaaatggttgcggtaaaattgagcacgaagctcttactgtgattgaaaaaagagctaatttccgatctgttcgcactgttgtcgagtgtttaaatcgtatgcgtactgaattgacccaagaggtaagtgatcctgaagaagaaggttttgtctcaatatttcatacaaatgattgggtaggggaacggcgtacaggagcccattgggctggagatttaccggtagaagaagctcatagtgcgcttagtataattaagacaaggcttagtgaacagggatgggatttttcaccagataattcaaagattctcatgttaacgcataatgtgttagcagaagaacagggatataaaaatcttgccgcagtttttagccgtacagaatcttatattaaaaaagaagatccttatattgcttattttgctgagattcttgaacctgtttgcaaagcatatgaaaatcgacggtttggagaaatgtttgcggcagttagtacaagaacatcggttattcgttcgcatgccgataaagcacaatggatagaaaatatggctacacttcttcgcttgcgtgaaacaggaactattggttctgtcattgagcaagtgaagaataccagaaggcctcgactttctacgagagctgaaagtaaagaacgagaacttgaagctgctacggaggagatctcagattcattagaacgtttacagagacttaaaaacgtttattataaagaagttattgcgttaacgaatttcatagaagaaaagaccccttttgctacaaatcatggtgtaaaaggggctgaatttgagaatgtactgttggttattgggcggggatggagtcaatataattttggacaaatgctggaatgggctggtaatggtataccttcaggtaagcacgatagctttgttcggaatcgaaatcttttttatgtggcctgttcgcgacctcagaaacgattagctattctgtttacgcagaagctctcaaatactgcacttagtacccttggagaatggtttggagagagcagaattcacaatttagatatatattattaa

SEQ ID NO: 72666 - DNA, 2061 bp, Pelosinus fermentans A11; identical to SEQ ID NO: 72664

SEQ ID NO: 72667 - DNA, 1731 bp, Pelosinus fermentans A11; identical to SEQ ID NO: 72665

SEQ ID NO: 72668 - DNA, 1842 bp, Rhizobium leguminosarum bv. trifolii WSM597
gtgcatctagacaggcttcgtcttacgaaatttcgctcattcgaagatgggctgattgaattccatcctcatctgacggctatcgttggcgagaacaacggtgggaagtccaatattatagatgctctgcgtttgctttttcagccgaccaatgggcgtcgagaaatctactgtgaagagtcggacggtcgccgaggattggaagatagatcgtttcgaatcaaggcaaagatcggcggtctgagtcccggccaaaaaggattgttaatctcggcggtgccagaccctcttaaaaacgaagccgtttttggccttgatttttcgaaggttgatgacttgcgttacaagccgaaacactggtctggaaagttcgaggctcagcctgaagtgggttcgacggacctgattcgttacatttatttgccgccactcagagatgcgcagcgggctcttgcatcagggaacccgacccgcatcgctcagttgcttcgctattttctagataaggacggtgagaaggagtttagggatgatttgcagcgtagtggcaccacggctgccttgactgctgttgagggggagattggacggcttctccgtgatcttacgactggcgggcgggagcagaaggcggcgttgggtttcgccggttctgaggatctttatgatatcgcccgcgaccttcgttttaaactggcggatgtgggcatcgccgatccggaagaattacggcattcaggtttgggctatgccaatttgcttttcatggccaccgtcatggtcgaattgcaaagatcgaaagacgctgacctgacgctgtttctggttgaggaacctgaggcccatcttcatccccagcttcagatgcttgttctcgacttccttcgggaaaaggccaagctcagcagtcaggcaaaagtcgaacccggacagccagagggccgaattcaggtcattgtgactacccattcacccaacctcaccgcttggattgagcctgaaaatctcttgattatgcggtcgctcgaaggcggtgatggcagacaggtgtctaacgcaatcgcggtgaagaatcttggcttggataaacgcgatctgaccaaaatcagccgatatcttgatgtaacccgttccgcgatgcttttcggtggccgagtcatgctaattgaaggcatggccgaggcacttttgctgcccgtatttgccgaaaggctcctttcgaggcgtcatgaagctgaacattcagacaggcagaagtggaagcggtttcaatcagcttccctagtatcgattgatggtgtggacttcataccctacgtgtcgcttctccttgcgcccagcagtggggcacggatcgctgacaaggtggtggtgattactgatcgcgacccgaatgcgcctggcgatcgcgtcgagaagttgcagacgttggcggctacctatggcgcagccgttcatttaagggtgagtgtcaatgaaattacccttgaacaatcgttattctgcccaagcaatgaggcggtgctcaaggcggcatttttggatattcgcccggggtcgggaaagaagtggagcgagcgtattgaggcacaaggggaagcagatagacccgccgctttccgcagtctcttcaccgaacagagcaacccggtacgcaaaggcgattttgcgcaagccctctcatatatcctttcaccaaaggacacagactatattcctgacttcctgttgaagcagcatcccgaagacaagggggccgcaaaaacagcatataaggcgattgtcgacgcctttgaggtgccttcctatctggcaaccgcgataagtgaaatcgttgcatga

SEQ ID NO: 72669 - DNA, 1773 bp, Rhizobium leguminosarum bv. trifolii WSM597
atgacgaccgatgaagaccgccgagaagctgaggtccggcaacagacggtgatttcccatccgggtgaatgctacgtggaagcttgtccgggcgcggggaaaacgcagaccttggtcaggcgggtgatactgcgagcggccgagttacctccgcgccgcggtctagcggtactttcgttcacccgtagtgcagtggatgagttcaaagaccgctacgcgggggaaagcacgtcgctgtcgcttggctttccccatttcgtcggcacttttgatgcctttctaaaccagtttattgtcttaccttttggagttgcagggtgcagggatcggctgacaatcgtagataattgggagaatatcgacatcagccatggtcgcgccaaagctaaagggcgaccgatctcactcaagcattttgatgctattacgggcgctttgcacccaaaccatctcaagcggctctcccctgaacaggtggctcgccaagcagactacgaggcggcggctcggcgctgtatccaagggcttggcaaaaaggggatgctgtctgcggtttcagcccgtcaggtggcggcggagtttctgaaagacaaggaacgggcaggagctttgggtgcggcgctttccgacagatttgcagaaatcatcgttgatgaggctcaggattgcaacgatgacgacgtcctcgtcttggaatggctgaggtcctatggtgctaagttggtgctggtctgtgatcccgaccaagcgatatacggttttcggaagggtgcggccgatacctttccagtttttaaagcgaagctgcctagcctagccttaaccggcaattttagaagctcaaagattatctgcacggctgcggctacgatgcgtacccgtaacaatgcggatcttgcagtcggggatcatcgagacttttcgagcgcggttcaaattctcacgtacaaaaacacggtggcatccaaggccgcagttgctgaatctttcaaagagttgatgaaagccgcaaaaatcgaaatacatgccggtattgttcttgcccacaaacgttcacttgcagagcgaatatctgcgaacctgcctgagccagatggtagcggcagccggattgggcggttgattgatgcggttatagggtatcactcaagcggagccaccgcgcgtcagaaaagtagcgccgtcagagcggttatccgtttgctgatggaaattgaaaaatttgaggaaagcgagatttcatcgctaagaccgctggcgcatgatctttctctttcgcgggagtttcataggaaggcgattgaagttctcgaccggctttctttttcatgcgtagatcaggccgccgcaaccgcatggttgtcggaagcacgcgaagtaatttctgaacaaactggcgtaggatcaatcggtagcgcccttcctgcgaagaatggttgggcgcagaagcttatcaagacagaacccacgatcggcataccctatgcaaccgtgcatgaagccaaaggccgtgcgtatgacgcagtttgcctcgctatcgacgcagagggagatttgcttttggaatggcgaaatcgggcgtcggctacctctgaagggttgcgagtcttgtacgtagggttaactcgagcccggaaactggcagtgatagccgtacatgaagatcataaggacacgttagaacagatacttcgcggatgtgaaatcgcaatacacgcagataagaaaactaaaagtggcatgcaaaaaataactgagaccgtcgtcaagtga

SEQ ID NO: 72670 - DNA, 1842 bp, Rhizobium leguminosarum bv. trifolii WSM597; identical to SEQ ID NO: 72668

SEQ ID NO: 72671 - DNA, 1773 bp, Rhizobium leguminosarum bv. trifolii WSM597; identical to SEQ ID NO: 72669

SEQ ID NO: 72672 - DNA, 2067 bp, Rhizobium leguminosarum bv. viciae WSM1455
atgcatattgagaaagtaaacgtagtcggctttcgcttgttggaagacgctcagattatgtttgagcccgattcgacggtgatcgtaggccgcaataatagcggcaaaacgtccctcactgacctgttcgacagattcctgggcgatgacgccagaaagttccgcctggaagatttttctgccggcgtgcgtccgaaatttatggaagccaaagcgctgatggacggcggcgctgccggcgatgccgtattagccatactgcctagaatttcgcttacgctcacagtgagatatgcgaaagacgagaagtatggcccacttgcaccgtttgttattgacctcgatgaaaacacaacgacagccattgtatcgatcgagtttgccccctcgctgaacggtctgcatgcgctgttcgaccatccggaaaaggatggtgacggcgatgacatgcactggttctacaaatgcctgcgcgacactgtgacgaaagtctattccataaaactttccgctattgatccaacggacctgaccaacaggcgagagttcgacaacctttcccaactgtcccaactcattcaatgcaacttcattagagcacagcgcaccctcgatcatgcgaaacagggcgagaccgaagtcatcggtaagttattgggcggcctatataagacagctacgtctcctacggctgctcaatcggacaagctgctagctgacgaactaaaaaagcaggtcgtcgcgatagagaaagacatccagattactttcgaccagatggtcaaagggctcctacccgcacttcaggcattcggttttccaagccttaacgacaccgagctactcccggaaacgtcattgaacgtggaaagtttactctctggccatacccacattttctacgccggtacgcatggcgtgaaccttcccgaaggttataatggtctgggcacccgtaacctgatttacatgcttcttgagctggaagcgtttcacaagggctttagggcacgtccggtttctgcaggcatccatgtcatatttatcgaagagccggaagcgcatctgcacccgcagatgcaggaggtcttcatcagtcagctttcctcggcgattgcagctttgtcgaaacgctatccggaggaggccgtctggcaagtccagttcatcgtatcgacgcatgcctcccatgttgccaacacggtcaatttcgaggccatccgctacttcctcagcacatccgaagatggtggcacgcgtcacaccaagatcaaggatttcaggaagggcctggagaagatttcgcctgaagatcaggcctttctccagcaatacatgactctcaccaagtgcgatctctattttgctgacaaggcaattttgatcgaaggcacgaccgagcgtcttctcatgccgcgcatttgcaagctcatcgacaaaacacttgcggacgaagtgaagctcgggcggcagtatatcacgaccgttgaagtcggcggtgcttacgcggaaaagttctacgtccttctcgacttcctcgaactgaaaagcctgttcatcactgatcttgacgctgtctaccttgacgagagcgaccccaagaaaaagaagcgctggaagaaatgtccggtttcggaaggcaccagaaccagcaatgttgggataaaggggtggttcaacgtaccggaaggcgagcagatctcgcttgaagcgctggccgcgaaaacagcggacgacaaggagaggggcttctgccgtatcgcctatcaaataccggaggaaggttcaaatgcctgcgcgcgcagctacgaggatgcattcattctcgcaaatcccattatctttccgataccagccgatcaagacgcgggattatatgcgtgggacgaagcgcagaacatgggaaagacagagactgcactcctgtatgccatgcgtgaagacgactggaatgtcccgctgtacataaaggaagggctcaaatggctttcagagccgccaccggcacctgccccgccgccgccgcttgactctgcagctcctgtcgatgcggtggaactcgcatga

SEQ ID NO: 72673 - DNA, 1734 bp, Rhizobium leguminosarum bv. viciae WSM1455
atgaacgacgaagccatgaacccagctgagaaagccgccgccgaagcacaggcacgcgtaacagcctgcttgaaagaaggacgaaattttcgtttggaggctggcgcaggagcgggaaaaacatactctttggtggaagctctgaaactgctgataaagcagcgcggcgcggagatgctacggcacgggcaaaagatcgcctgtatcacctataccgaggtggcccgtgatgaaatcgtcaaggatatagaagagcatccagccatcctcgtcgacaccattcacgccttctcgtggcgcttgctttcacctttccaaaaagctctgagaaaatgcttaacgggcatgcccgataggcaggataagattgctgaaggcggaggtattggaagtaagcggatcgaataccagttcggttttttcggcgtggaagacgataaagtcacgctatcccacgacgatatcccccgctttatggcgcagcttcttgccgagaagaagttccaatccttcctgacacagcagcatccgatcatcttcattgatgaatatcaggacaccgacaaagggttcatggaagcgctgaccaatcattttctgcgcccgaagaccgggcctctgattggtttgttcggcgatcactggcaaaccatctatcgtggcgatttctcgttagcggattttcccaacgtcgaaggcatcgataagggctcaaattttcgctcggcgcccatcatagtcgatgccttgaacgtgcttcgccccgaactaaagcaggcagtgtccgatccggcggctcacggtgaggtcagtttcttccataccaattcttacaagggtgaacgtatatcgaccgcgcattccaaggaggatctgcctgacggcatttctcagcaatatacgtcggcgcttaaggccaatctgacaaatgcggggtggcagttcacagccgacaaaaccaagatcctgatgttgacgcacaacgcgttggctgccgagcaaggataccccacgattgccaccatctttgatcgcaatgaggctttcgcaaaaaaggaagatgctcttatcgaatttttggctgatgagcttgagccaatttgtcgggcatattgcgcgaaacggtttggagaaatgttccgtctattgaggacagggccggacctcacctgccatgacgacaagctgttgtggcgaagggacatggatgcactccttgagttacggaaaatcggcacggtcggtgatgtgatcgatcacctcaagaagacgaaccgcccacatctcgccgataaaattataaggcgcgaagaagaccttgccaggatcgggctagtaccggttgccgacgagccaagaacggtcacccgtcatcggaacataaggacagtggcttacacagaaattatggctttgacgaaatatcttgatggggagacggcgttcgctacgcagcatagtgtcaaaggtgcccaattcgagaatgtgctcgtagttctcggaggcggttggaaccactacaaatggccgcagcttctagagttattagaaaccaatgccattagttccaagaatacgggcggtttccaccgcgcgcgcaacctattttatgtcgcaatctcacgtccaaaaaaacgacttgcggttatttgcacgcagacattgtcaaaagacgcccttgctgcagcccacagaatgtttggcgaagctaacgtgcatgagttggaagtttga

SEQ ID NO: 72674 - DNA, 2334 bp, Rhizobium leguminosarum bv. trifolii WSM2012
atgcatattgaaactcttcgtatccgtaatttccgacgcttgaaagacgcccgtattgatctggcctcggatatctctatcttcgtcggggcgaacaacagtggaaagacgtccgcgacgcacgcgcttcaactcttcactgcggcgtcgcgagagcggttttcgatccatgacttcacctcggactgctgggattccatcgacggcttcgggatcggccttccggacgctgtgcttccgacgatatccatggacatctggttcaaggtcgaacctgggaatcttcatcgggtagccgatctccttcccaacctctccttcaccggcagcacggtcggcatccgcgtggagttcgctgcgatcgacgccgccgcgctgcgccacgagtttctggccgttcatgctgccgccgtagcgaacgcccgccccgctgcggacggtgtaccgggctaccacccctcgccacgaacactttgcgactaccttcgcgacgagggaggcgcacggctgcggaaaggatttgaccttcgctattacgtgctggacaaggcgcgctttgacgatgatttttgcgaactgccgggatacgttccgcgtttaatctcctcggataagggacgtggtggaagggagattttggccggactggtaaaggtcgacttcctccatgcgcagcggcatctctccgactcgtcgggcggaacccgttctgaagaactgtcgcgggtccttggacgattctaccagcggaacctggagcagcgtgccgaggacttcgaagcccagcgggccttggcggattctgagacgatgctcaacgagcacctcgggaaggtgttcggacccacgctcgatcgtctttctcaacttggatacccaggtctcggaaacccgcgcctgctcatcaagaccgcactgaatccttctgcgatcatgagctcccaggacggaacgagggtgcactatgcgctgggagacgccgaccagcacggcgcccttcctacgctgcccgaccgatacaacggactcggcttcaagaatctcatctacatggtcgtggaactgctggaccttcatgcaaggtggatggaggtggaggagagcaggccgcctgtccatctcgtcttcatcgaggaacccgaggcccatctgcatgtccagctccagcaggtgttcgtgcggaaggtgctcgacatcctgaagatcgagggccccgaggcagcccactatacgagccagctcgtggtctccacgcattcgtcccatatcctctatgagcgcggctttcgccccatccgttattttcggcgcatgccgggcgcgtcgcagaactcgcaggtcctgaacctgtccgtgttctaccgggacaccaagccgaagacccggctctttctggaacgctacctcaagcttacccattgcgatctcttcttcgccgacgccgcagttcttgtcgaaggcaacgtcgagcgcctccttctgcccgcgatgatcgcgaaggcggctccgagattgcaaaccgcctatctcagcgtgcttgagatcggcggggccttcggccatcgcttccggaaactggtggaattcttgggcatcaccactctcgtcataaccgatatcgatagcgtactgccaggcgcggcgcccgaaccggaagacgaagacgaagaggacaccgcaccggtcgcgggcggaatgttcgatggtctgctcggtgatgtggaagccgcagcagaggtagtcccagcggtggcggaggacgacgaggaggattctgaaccggggacttcctgcatggtgggccattcgggagcgattacttcgaaccagaccctcataaagtggctgcctggcaagacactcatcgccgacctccttgccgtcggagaagatgagtgcattcaggcaagggtcgcgccacacgacgcgctgatacgtgtctcgtaccagaccgtagtacaggtctcgtggaagggggaagtcgcacacatcgccggacgtacgctcgaggaggccttcgcgctggagaatctcgtctggtctcaggacaaggctcgcagagcgctcaggctgaagatgaacagcaccgcgaaccttgatctggctgccatttcggaaaggctcaacaagaagattgcggcatcagggttccgtaagacggactttgctctggcgcttctggagcaggacccgaacgaatggaaggtcccgacatatattactggcggcctgcagtggctcgagagcgaggtcacgccggctcctcctccggttgacgacgtcggaaacgcaggtccggaaccggatacggacgacctgggaatattcgcatga

SEQ ID NO: 72675 - DNA, 786 bp, Rhizobium leguminosarum bv. trifolii WSM2012
atgacgagcaggagcggcaagcctgacacacaagccgacgtcgaacttcgcaacgcgctgagcgcccgacccccgacgaacttcgtgatggtcgcaggcgcgggttcgggaaagacgacatcgctgatcaaggcactggggcatgttgccgagacccgaggcacggaacttcgaatgcgcgggcagcagatcgcctgcatcacgtacaccgaagtggcggtgaacgagatccgaagcgacgtcggcaacgacccgctctgccgcatctccacgatccatagctttctgtggtcgttgatccagccttttcagtcggatatccgcgaatgggttctcgttcgaatcgacgagaagattgccgaggaggaagcgcgccaagcgaatcctagaactcgggccgcctcgcgacctaagatcgaagccactctgacgagatgtcgccagcagaaggaagtggtttcctcattagagaagttcacctacggtaccggcagcgactatgggcacggtatcttggggcacgccgacatcctcaagctcgtgcccaccttgcttgaggagaagcagcttctccgagatctcctcgccgcgaagtatccagtcctgttcgtcgacgagagccaggataccatgccggcgttcatcgatgcgcttcggacggtgacccgaacagtaaagcatgagttctgccttggattcttcggcgaccctatgcagaagatcttctccacaggagccggcgcggttacgctcgaaaaaggctggatcgagatcaaaaagccggag

SEQ ID NO: 72676 - DNA, 653 bp, Rhizobium leguminosarum bv. trifolii WSM2012
cggtcgcgggcggaatgttcgatggtctgctcggtgatgtggaagccgcagcagaggtagtcccagcggtggcggaggacgacgaggaggattctgaaccggggacttcctgcatggtgggccattcgggagcgattacttcgaaccagaccctcataaagtggctgcctggcaagacactcatcgccgacctccttgccgtcggagaagatgagtgcattcaggcaagggtcgcgccacacgacgcgctgatacgtgtctcgtaccagaccgtagtacaggtctcgtggaagggggaagtcgcacacatcgccggacgtacgctcgaggaggccttcgcgctggagaatctcgtctggtctcaggacaaggctcgcagagcgctcaggctgaagatgaacagcaccgcgaaccttgatctggctgccatttcggaaaggctcaacaagaagattgcggcatcagggttccgtaagacggactttgctctggcgcttctggagcaggacccgaacgaatggaaggtcccgacatatattactggcggcctgcagtggctcgagagcgaggtcacgccggctcctcctccggttgacgacgtcggaaacgcaggtccggaaccggatacggacgacctgggaatattcgcatga

SEQ ID NO: 72677 - DNA, 1881 bp, Rhizobium leguminosarum bv. trifolii WSM2012
atgacgagcaggagcggcaagcctgacacacaagccgacgtcgaacttcgcaacgcgctgagcgcccgacccccgacgaacttcgtgatggtcgcaggcgcgggttcgggaaagacgacatcgctgatcaaggcactggggcatgttgccgagacccgaggcacggaacttcgaatgcgcgggcagcagatcgcctgcatcacgtacaccgaagtggcggtgaacgagatccgaagcgacgtcggcaacgacccgctctgccgcatctccacgatccatagctttctgtggtcgttgatccagccttttcagtcggatatccgcgaatgggttctcgttcgaatcgacgagaagattgccgaggaggaagcgcgccaagcgaatcctagaactcgggccgcctcgcgacctaagatcgaagccactctgacgagatgtcgccagcagaaggaagtggtttcctcattagagaagttcacctacggtaccggcagcgactatgggcacggtatcttggggcacgccgacatcctcaagctcgtgcccaccttgcttgaggagaagcagcttctccgagatctcctcgccgcgaagtatccagtcctgttcgtcgacgagagccaggataccatgccggcgttcatcgatgcgcttcggacggtgacccgaacagtaaagcatgagttctgccttggattcttcggcgaccctatgcagaagatcttctccacaggagccggcgcggttacgctcgaaaaaggctggatcgagatcaaaaagccggagaatttccggtgcccccaggctgtactgaaggtcatcaacgccgtccgtgcggaagacgatcggctcgtacagacgggcggcaggaccgagcggtctggcaacgccgacttacctgtggcggggacggcgaggatcttcgtccttcccgccgacgaacaccgtacggcgcgcatcggtctggttcgcgaatacctcagtcgtaagaatgcagatccgctttgggagagcgatgaaaaggacgcggacgtccgaatgcttgtgctcctgcaccgtgctgctgcaagtcggttgggtttcccgagcttgtacgaggcgttgcacgacaggtcgaccgaaagcctcaaagagggtctggcggatggcactgcctggccgctccggccgttcctgaactaccttatgcctctgaccaacgcactgcgcgacggcgacgagttcgagatcgtgtccatcctaaaaggcgggaacgctctccctgggcagcgtgtcggtgagagtttcgtggacatcctgaagcgactgcatgcggcgacggccgaacttgagcgcctgttttctagtcctggcgtgacagtccggcaagtcctccaacatgctgtttcaacatcgctaatgaccatcgatgaacgcatggcaaggcaccttgcggtgccagttgctcccgacgtcgagcacgatccggagcatccgccgctgctcgccttcctgtcttgtccggcaaaggaattctggggctaccggaagtacctcgacgacctctcccctttctccacccagcaaggcgtcaagggcgcccagttcgacagggtcatggttcttctcgacgatgaggagggagaagcgatgaggtcgttctcctacggaaagtacttcggcatcaccgacctgtcggacacagaccttgagaacatcgctgtgggcaaggattctgcgatcgagcggacgcggcgcctcttttacgtctgctgctcacgagctgtgctggatctcgccgtcgtatggttcacgcccgacgtcgatgtcgcgagggcggccgtccttggaaaaggcttctttcgcccggaggacgtcctcgccgaagatgtgcttgcatga

SEQ ID NO: 72678 - DNA, 1989 bp, Alishewanella agri BL06
atgaaaattaaaaatgtgcgcattaagaactatcgtttgctcaaggatgtctcgttttcaatagatgataaaacaacactaattgttgggcgcaacaacactgggaaaacgtcatttgctgaggcatttcgtagttttctgaacccttcagggccaaaggtccgttacgaagatttcaaccaatcttgcctgaaaggttttgaagaagcgttaaatgctgtaaggagtggcgctgaagaagatgctgttaggccaatgcttccaacgattgagttagagcttcaggttaattatcgtgataatgctgatgaatatggtgttttgggcgattttataatcgattttgatgataagttgtttgatacgattatcctggtttcataccaattaaaagatggcaagattgctgaattttttagccagctcgacaacgaaaaccgcaagcagtatttctctgagcttagaaagcgtattgagcgttattacgaagctgtcgtctatgctatagaaccaactaacctaggcaacaaaattcgtgttgagtttgcatcctttaaaaagttactgctatcggggctcataaatgctcaacgaggtttagatgacgaaacgcataatgaacgtgatgtgctgggtaagtcgttaggtaacatattcaaaagttcgagcagtgttggtgcgccggaggcttttaaagctcaatcgaatgagatcaatactgttgtcgaagagctgcaacagagagtagatactgactttcaacaaaaagttcaggcactactgccaaccttaaatatttttggttatccggggctgcatgatcctaacttaagtgctgcaactgaccttaatgtgaagtcactgttggaaagccacacaagagtctattaccagcgtgacgatcactttactttgcctgaaacctataatggtttagggatgcggaacttaatattcattttgttccgcatttacgagtacttccgcgagtttcaaagctatcaaacgcctccgaagggacatgtcatttttattgaagagcccgaagctcatcttcatccgcaaatgcaggaagtgttcattcggcaacttgagcttattgttgggcaattccagagggagttaaatgatcagcgagtgtggccagtgcaatttattgtgagcacccattcgtcccatattgctaatgaagctgattttagcaaaattcgatatttcctctcaaaaaatggagatgaaactagggttaaagaccttggaattgcttttcgcagtcctgaggatgcaaatgataaagagttcttgcataaatatctgacgctaacaaagtgcgatttgtattttgctgaccgggccattcttgttgaaggggcaacagagagaatactgttgcctgaaatgatcaaaaaagtggattccacgacagggactaacttgaaacaaaaatacctatccgttgtagaaattggtggggcttatgcgcatcatttctataaattcattgattttcttgagctgaagaccctctttataactgatcttgattcagtagattcaaagcaaaatcattctggagtaatggtaagcaagggggacaggtcaagtaacgtagggatttcaaaatggtttggtggggatggttactctgatttggcggccattcgtgctagagattcagattcaaaaattcatgggtgtcgacggattgcgtatcagataaatgaagatgcaagtggtttatgtggccgcagttttgaagatgcctttattctggcaaatagccaattgtttaaacttgataacctaacgggtgatgcacttgaaagtgcagtttttaagacggcaaaggagataggcaaaaagagcaaagctgattttgcgattgattactgtattaaatctacagattggctcgtcccaaaatacatacaagagggtttggcgtggttggatcagacgcctaatgttgttgaggatgtgcagccatga

SEQ ID NO: 72679 - DNA, 1752 bp, Alishewanella agri BL06
atgacgccgcttaacccagcgcagagagcatcagctgagacacttgaaaatgtaagacgttgtattgaacaggggcaatgcttcagattggaggctggggctggcgcgggaaaaacatattcgttaatcgagtctattaaatacctaatttctgttcgtgccaatgagtttgctgcagttggaaagcaggtagcgtgtattacttataccaacgtggccaaagacgaaattaagactagaacggataataacccgatgatttttgcggatactattcacgcctttagctggagtattttgcaaaattatcaagaaaaattaagggaacttatccctactttgggggggaaatggcatgaaagaatttcagaatcagttgggatacatcgccagactgtaaagtacgatttagggtttgcgtccataaaagataatgaaatatcactacatcacgatgacgtagttgcccttatggcccgtatgttggaatttcctaaatttcagaaattattgaaaagtaagttcccgtttattttcatcgatgagtatcaagatacagatactgaacttgctgcaagcattgtgcataacctgattgataatgactctggagttgttattgggttctttggcgatcattggcaaaaaatttatggctctaaagcatgtggattgattgtgagccctgccgggaaaattacagagattggcaaacgagcaaatttccgttcagataaaaatattgttgaatgcctgaatcgtatgcgccctgaattaccgcaggctgaatcagatccaaactctcagggaacaataaaaatttatcattcgaatgattggcaaggagtcaggcaaacaggaggtcattggaaggacgatcttccagaagatgaatctagggaatttattcagcaaaccaaatcattaatggtcgaacagggctgggatatgtattcatctaaaacaaaaatactttttctgaccaataacttgatagctgctgagcaaaaatttataaacctagcgaattgctttcaatatacggatgactatctgaagaaaaatgacaaatatattgagtttttcgttgatgttgttgaatcgaccgcttttgctttccagcatagaaagtatggtgaattacttcagataaaaaagaaaagccgatcttacttaacgtcgcaaatggacaaaaccaagtggattacaaacctttctgaactaatgcagcgaagagcgaatgccagtattggtgatgttttagatttattaatgtcaaccaatgtgcctagagttccagcgaaggtttcagatactgaaagtcgttacaaaatactatcagcgaagcctgcagctgaactgactgctgacgagttgagttttgtagagaagattagcaagttgcgggcagttcaatacagcgaggtttcaaacctggctgaatatataaatgacaaaacacctttttcgacaaagcatggggtaaaaggtgctcaattcgataatgttctggtggtttgtggacgtggctggaatcattacaactgggatcaaatgcttacatggttgcaggacggcgtaccagcgggaaaacaagagacatttgaacgaagtagaaacttgttttatgtaagttgttccagagctaaacataaccttacgctgctttttacacagaaattgtcagagaaatccattagcgtgcttgagcaggtttttggcaacactaatgttataggaagccctttttaa

SEQ ID NO: 72680 - DNA, 2007 bp, Bacteroides cellulosilyticus CL02T12C19
atgtgtaactttgacaaaaaaatgaaaatcatgcacatatccaagattaagatacatgggtttagatgcttcaattcagagggtgcatctattgaaattgatagaagattaaatgcttttattggtttaaatagtagtggtaaaacagccgcattggaggctctaagaaaactatttggaattacaaatgcggaaagaaatataagcaaacaggattttcatgttgcttgtgaagaaggtgatgaggttcgagaacgttctttatcaatagaggccagattagactttgacgaatctgaaacggacgctattcctcatttcttttcatctatggttgtcgatgcggaaggagaaaatccctacataagagtattattggaaagtatatggacaaaaaacgatcttgcagaagaaggagatatcgacaccaaactgtattttatcaatgtgcctgaatctgaagatagtactgatgaatctaaacacgcttttcccaaacatctaagaggactaattcaggcattttatgttccggctatacgaagaccatcggaacaaatgcgttatatttccggctctatcttatatcgtgttttaagttccatgaaattcagcgatgagttcaaagagaattacttgacaaaaataacagaactcaatagtttatttcaaagtattgatgaattctctacgattgaatctactttatcagacatttggtctgaatttcataaagatgaacgctataaggatgtttctttatcttttggaaccagtgaaattgaatcaatattacaaaaattagaaatatcatttagtccaacagaaatagatagaccatatcaaatagacgaattaggagaaggttataggtctttattttattttacccttgtctgtactcttttaaagatagaggaagagattgatgatgaagaacgggttaagccattacttacaattcttgcaatagaagaacctgaaaaccatattgcccctcaattacttgggcgtgtaattaaagtcttaacttctatatccaaacaagataaagcgcaagtattcttatcttcacacactcccgcaataatcaaaaggcttgatccagagtctatttttcattttcggataaatgaggattatgcaactgaaataaataaaatctatctcccgaagggggatgaagatgcatataaatatgtaaaagaagcagtaaagaactatcctgagatttatttcgccagattagtagtgattggagagggagacagtgagcatcttatatttaatcggctaatggaggtgtatgataaagattttgatgacaatataatatcttttgctccattaggtcacaggtttgtcaatcatatttggaaattgctatcgtctatacatgttccttatattactttgcttgatttagatgtaggaagagaaggtggcggttggggacgtgttaaatatgcattacaacaacttatcaatatcggaaaaagtaaaaagaaactattagaagttgatggaggagaggtcttatctgatgaggcatttgaaaaaatgcatacttgggggcatactgataacaaacttgacagtttaatgggacgggtgacttttttgaaaaaatataacattttttattcttccccattagaccttgattttttgatgcttgaacattatccggaaatttataaaaaggcaatcccgaaaaacggaggcccaagaatacctgaaaaagataaagaaccggacaaatttgcagcaaaagtaacgaacgcagtggcagccaccttgaaatcggaagatgcaaaaggagaaacctatactgaagaacaaaaagaactgatgatttggtataattatcattttcttggtagaggcaagccggtaacccacatgaatgcattgtcattaatggatgatgaaaagataaaagaaaagacacctcctgttttaatggaaatttttgacaagatagataaaatacttttcaaaaaatga

SEQ ID NO: 72681 - DNA, 1818 bp, Bacteroides cellulosilyticus CL02T12C19
atgaaatataaagcagttgacgaatggattcccgcagacggttttgtcttagaacccaatgcacttgatacggtaaagtccgaacaaaacacgttggttattgccgggccgggagcaggtaaaaccgaactcttagctcagagagcttgttttctgttagaaacaaaccaatgtccttatcctaaaaagatattagcaattagttttaaacgagatgccgcatataatttgaaagagcgtgttcttaaacgatgtggaagtgatttagcagtacgatttgaatccatgacatttgatgcttttgcaaaaaatatagtggatagatttcgtaaaggattacccgaaagttatgcggtcaatagtgaatatgagataatatttggagaaagagatatacttgatgttttcgaaggaattgaccggaattatcggtcaacgcatagtgataaacaaattttagatgattattacagcaaattgcctctatctccagacagcattcattataaagcatggacacatcaattaagcggcgcgaaatcatttctcacattcaaaatgatgatgcgtttagccgaacttatcatggatgctaacccaaaacttagagaatacctaaaagcaacatatagccatatttttcttgatgaatttcaagatacgactacgttgcaatacgaatttctgactacatgttttggggatagtggttctgtattaactgctgttggagatgacaagcagcggattatgctttgggcaggcgcattaccagagatattcagtaaattcatagaagattatgatgcaagccaactttctcttcaaatgaactttagatcagctcccaatttggtcgaacttcaaaactatttgattacaaatttactgcgaaaagaggatactgtaatatgtaacccgaattggaataaaggggacggagaagcatatctttggattttcaagaacccacagcaagagatagaatatctacattctaatgttgagcgatgggtaaataaagataatattaatcccagagatatttgtattttggtcaaacagcaattacaaaaatatgcaggagagctaattgattatttcaatgagcatggaatcgcagcacgagatgaaagtaagtatcaggacttactaactgaagaggtaattctatttatagtaaattttctatatcttataaatagtaacaaggctattgattcaaaaagttctgttttaaattttttaagtaacatcaattcctcttattccgacaaagaggtctttgccgaagaaatcaaactacataagtttataaaaacaattcggtctgtctttcaaaaagattttacgaaatgtattgagggtatagttaatgatataatttcttttgcaggagcggataaaataaagtcttcatatccagcatacaaaaacaagaaatatttctccgaaacaattggttctttctctcaactattaaaagaagaagccaaaggtgctacaaatttaaagacaattttagatacgataacaggggtcggggtaattccgataatgacgatacataaaagtaaaggattagaataccatacagttatatttatgggattagaagatggtgcattttggagttatgataaacaaccagatgaagataaatgtgctttctttgttgccctttcaagagcgaaagagcgagtggcctttacatttagtcgcaatagaaatgggagggcacagagcttaacaaaaatagaagaattatttaaaagtctggaagattctaagaaagtagcatttcaagagataaaatag

SEQ ID NO: 72682 - DNA, 1455 bp, Bacteroides dorei CL03T12C01
atgtatataaaggagattaaaatttcaaacttccgtaacttcaaggaagcttcagttcccttccatgaaggagtaaatgtcataataggacataataatacaggcaaaagcaacctgctccgtgcaatgggtttagtgcttggtcgtagtgacggccgtaggttggatacaagtgacttattttatgagacagatgtggcaacgcttcaacagcagtcgccacgtatccaaataactcttgtcctatgtagaagtgagggtgaagccttggattctgcagaaatggggttgttctccggtatgatgacaaaccctgcattaagcgaagaggcggaattgagatacgagtttaaattggctgatgcgcaagaggacgactataaggcagatgttgctagcgcaactacagccaaggaaatatggaaaatcatagatcatgactacatcagactctatagaagcagtcgcttaggtggtagtctggccgcaggtatcagcaccaatgatgttttggggcagattgacttccaattccttgacgccattcgggatgtcagccatgacctatatgccggttataatccactccttagggatgtactgaatttctttattgattactcagttaagaatgatgtcacaaagacagaggataagataaaggaacaattgaaagccttaagagatgattttgtccaacagtctaggccactgatgcaaactttacaagataggttacaggaggggaaaaacgtatttctgaagtacgcactcgatacaggcgcgacattcaacggagccgtgccagattttgatggagaggtaacggagaatgagatgtttgcagtgttgagaatgattatcaaatatgctattggaatagaagtaccggcgacgtataatggggtaggctataataatctaatttatatgtcgcttttgcttgcaaagatgcaggcagacagcagcatcatttatatgaaacgtaatgccaaggtactctcattccttgcggtagaggaatgtgaagcacacctgcatcctgccatgcagtacaaatttctacagttcctgcaggacaacaaagccaatggacacgtgcgccagatattcatgacctcacattccacccagattgtctcagccgtgaaactggaggacttgatttgcctaacttcacctgtattaggacagatcaatgttggctatccacgtatcatttatagagaggacaatgctgatgatgtggcgtccaagcaatatgttcagagatttttggatgcaactaaagcggatatgttctttgccaacaaattgatattcgtcgagggcattgcagaggagttgttgctcccagtctttgccagatatttgaataagaaccttacagatgagcatgtgctggtggtgaatatgggaggtcgctatttcaatacacttcctaaagttgtttga

SEQ ID NO: 72683 - DNA, 1668 bp, Bacteroides dorei CL03T12C01
atggctattatcataacatcagaacaaaccgtaactatagacgaaccgtttaaggtgtgtgctggccctggtgcgggaaagacgcattggttgataaatcatatcaaaaatgtggtgtcaaatagtcataaactagatgtagttaagaaggtggcttgtatcacttataccaatgtaggtaccgataccatcatctcacgtttgaatatagggaatgacatagttgaggtatgtaccatccatagtttcttgtatgccaatgtggtaaaaccttatgttcatctggtatctaaagatttcggactaaagttggaagaccttgtggttatagatgactctaattttaaatcagaaggaacagctgtagtcgtattaaatcgtatgaaaaagtcatggttagatgccaaaatctatctgaaaggattggagagggcaatgtggcgttatgaaaaccatgagtacaaacattacaaacccgattatccacagatttataacataaagagtggcaagcggtatgtgggaaacgactggtatatggggttcaaaaaatggctatggagtgaaggatatatgtcttttgatgatattttatatttctcttatattttgttttcgagattccccaacatatacaaattgataaaagctcgatatccatatatttttgtggatgaatttcaagacacaattccttttgtggttgactttttgacccaattgggtaatgagggggtgattgtgggtgtggttggtgacaaagctcaatcaatctatgactttctcggtgctacggtgcagcaattcgacaattttactgtgcccgggatgcaggaatatgaaatacgagggaataagcgtagtacgaagcagataatagatttactgaatattgtcaggactgatttttcgcaagactggctgaatggatcggaaagaatgataccagaattgcttgtcggcgatatgcttaactgttatcaacagagcatagaaaagtgtggaactgacgaaatacaatcgctggcctttcaaaacatactcgccaattccatgcgtaaaaagaacggggcgcgggaggtggagaatatattagagatggattttgacagcaatgcagggcgtcagatggtgataaaggcgttgataaaagctgtggaatatacgagaatgaatgatctacgaaatgcttggcatcagttagacattatcgatcgcgataggtcaataaccattgtgcttctaagacgcttgctggatggctataaggactataaagacggaagtctgatggatttctataattttctggtgaatgatttacatgtcaaaatgactaagataataggcaagacaatcaaggatttctatgtgaatcatacatacgtcgatgcagcccttggggtgaagtatggcgactcaaatgacaagcataagactatccataaatcaaaaggagaggagtttgataatgtgtttgtcattttgaaagatgaagatgacatagagttcctactatcaccggacttgtatggcaacaatgtgcatcgagtatattatgtagctgccagtcgtgctattaaacgattgtttatcaatgtccctactctgagtgacgaaaaccgcatcaagcttgaaagtaaacctattaatatctataaagaataa

SEQ ID NO: 72684 - DNA, 1917 bp, Bacteroides fragilis CL05T12C13
atgtatttatcatctattcatatacaaaattttcgtggaataaaaaatctaaatgtaaaatttcattctaaatacaatgttattattggatgtaatgggtgctataaaacaacattgattgatgctattagattattttatacatggggagaccaacagcagaatctatacatatcagcagatgattttcatcaagagatcattaaaaaagacgatgggagcttggaagttgcaaaaaataatacaattcatattgaatatacttttaaagatttaaatgaaacccagaagggagcatattatcaatatctaatagccgatgaaggagatttatttgcacgcgtaactataaattatacactttctgaagatggaagagttcaaacaaacttctttatgggtaaagagaatggacaaaaagcagactatgaaacatatagtctatttatatcttattatcttggtgccttacgtgatagcacccgagatttattgaacacaagagataatttacttggaagagtaattaaacgaaaagttgaaaaagctaagaaagaagatataatcaaagatattattaaaaacgctaacaagcaattgttacagcaagaagaagttcaagctactcaacagggaattaataatacattaaaaagaatagaaaaaacttctggtaatgttggtttgcatatagaacaaaaccgattagaatatattgtaaatgtaataaaaccttttctaccacataagaatggcgaagattatgaaggatttcgactttctcaaaacagtttaggatataataatatcatttatatagcaacagtgctaagcgatctaaaagagcgacatgagaaggaacaagaagcacacattgtactactaatggaagagcctgaagcacatttacatccacaattacaggttaatctttataatttcttagtaggggctgatgataatcccaatagccaaatatttattacaacacattctcctacattaacatcaaaagttcctttggataaattggttttattaaatgataaggcatattgtattgctgattgtttaaaagatagagaacaagagcaaataataagagatgttaaacaaaaaattaaattggataatgcgcaatgtgaagtgtatcggagaatgttacaacgctatcttgatgttacccgatcacaattgttttttgcgagaggttgccttcttgttgaaggtatatctgaaagcttacttatgcaatcattttctgaaataataggatattcattgtccgacaatcaagttgaattagtagatgtagatggaacggcattttatcaatttatggtacttttcaactccgcatatgagaataaacggttacctataaaattagctatagttactgatggagaccaattccctgattcaaaaaaagcagaatataatatagaacatttaacagacaacaagtttcagaagcttgaagagctacgtgaagaaataaaaagagcccaattatgtagtagagctaacaatataatatctatggctaataagcaagacaatatctttgttgccataggtgttaaaacactggaatatcaaatatgtatagcaaatgtttttgatacgattcaagatacaaaagcaggaagtttatataaatatatcaaagaatgtattttacataagaattttgatgctatagataaatatataaacgaaaaaattcaagatcctaatcacataacagatgatcagaaaatggatattgccattatgttgtggaaatgtttaccctcaaaatctgaatttgctcaaaatatggctgcatatattgatggacatagagaagatgaaaactttaaatttattgtgcctgaatatttagaacaagcaataaaacatttagcaatatga

SEQ ID NO: 72685 - DNA, 1776 bp, Bacteroides fragilis CL05T12C13
atgatggagtatagaataacagacgaacgtagagattatttggaagctcgtggatttactatattgacagcatgtcccggtagtggaaaaacaacgagtataacctacaaaatgaaaaaagtagctgaagaatgtcttaaaaattatggtggtcattctggcattatttgtttatcgtttaccaatagtgcagttgaagaaatccataaatactattataaacttcatggagagtgtttagggtatccacataaaataatgacaattgatagtttttattcacaatatatattaatgcctttttggtacttattgccacaactaaaaaagcgaccaatgattgttgatgacaccagtaatattaatatttatgaggtgtcatatatgaaaaatgggaaaaaagaaactgctattacttcttcgttgcaaacttttagagatttattttacaaaaaaaatccaagagatatatcattgggtaaaaatggctatctgtacaaaaatcatatcattgaaaatgaaagagaaaaagaatatgcaaaagctgtcattcaactaagacttgaaactggtattataggaagtttagagatggagtacctttcggctttaatcctaaaaaaacatccatatataggtaaatccttagcgaaaaaatttccatatatcataatagacgaatctcaagatgcttcagaactccaacattatatatttgatttgttaaaagattatggtgttgacaacatagagtatgtaggggatttatatcaaagtatatatgaatggcgtaatgcaaagccgatattattatacaataaaatccaaagtggtgtatggaacattaaacatttctctgaaaatagacgttccaatcaaaggatcattaatttatatagtttaataagaaaaccagaagatcccccgattgtttctttggatgtcccagagaaaaatatagatataattatatatcgttatgacgaaggaaatgaggccattttacttaaagactttgaaaacacatgtatttctaacaaattagtagattgtcatgtattagtaaggggaaaagagaagttgagaagtttaagtggaaatgaaagtaagattgaatgttggaaaacaaagataccatatttaataattgacgcttatgatagttataaatctcacaaaataaatattgcttttgagaaaatcagaaaactatcggcgagattagtgtgtggggataataactatagtcaaataaaagaatatataacttcaatcaaaaatgataatgcttttaattctaagatctcttacttttttgaacacttaccttctttttctttatctgttgaaagttggcagataagaactcaagaattattggcagaattattaaacttagcaaatccgattgatttttcacttaaagcaaaaataaaaggataccaaatgaatattgttaggcaaatgcctgtaaaaaatttatttattccgaaagcatataataaagaatctcttttaaagtttaacactattcatgacgcaaagggagcatcctacgatgccgtattattatttctaaataagcctcacataaatagtttatctgtaaatttattctcaaatgacagggaattagatgaaagacatagattaatatacgttgcatgttccagagcaaaacattttttagcattggcaattcctaatacagttatagacgatacaattaaagcttatttgaaggttgattatgttataaaaaaaatcgaagcttag

SEQ ID NO: 72686 - DNA, 2046 bp, Bacteroides fragilis CL05T12C13
atgtatattaaggagattaaaatttcaaacttccgaaacttcaaggttgcttcggttccctttcacgaaggagtaaatgtcataatcggacataataatacaggaaaaagcaacctgcttcgtgctatggggttagtgcttggctatagtgacggtcataggttgtgtacgagtgacttattttatgaaacagatgtagcaacacttcaactgcagtcaccgcgtatccaaataacacttgtcctccatagaagcgagggtgaagctctggattctgccgaaatggggctgttctccggtatgatgacagatccagcattaagtgaagaggcagaattgaattacgagtttaaattggctgaggcacaagaggagaactataaagcagatgttgctggcgcaaccaccgctaaggaaatatggaaaatcatagatcatgactacatcagactctacaggagcaatcgctctggaggtaatccggctgcaggtgtcaacgtcaatgatgctttgggacagattgatttccagtttcttgatgccattcgtgatgtcagtcacgacctatacgccggttataatccgctccttagggatgtgctgaacttctttattgattactcggttaagaatgatagtacaaagacagaggatgatataaagggagaattgaaagccttaagagaggcttttgccatgcagtctggtccactgatgaaaattttacaagacaggttgcagaatggcaaaaacgtgtttctgaagtacgcactcgatacaggcgcaacattcaacggagccgtgccagattttgatggagaggttacggagaatgagatgtttgcagtattaagaatgattatcaagtatgctgttggtatagaagtacccgcaacgtataatgggttaggctataacaatctaatttatatgtcgcttttgcttgcaaagatgcaggcggacagtaacatcacctatatgaaacgcaatgcaaaggttctctcattccttgctgtggaagaatgtgaagcacatttgcatccagctatgcagtacaagttcctacagtttctacaggacaataaagccaatggacatgtacgccagatattcatgacttcacattctacccagattgcttcagctgtgaaactggatgacttgatttgtctaacttcacctgtattagggcagattaatgttggatatccacgtgtcatttatcgagaagataatgcggatgatatggtatccaagcaatacgttcaaagatttctggatgcaaccaaggcggatatgttctttgccaacaaattgatattcgttgagggcgttgcagaggaattgttgctccctgtctttgctagatatttgaataagagccttacagatgagcatgtgctggtggtgaatatgggtgggcgttatttcaaccacttcctaaagttgtttgatacgaacaatccatacaccatcaacaaaaaaatagtctgtctaactgacgttgacccctgccggaaaaagaacggacctgatgaggaatacgaagcctgctacccatacgagtacaatatagatacagataactacgactataagcatcatgcggatgctgtggtagctaaatatgcaacccatcccaatattaggttctataggcaagatgtgacatatggaaaaacgctggagtatgacataatgcgtgaaaaccccgattgtgaactgttgctgactaactctgtttccaacttgaaggaaataaaaactatgatggcagaacaggatgtgaacaaaatgatgagtaaaatgcgaaacagtgaggctaatacccgtatcaagacatccataggtgcatcgaggtggacggatgaagaaaaacgaaaagccttacttgcatcacgttatttgaactctgtttcaaaaggtagcaatgcgttggaactaaacgtggcgcttatggctaatctggaggaaccagctgcagatagaaaagagttccacgttccccaatatattgttgacgctttaacatggctattatcataa

SEQ ID NO: 72687 - DNA, 1662 bp, Bacteroides fragilis CL05T12C13
atggctattatcataacatcagaacaaaccatacctatagacgaaccgtttaaggtgagtgctgggcctggtgcaggaaagacgcattggttgataagtcatatcaagaatgtagtgtcaaacagtaacaaacttgatgtggtgaaaaaggtggcttgtattacctataccaacgtgggtaccgataccattacatcacgtctggatatagggaatgacgtagttgaggtatgtacaattcacagttttttgtatgccaatgtggtaaaaccctatattcatctggtatctaaagatttcgggctgaagttggacgatctcgtggttatagatgactctaattttaaatcagaaggaacagctgcaatcgtattaaagcgtattggtaaatcatggttagatgccaaaatctatctgaaaggcttgacgaaagccatgtggcgttatgaaaaccatgagtacaaacattacaaacccaattacccacagacctatgaactaaaaagtggcaagcgatatgtaggtaatgactggtatatggaattcaaaagatggctatggagtggagggtatatgtcttttgatgacattttatatttttcctatattttgctttcgagatactccaacatattcaaattgataaaggctagatacccatatatttttgtagatgagtttcaagatacaattccttttgtggttgactttttggcacaactaggcaatgaaggggtgattgtgggtgtggctggcgacaaagctcaatcaatctatgactttctcggtgctacagtgcagcaatttaacaatttcgttgttcctgggatacaggagtatgagatacgagggaatagacgtagtacgaagcaaataataaaattgctgaataccattagggctgatttctcgcaagactggctgaatgggtcagaagggatggtgccagaattgctagtaggcgacatgcttaattgttaccaacagagcatagaaaaaagtgggactgacgaaattcaatcgcttgcctttcaaaacgtacttgctaattcgatgcgtaataagaatgggatgcgcgaggctgagaaaatattagagatggattttgacagcaacgtcgagcgtcagatggtgataaaggcgttgataaaagccgtggaatacacaagaatgaacgatttgcgaaatgcttggcatcagttagacattatagatcgcgaaaggtcactaactatcgtacttctaagacacttgctgaatggctataaggattacaaagacggaagcatgatggatttctacaattttctagtgaatgatttacatgtcaaggtgcctcagataaaaaagaagacagttaaggatttctacatgaaccatacatatgccgatgctgcccttggggtgaagtatggtgattcaaacgacaagcataagactatccataagtcgaaaggagaggagtatgataacgtgtttgtcgttctaaaagaagaaaatgacatagagttcttgctgacaccagacctgaatggcaacaatgcgcatcgcgtatattatgtagctgccagtcgtgcgattaaacgattgtttatcaatgtacctactctaagtgcagaaaaccgaatcaagtttgaaggcaagcctattaatatttcataa

SEQ ID NO: 72688 - DNA, 2205 bp, Bacteroides nordii CL02T12C05
atgagaatatcttgtcttgaaatacaaaatttcagaaaattaaaatcttctcgaattgatattgcagatgatagaacgatatttgtcggggctaacaatagtggtaaaacttctgctatggattgtttgattttatttttcagagacaagaaaagttttactacacaagattttactctatccaattggagagaaatcaataaaattggaaatgattacatagtctattctaaagaatcagatttagatgaaaacaagttatctatttctgcttggcaaccattcgtcccacaattagatgtgtggattaatgtggaagaaaatgagatacattacgtgaaccggattattcctacgttggattgggctagtgggaaattgggtattcgattaaggtttgagcctaaagatataaaaactctgtatacggattatactacagctaaatctacaattgaagaattaacgaaagatcgaagcaaaaaggcaacgaaattatggcctattcacttgtgggattttttacagaagaaattacacacatattttacagtcaatgcatatattcttgatcctagtaaatttgggcagggagatacgcctcaactactttcagaagataatatacctattgatttcgatccttttcaaggtttagtaaagattgacataattaatgctcaaagaggtttctcagaccctaatactcctgaaacgggtattagtaacttgtccagccaactacgtgaatactactcaaaacatataaatccaacagagactatagatgccactgacttggatgcattggaggcaattgaggaagcgaataaggcttttgacatacgattagaagctggcttttcctcctctctcgatgaattgagaaacctgaattaccctggatttggtaatccggaaataagcatttcaaccaaagtcagtccggttgatggactcaaacatgattcggcagtccttttcaatgttcaaaaaggggaaacagacgaacaatgcctaaggttatcggaaaaatacaatggtttaggatatcagaatctaatttctatgattttcaaactcattcgatttagagatgagtggatgaaagtcgggaaaattgccaaaaattcgactcatgagatagaacctttacatattattctggtggaagaaccggaagcacatttacatgctcaagtgcaacaagtgtttatacgtaaagcatatgatgtattaagaaatcatgctcgtcttaaagagaagaaagacttctgtacacaattaattatcagcacacattcaagtcacatcgcacatgaatgtgattttaagtctttgcgctattttaaacggaatattacccaaaaccaaattccgacttcaacagttataaacttatccaaaacatttggtgcggaagatgaaacaacaaaatttgcaaaaaggtacttgaaaacgacccactgtgatttgttctttgcagatgccgcaattctcatagaagggcaagcggaaagaatgctactacctttctttattaatcaagaatttccgaagctcgcttctgcatatatttcattgctggaaatcggcggaagtcatgctcatcgactaagaccactaattgatgatcttggtataatcaccttgattataactgatatagactctgttgatccgaatgcacataggagatcagttcgtcccgaaaaggggaaaaactacgtcactaatagttctacgttaaagcaatggactcctgctaaagaatctattgaggagcttgttgatttagcatcaactaaaaagcaatcctcaaatggcttggtgagagtcgcataccaatatggcactaaaatcacttttaaaaataaagtagtcactgtttatccctatacatttgaagaagcactagtttttgacaacattgatctattcaaatcaatgaagggagatggcttgataaagaaatattcggaagcactgaatgaatcgacaattaaagaatgtttaagaaaaatgtttgaagcattggataatgcaaaaaaggcagaattttctttgaatctacttttcattgatgacacgaaaaaaatcaaaactccaacatatatttcagaaggtctaaaatggctttcagaaatattagagaaaaacagcagtaactgtagtatgtcggtttcttcaaatgctataaaatga

SEQ ID NO: 72689 - DNA, 1899 bp, Bacteroides nordii CL02T12C05
atgataacagattacgataattgcctagatgacaaagtggatgaagaacttttggcttgtttgaatcttcaaaatcctaaaagtttcttcctatttgccggtgctggctccggaaaaacaaggtcattagtcaatgttctagagcaaatcaaagataagtacggagacgaattgaaactccgtagaaagaatgttgccataataacttatacaaatgctgcctgtgatgaaattattcaccgcttaaaaaatgatcccacatttgccgtttcaacaatacacagctttgcatgggaattaatcagacattacacggcagatattaagaactggctacgtaatacactaaacaaagaaatagacgaattagagattgaagaatcgaaagggcgtcctggaactaaaacatctgttgatagaaaaaggaagattgagaataagaaaaatcggctttcgacattagatagaatatcaaaatttgcatataaccctaatggcgacaatatagaagataattcgttaagtcatactgaggtcattagcataagtgcttttttcttagaaaataagcctctctttcaaaaaatattaattcagaaatatcctattttgttggttgatgaaagtcaggacactaagaaagaattaataaatgcgctattcatggttcaagaaaagaataaaaacttttctcttgggttgtttggggatactatgcaaaggatatatactgatgggaaagagaatctaggtaccaatctacctaatgactggtataagcctgaaaagaaattaaatcatagatgccctaaaagagtggttacccttatcaataagattcgcagtgatgcagatggtattgaacaacttccaagaactgataaagaagatggttttgttcgtttcttcattattccttctgatgttgacaacaaaatagccattgaaaatgcgataaagcagaagatggcagaaataacaggggatgatttgtggattaatagtagcgatgagaaggctgtaaaaacgctgacattggaacaccatatggctgctaaaagaatgggattcgacgatttatttgcttctttatataaagttgaacgctatcgaatcgggttattggatggctctctacctggaatacgattctttactcaattcgttcttcctcttattgaggcgaaaaggaatggggatgagtttgccgtttcaagaattgttcgactgaattcgcctatgtttaagagagaaaatataaaactccatgaaaagcaaactgatgttatcaaaagtgctaataccgctgttaatagtttgttttcgctctggaaaaataatgacaatccaaagttacttgatattttaaataacattgcaaaatctaagctgtttgttattccggatagccttaaagttattgcgcagcgtacggataaggactctgtaatagtagatgattcatccaaagatattgatgagtcgattgcggcatgggatgaagcattatcaactacatttgagaagattattaaatataacgactacatttccgataaatcgatgtttggtacgcatcaaggcgttaaaggtttacagttcgatagagtattagctattcttgatgatgatgaagccagaggttttttgttcagttatgaaaaattgtttggagctaaagagactagcgataccgataaaaaaagtatgaaagttggaaaggaaactagtatagatagaactcgccgattattctatgtgatatgtagtagggccatgaaaagtcttgcaattgttgcatataccaacaatgttgatgccgtaaagaatacagcaatagacaatgattggtttactaaggatgaaattcttcctttagatttacttgcaattaaataa

SEQ ID NO: 72690 - DNA, 2007 bp, Bacteroides salyersiae CL02T12C01
atgtgtaattttgacaaaaaaatgaaaatcatgcacatatccaagattaagatacatgggtttagatgcttcaattcagagggcgcatctattgaaattgatagaagattaaatgcttttattggtttaaatagtagtggtaaaacagccgcattggaggctctaagaaaactatttggaattacaaatgcggaaagaaatataagcaaacaggattttcatgttgcttgtgaagaaggtgatgaggttcgagaacgttctttatcaatagaggccagattagactttgacgaatctgaaacggacgctattcctcatttcttttcatctatggttgtcgatgcggaaggagaaaatccctacataagagtattattggaaagtatgtggacaaaaaacgatcttgcagaagaaggagatatcgacaccaaactgtattttatcaatgtgcctgaatctgaagatagtactgatgaatctaaacacgcttttcccaaacatctaagaggactaattcaggcattttatgttccggctatacgaagaccatcggaacaaatgcgttatatttccggctctatcttatatcgtgttttaagttctatgaaattcagtgatgagttcaaagagaattacttgacaaaaataacagaactcaatagtttatttcaaagtattgatgaattctctacgattgaatctactttatcagacatttggtctgaatttcataaagatgaacgctataaggatgtttctttatcttttggaaccagtgaaattgaatcaatattacaaaaattagaaatatcatttagtccaacagaaatagatagaccatatcaaatagacgaattaggagaaggttataggtctttattttattttacccttgtctgtactcttttaaagatagaggaagagattgatgatgaagaacgggttaagccattacttacaattcttgcaatagaagaacctgaaaaccatattgcccctcaattacttgggcgtgtaattaaagtcttaacttctatatccaaacaagataaagcgcaagtattcttatcttcacacactcccgcaataatcaaaaggcttgatccagagtctatttttcattttcggataaatgaggattatgcaactgaaataaataaaatcgatctcccggagggggatgaagatgcatataaatatgtaaaagaagcagtaaagaactatcctgagatttatttcgccagattagtagtgattggagagggagacagtgagcatcttatatttaatcggctaatggaggtgtatgataaagattttgatgacaatataatatcttttgctccattaggtcacaggtttgtcaatcatatttggaaattgctatcgtctatacatgttccttatattactttgcttgatttagatgtaggaagagaaggtggcggttggggacgtgttaaatatgcattacaacaacttatcaatatcggaaaaagtaaaaagaaactattagaagttgagggaggagaggtcttatctgatgaggcatttgaaaaaatgcatacttgggggcatactaataacaaacttgacagtttaatgggatgggtgggtttcttgaaaaaatataacattttttattcttccccattagaccttgattttttgatgcttgaacattatccggaaatttataaaaaggcaatcccgaaaaacggaggcccaagaatacctgaaaaagataaagaaccggacaaatttgcagcaaaagtaacgaacgcagtggcagccaccttgaaatcggaagatgcaaaaggagaaacctatactgaagaacaaaaagaactgatgatttggtataattatcattttcttggtagaggcaagccggtaacccacatgaatgcattgtcattaatggatgatgaaaagataaaagaaaagacacctcctgttttaatggaaatttttgacaagatagataaaatacttttcaaaaaatga

SEQ ID NO: 72691 - DNA, 1818 bp, Bacteroides salyersiae CL02T12C01
atgaaatataaagcagttgacgaatggattcccgcagacggttttgtcttagaacccaatgcacttgatacggtaaagtccgaacaaaacacgttggttattgccgggccgggagcaggtaaaaccgaactcttagctcagagagcttgttttctgttagaaacaaaccaatgtccttatcctaaaaagatattagcaattagttttaaacgagatgccgcatataatttgaaagagcgtgttcttaaacgatgtggaagtgatttagcagtacgatttgaatccatgacatttgatgcttttgcaaaaaatatagtggatagatttcgtaaaggattacccgaaagttatgcggtcaatagtgaatatgagataatatttggagaaagagatatacttgatgttttcgaaggaattgaccggaattatcggtcaacgcatagtgacaaacaaattttagatgattattacagcaaattgcctctatctccagacagcattcattataaagcatggacacatcaattaagcggcgcgaaatcatttctcacattcaaaatgatgatgcgtttagccgaacttatcatggatgctaacccaaaacttagagaatacctaaaagcaacatatagccatatttttcttgatgaatttcaagatacgactacgttgcaatacgaatttctgactacatgttttggggatagtggttctgtattgactgctgttggagatgacaagcagcggattatgctttgggcaggcgcattaccagagatattcagtaaattcatagaagattatgacgcaagccaactttctcttcaaatgaactttagatcagctcccaatttggtcgaacttcaaaactatttgattacaaatttactgcgaaaagaggatactgtaatatgtaacccgaattggaataaaggggacggagaagcacatctttggattttcaagaacccacagcaagagatagaatatctacattctaatgttgagcgatgggtaaataaagataatattaatcccagagatatttgtattttggtcaaacagcaattacaaaaatatgcaggagagctaattgattatttcaatgagcatggaatcgcagcacgagatgaaagtaagtatcaggacttactaactgaagaggtaattctatttatagtaaattttctatatcttataaatagtaacaaggctattgattcaaaaagttctgttttaaattttttaagtaacatcaattcctcttattccgacaaagaggtctttgccgaagaaatcaagctgcataagtttataaaaacaattcggtctgcctttcaaaaagattttacgaaatgtgttgagggtatagttaatgatataatttcttttgcaggagcggataaaatcaagtcttcatatccagcatacaaaaacaagaaatatttctccgaaacaattggttctttctctcaactattaaaagaagaagccgaaggtgctacaaatttaaagacaattttagatacgataacaggggtcggggtaattccgataatgacgatacataaaagtaaaggattagaataccatacagttatatttatgggattagaagatggcgcattttggagttatgataaacaaccagatgaagataaatgtgctttctttgttgccctttcaagagcgaaagagcgagtggcctttacatttagtcgcaatagaaatgggagggcacagagcttaacaaaaatagaagaattatttaaaagtctggaagattctaagaaagtagcatttcaagagataaaatag

SEQ ID NO: 72692 - DNA, 1917 bp, Bacteroides fragilis CL05T00C42; identical to SEQ ID NO: 72684

SEQ ID NO: 72693 - DNA, 1776 bp, Bacteroides fragilis CL05T00C42; identical to SEQ ID NO: 72685

SEQ ID NO: 72694 - DNA, 2046 bp, Bacteroides fragilis CL05T00C42; identical to SEQ ID NO: 72686

SEQ ID NO: 72695 - DNA, 1662 bp, Bacteroides fragilis CL05T00C42; identical to SEQ ID NO: 72687

SEQ ID NO: 72696 - DNA, 2028 bp, Scardovia wiggsiae F0424
gtggtagatttattgcgtaaacctactggtaattcagggaaggacagggatattactgtgtatttgaaaaaagtaaaaattaagaattttcagtcattcggcagcgaacagactattaattttaatgaatgcacgacgtttattggttcgaatggatcgggtaaaacggctgccttggttgctctctctaaaatcttttctacagatatgcgggtaagagcattagttcgtgaagattttcatattgatgaggatcgggatccttcaagtgttgagaatattgaaatgtttatagaggcggtttttgggtttgaacaaagttcctttaaggaagatatccctgaatattttgatagttttgtaattgataaggaggagaaggagcctatattaagggtccggcttgaagctacgtggtctttcggcacgtcaattgagggagatattgattctaagacatattttgttaagaaccctgaaaatgttaagaaggaagatgagagaaaggaaccggcggagcgtaccaggctgaatagaatacgtttaatatatattccagccgttaggaatccgggggatcttttaagaagtggttcaaggaatattcttcaggaaagcatccagcagattggctggagcctagacacgaaaaacattattgagaagaaaattaaggaactcaatgatacatttatgaatgaggaggatgccaagaaactgggaaattttattactgagtcttggggcggatatgagaatgatcccaggtataaggaagcttctttaagtttttcgacaactgattttgcgtcaacggttaaatccccccaggtaaccttttctcctggaattaataataaagactacacaattgattattttagtgatggacagagatcattgttatatttttcgcttatcgggagtgcgattgactttgagtaccagaataaacaaaagatgtttattcgtaataagcctactagttgcttgactcttattgcagtagaagagccagagaatcatgttgctccccatttacttggacagttggttaatcgcttgaaacagattgcaggccaaaaagcatgccaggtaattattacatcacattcttcttcgattgtgaaaagagtagatcctgaaagcatttgttactttagattagataagggctcttgcacaaattgtgtaccgattaccttggatcataatagcgatgcagaggatcaaaaatatgtaaaggaggccattatggcttatcctgaactgtattttgctgatttagtagttctaggggaaggagacagcgaagaaataattcttcctaaggtattggagagtctgggaggaaatgtcgacagccagagaatatcagttgttcctttaggcgggcggcatgtcaactatttttggaaattgctacgtagattaaatatcccttatgtcacgcttctagattttgatcaggagcgttatggaggtggctggggacgaatagtatatattgtagaacagttgcagcttttagataatgattttgcggatgcggatccagtaacaggaaaaattatagaattgccagagcttgaagcgagagatagtgctactgcggaagatatagaaaagtggataggttatctggaaaaaaagtatggtgttttcttttctgcgccattagatattgattttttaatgttagaggcgtacccggaaaaatataagtcgctggctagaggcttgcaaggtccgcgaaacactgaaggtgaaaatgcgatacgtgatgctatacgggctgtattacataaaaaaggaggtgttggtgcgacatataatagtgagcaaaagaaatatatggtttggtatcgttatttatttttaaatcgtggtaaaccggctactcatatacgtgtcctttcattgctagacgaggatactttccagaaaaatgtcccaggtgttctaaaaaggttagtgagtaaagtctcggaaatactaaagcaaaatggagaagatacaaatgcatag

SEQ ID NO: 72697 - DNA, 1767 bp, Scardovia wiggsiae F0424
atgcatagtcgtgattgggaaactgtaggtggtattgtacttgagcaggaagccgttaaggcgcttcgcgattttgaccataatgttgtggtaacagcaggcccaggagctggaaaaacagaatttttagctcaaaaagcatgttatttgttacagacagaactctgcccgtctccatatcgtgtcttagccataagttttaaaaatagttcagcagataaccttagagctcgtgtttcggagcgctgcaaaaacaatgagtataggaggtttgattcttacacttttgatgcttttgcgaagaagcttgttgatcagtttctaaatatcctgccggataaattacgtccaagttataattataaaattatagatgataataaaagaaggaaggatatagataaggcattagaacaatacatgaaggatgaaaataccagacagtgggaaaggctatggaataaattgctacatccttccgatggttcatcaagtgaattaacgtttcgtatgatattttatcttgcgggtagcattactggaaatacatacgtgaagtgggcaattcgtgctacctatccttatgtttttgttgatgaatttcaagatacgacaagtgcgcaatataattttctcaaaaaagtttttaaagatactgatagcaggattactgccgttggtgacgttaagcaaaggataatgctatgggcgggagctaaacaggatgcgtttgaatgtttcgaagatgactattctccaaacgattatatacttttagcaaattatcgttctacagagacattagtagattttcagaggaaattttatcctttgcttaaacagccgtgcccgaagacaggggtaatgggtgacagaaatgatacgaatatctgcgttctaagttcaaggaatgacgacatcgaatcagacgaagtggctgaaagtataaaaaaggaaattaattccggtattgcccctgaaaatatttgtattttaacgcggaagaaggttagagagtatacatcaaaaattcagaaaaaactggatcaattcaatatccgttcccaagatgcagctaagctccagatgcttcttgatgatccatttacccgattagttattgatctaattaggttgagtatcaaccctagcgatcctgatgatatcagaaggaatgttgaaaatgaattaatgagaatttgtgggctccctgacgccagagaggatgataagcaacttgaaaaattagagctagtatattctaaatgcatcagtatttgtaatgaagggcgctcctataattctcttaaggtgcttgataagcttgatactgcattagggggtaaagcggttttgaaaaaagcatatcctcaatatgaggaggaaggggttttggaatcgtgccgtaaaaaatttattcattgtttcaagcaagagcttgagatatctgagaatgattggtcggaggctattgattcccttcgcggaattggtattgtaccgattatgacgatacataggagtaaggggcttgaatatgaatatgtttatctgattggtcttgagggaaattcgtggtgggacaataagcatacagagggtagtattttagaggcaatgagcacctttttcgtagcgatttctcgggcaaaaagaggtttaataattaccagagttggtgagcgaaacggaagaagttcaggagctggttcaagccaggtagaaaatatgttggcgaattttcttagaaaagcgggatacctatag

SEQ ID NO: 72698 - DNA, 1605 bp, Scardovia wiggsiae F0424
atgcatctcgcgcgagtcaaagtagaaaaccacagccgtctgcaggacttggaactggaagtgagacgccatatggtgctcattgggccgaatgacgtgggtaaatcgtcgttgttgcgttgtctcaacctattgctcggcgcaagcacggcccagctgtacaatcagatcacgcttgacgatcttcgggatcccggtctgcctctttctgtcgaggctgacctttgtgggttctcagacgacgagaaggcactgtttgcggatgagatcaccgttgacccgacaggcgaagccgaactgacactgaccgtacgtctcgaagctaccttcgatgacaatgagacattgtcgatcaatcgcactgtgcccaataagaatataggccgacagatctcgcgcgagcagctgcgggctatcggctggacgctgttgaatgccaatgatcgcgctcgtacccttgacgatgatcgccgtactcttctcgatgaagtgcttgcaggcgtggaactgggcgacgaacaggataggttcgacaacctactaggtgcgatcggcgaacagctccaaaactcgaatgttctatctgaccttcgcggacaaatgtccagtcagctcagtaccgcgcttcccgagcggatcgatagagacgacttaacgttcatcccgggagccattgcgaacgatgacgttctgaacggcgtacgacttcaagtccacggaaagtctattggtgaccagtcggatggaaaacgggcgctctatgccatcgcgctgtacgacctcgtctcgaatggagcgaacatcgtcgctattgatgagccggagattcatctgcaccccagcagtcagcgaagcctggctcgactgctgaaggatggcgataaccagaagatcatcgccactcactcgtctgatattgtgagcgcgtttgatcccgaactgatcgtgtcggtacgagaccgcggtagagtcattcaaccaacaagtagacttcttgatgatgatcaacgcgccgtgcttcgatggtgggtacgaaacaaactggagccgttaaccgcccgtcatgtcgtcgccgtcgagggaatagcagatcgaatcatcctcgagcgagtcgccgaactcaccggacgtgatctagatcgtctaggggttagtgtgattgaggctgaaggtgctggcgacatgggcgtcatctggaaattgttcggtgaggatggtttcaatgcacagctctctgtgttgatcgaccgcgatgccgttgagaaaacttccaagagcatcggcgttgaagagcgtgatttcaaaaagcgctcgatttgggtctctgagagagatcttgaagaagaatactctaaagcgttcgatgctgagcatctgtgggacgcgatgcagcatagcggcgcattcagcaaaaacgagttgagcaacgtcaagcgtacgggcgcgaacgcctcgccaaccggggctgacctcgccaacttcctccgaagcaagagcaagtacaagactcaaggggcgatcatggtggcgaatattcttgataaaacaactgcttcgagaatcacaagcatcatgaacctgctcgacgatatcgagagcgcttga

SEQ ID NO: 72699 - DNA, 1689 bp, Scardovia wiggsiae F0424
atggttgataccacttcagaacagacacaagtccgagactatcccgagctctcgctcctcgtcatcgctccagctggctgcggtaagactgaaacattggcgctgcgagtagagggactgctgtctcggcaggacgtcaagtcaccgcagcgcatcttggtgacgacctttactaatcgagcacgtgacaacatgcgcgatcgcctgagccgctacctgacacctcaccagatgcgtgaggcggtcaccgtgtgcaacttccacggtctctctgcccggattattcaggcgcacggcaacgtggtcggcgttgacccggcattatggaccatgccgcagagtgactgggttgctcaacaatgtcgcgcccggaatctgaaaagcttaagcgctgatgtacagagcaagatcagctcagtaaagcggcacgggttcagcgatgaacaggttctagcagaactcgagcgttcgggcaacgaatacgctgtggggattgagcggcagcgtcagtctgagcgacgactgacctacgatgacttgccacgactagctgaactgattcttgccaacgacgaggtaaccaggctatatcaacggcactttggggctgtcatagtcgacgagtttcaagacctaacgccacaacagctgcgaatcgtgcagcgtatcgggtatggaaggaccacctacgccggtgacatggcgcaaggaatctatagctttgctggagccagacctgagctggtcatgggacaactgcaagctgagtgttcaaagactatcgagttcgccgagtcattccgttcgtcacccgccgtgctgaaggcagtgaattcactgagcgatatgacaggtggacaaacgctgactgctgctaatcctggttcgtggccgtctgacggtttcgcagggtgtatcaactttactgatacggaagaagaggctcgctacatcacacaattctgcgcaggtatcttgtcgcaagaacgagcgcctcgtcaacgaatcggaatctcagcgcgaaccaagtaccggcgccgtttcgtagaccaggcgatacggaatagcggcctacagtatagcctgtgggacgaaggagtgctggataggtcgattgcgcaaaagatccgaagtatgttacgggagattacactcgacaagttccgcaacgcagacgacccgcctgaattcgtacgtcaggcggctcgcctggacgaggagcaggatcctgacgagcgcacggcgctctcgaacgcaatcgactggtgtgtggacctcctgcgggacaatgtcacgccggacgaggttgagaagcgcattcagatcggcgataccgactcgctcatcacccagggcggagtgcatctactcaccggccatgctggcaaaggtcagcaattcgactggatgatcatcgtcggtctcgaggaagaatgccttccaaactatcacgcagtatcaaatgcggagatcgcggaggaagcacgaacgtttgcggtcatgttgtccagggctcgccatggggtcctggtgacttcaagtgatgtagtgcccgatgactataatccaaagcgtccgaaacaaagatctcgttttctggaaaacgtcgcgccgacgatgatgactagtcgccaggagatacgcgattggctcgctgccgccgattggcaagctattgctgcgaagtaa

SEQ ID NO: 72700 - DNA, 1782 bp, Saprospira grandis DSM 2844
atgtacctatcaaaccttaaactctggaattttcgaaaatttggcagcaactctcctttagacctagaaaagcctgacttagatttaaattttaaaaaaggagtaaatgttctaattggagaaaatgactctggtaagactgcaattatcgattctataaaacttgcgctaaaaacccatagttacgaatggttaaaactaaactgggatgacttctatgatgattcagatagattacgaattgaattacagtttaacaacctatctgatgatgaagctaaaaatttcatagaatggctcggggtcactggtgaaaaagatgatgccgaatcatatctacggctaatttatgatgccagacgaaatacaaatgagcaatacatctatccctctgaaataaaagcaggtactgatgaaggtggacatcaactgacagcagaggctagagaatatttaaaaacaacttatctaaaacccttacgagatgctaaatcagaattaatccctcgtaaaaactctaggctcactcaaattcttcaaggacatgaagcgttcaaaggaaaggatcaagatcacttactagttgaactatttaaagactttaataatgaagttcttcaatactttgaaggcaaggataaggatggtgaagcacttacaggtgaaaacttaaaagggcaagaactaaaaaaagaaatagataagtttattggtgcattttactcagaaaaaaaagaatctaattttggtattcttggtaaaagcctcaaaaacatcttagaaaaacttgatttatctattaaagatgaaataaaccctggcttaggaactctaaatagattattcatggcttcagagttgcttcatcttcaaaagaaaaattggacgggtttaagactaggactaattgaggagcttgaagcgcatcttcacccccaagcccaaatgcaaattatcgaagccttaaaagctgaagaaaatattcagttaattttgactactcatagtcccaatctagcatcaaaattaaagcttcaagagttaattatctgtaatggtaaaaatgcctttcccatgggggaagagtatacaaaactagattctaaaagttatagatatcttgaaaaatttttggatacaacaaaagccaacctttttttcgctaaaggaattattctagtagaggggtgggccgaagaaatactacttcctagtatagcaaaagcgatggggatcaacctaactgaaaaaggagtatcaattgtaaatattggaaatattggttttagccattatgctaatatttacctaagaaaggaaaagccccacatggatattccagtagcaataattacagatgctgatataaaagcgtacagaaaagagaaaggctcttatataaaagaaaaaacaaatgtatttagccaagaaacgaataaaaagattaaatcaaacaatgaaaaatctgaagaaaacgtaaaatattacactggcgctcattggacattggaatatgctttatactgctcttctctattaggagagaaatttaaagccgcctgtaaaaacaagcattcaagaacagattgggatactaatttcgaggaaactcttgctgaaaaattgattgataagacgctaaagaagacagatatcgcctatgaacttgccttgcaaatagataatgcggtacaagatgaaagctttaaaatttccaccgaagttaatgatgacagtatttcttacctaatccaagcaattaaatatgccacaaaatattaa

SEQ ID NO: 72701 - DNA, 1986 bp, Saprospira grandis DSM 2844
atgccacaaaatattaacatatcagatcaagatatcgaatacgctgaaaaaatacttttacctgaagggaaagtgtttgatcaagaaagaagagactttattcgttgtttaaaaactattgacctacaagctgtacctggaagtggaaaaacaactgcactgctagcaaaactcctaatattggaaaggtacatgccatttcaagacgggcatggcgtgcttgtaatttcccatactaatgcagcagtagacgaaataaaagaacgtattggaaaacattgtcctcaactcttttcatatccaaattttgttggaacaattcaaagttttgttaacagattcttggcagttcccttctacatgaactccttaaaagaaagacctttaagaatagatgctaatctttacaatgaaaggttatctgagataataaataatccatgggcttataaatttggtctttcaaatgagaattttaacaaagtctaccgttttataaaacgatcagaacgtatgttctacaagtaccggtttggcattgataaagataaaatcattttgaaagaatctttaaacggtacgcaagtccaaatcaaagacaaaaaaaacatactaacctggctaaggaaattaaaaattcacattttatgcactgaaaaaatactacattacgacgatgcatattttttagctaatcgttatatcaaaaaaaaccctacaataactactctacttcaaaaacgattcaaatatgtacttgtagatgaaatgcaagacatggatattcaccaatacaatttaattgaaaccatttttaagccagatgaatccacacaatccgtagttcaaagaataggcgataaaaatcaagctatttttaatagcgactcttctcctacaaaggatatctggacccaaagaaaggtaatgtatcttaatggtagtcatagactaagttcaaaaattgcggatttagtacaaaaatttgcgctaacaggaaatccaataacaggaaataatccgattgaaattaaacctataatttttatttatacggatgatactatagaattagttattccaaaatatgctgataaaataaaagaattacagaagggcgggttaatccctgaaagtccacgacataagtttacggcaattgcttggagaaaggggcaaaatactagtgctaaagatagtagaataactttatctacatattggcctcattttaaaaaatctaagcccaaagagcaaatagatttcaaagttcttgaagactacatcctttacattaacaaagacgtaaagactttacgacctatacaaaacaacataattaacctactactagaaattcttcacatagaaaaaatatcacataaaaaaaacaactactattctaaaaaaagactactaaatttcctgaagctgcgtgaaaataatgattacgaagagctaaaatcaaaactctatgaatggtctatgggctgcataaaggagaaaaagttagatgttatcaaaaatattaaagactacatacctacttttttatccttcttcgatagagaaataaatttatctacgcaatttattttaggtaaatctgagatttctttagcgtctaatgagaatgaaaacgatttagaaatgaacatatttaattctgagggaattaaaattgagattggatctgtccattccgtaaaggggcaaactcatacagcaacattgtacctagaaacttacttttataaagatggtggcaagtcatatgagtctcaaagacttgctggtcaattcttaggtactccaataactaagagtgcaggaaaaagagtaaaacaatcagcaaaaatggtttatgttggattttcgagacctactcacttattaggtatagcaattcatcaagacagatataagtcatatttatcacaaatagatgggaattgttgggatatagttaaagtttggggaaattaa

SEQ ID NO: 72702 - DNA, 1956 bp, Pseudomonas amygdali pv. tabaci str. 6605
ttgaagcttcagttcgtccgcatctgtggttttcagtcgtttggcgcagagcccgtcaccgttgatctggccgacctcacattcttgatcgggcccaacggctccggcaagaccgcaactctccaggcgctttgccgcctcttttcgtttgaccccaatcagcggcgactccgtaaatcggacttcttcgttccgcacgatgagacgcaggctcccgatcagcgagcgttgtggatcgaggctgagttcacctttcccgagctcagtgacgacgagaacgaacacccgacgattccaacgcactttgggcacatgcgcgtcgataccccggatggtgagcctcgggtcaggtaccgcctcgatgcgaccatcggcattgacgatgaaatcgagcagagcctcgtttatgtcctggacgtggatgaggatgacgagccggtcgataccgccccggtgcccagggacgagcgaaacttcatccaggttcactacctcccggctcgccgagatccggctgaccacatcgcctatggcgcgaacgccttgctcggacgtctgctgcgagccgtgaactggtcggagcagcgtgagacgatccagcagctcaccacagatatctcccagagcctgactcaaaatgaatctgtgctcagcctcagcgccggcttgaccaagacttggaaagagctccacaagggccagttttttacgcagccgagcgtgaccttcatggccaacgagatcgagtcgctgctgcggcatctttcggtgtccttctcgcctggtcatggcgagcagttggtcgatttttcgaggctgagcgatggccaaaaatcgatgctctacctctcgctggtgttgtcctcccaagccgtagggcgagcggtgctgcatggcaatgacgactcttttgacgctgaaaaactgcggcctgcggtgttcaccatagttgctttggaagagccagaaaatagcctgtcgcctcattatctggggcgaatcgtgtcatccctcaaagggttggttggcgactccaaattcgccgatgctcaggctctgattgcgactcatgcaccttcgatgcttcggcgtatagacccttcggccatcaggtacctgaggttggacgagtcgcgctgcacggtggtgacgaagattcgaatgccacccaataagaagggtgaggcctacaagtttgtgagggaagccgttcaggcctatccagaggtctatttttctcgtctggttatcttgggggagggcgacagtgaggagatagtcctgccccggctgcttgcagcgaagaatctgttagtcgacgaagcagccattaccatcgcgccgctgggtggtcgccatatcaatcatttctggaggctgctcagtggcctcaagatcccttacgtcacgttgttggatctggatgtagcacgctttggtgggggatgggggcgtatcaaatacgtcgcgacggagatgaaaaagcatcggccaggtgatgtgtatctgacagacgatcagctcaaaaatttacccgtatggaatcatccgacccatggaatcttgaaggttgagaaggatccgcaatataaatcctacgttgccgaattagagcccttgggcgtatttttttccgcgccgatggatctggatttttcgatgctcagggcttatccgcttgcctatggtatggctcctgaagacctagttgttccgaagcaggggcaaaccaagtccgtgctgggcgatagtcatcacgatcgtttccaatattcattgatcgagcgaaagcactttgtggcctaccacaagcgcttcaagctcgacagcaagccaaagtcgcatatcgaagcgctttccaacctgacaaatgatcagttgatagccaagatgcctgcgtccctaaatcgtctggcggacttcgtcatcgccaagatcgaagggctttcggaatga

SEQ ID NO: 72703 - DNA, 1671 bp, Pseudomonas amygdali pv. tabaci str. 6605
atgatttcccccgaggcttggaagccctcggaaggcatcgttttggagccgaatgcggaggtagcggtcagggaggtcaaacggtgcgtggcgttgactgcaggcccgggcgccggtaagtctgaactgcttgcccagcgtgctgactttctgctgaccacgggggcatgccgttacccgaagaggatattggccattgccttcaaggtggatgcgagcaataacctcaaggaaagggtttggaggcgatgcggggccgactacgccagtcggttcgacagctatacgttccatggcttcgccaagcggattatcgagcgatttcgccctgttctcaccggcgacgatgcgttagacgcgggttttcgagtagtacccaaagggaaggcacaccctgtccagactgagttcgggcttctgatccctctggccctgaagatcctggacgcttatccgatggcggtgaatgccatcaggcagacctacagtgatgtgttcctcgatgagtttcaggactgcacggacgagcagtacgcgctggtcagcaagatttttggtggtacggcgcgccgggtcactgcggtcggtgatgtgaagcagaagatcatgggctgggccggcgcgcttgacggcgtattcggaaagtttgaagcggattttgcagccacccatctcaacatttaccgtaattttcgctcgcaacctcagcttctcaggctgcagaacgacctcataaaagtcctcgatcccggctctgaaatgcccgcagaactcttgggcggcgagggcggcgaaatcctgctccagtctttcaacgactgcactgacgaggccttcagcctcgctgatcagatcaacacctggatcaacgtcgagagtgtggcgccctccgaaattgcggtgctggtcaggagttatcctgaggcctacaccgtccggttgacctcggcgcttgatgggcttggtatcgcctatcgcaacgaaaatcagatgcaggacatcaccaccgagcccattgccttggtcgtcgtggactttctgctatgcctttatggttcgcgggagccgaaagcgtggacgcggttgttgagaaggatcattccagccgatgacgacgaccacgggggctccgtgcggaacgattggaacaggttcatcaaggaagcacgcaagactgctgccgaggatctcgccgccaaaaactatgcccagaggtggacgctactgaaagagtttctgtccatggtgggtgtaagcctgctgacaggcctctctcatgactacgaatcgcgtgatcgcttgaaagaagttattcgagatcttaagaaatacatcgacgcggcattggagcaggagcctgatctgctcaaggcactttcccaactgtctgatgaccagtcgattcggatcctgaccgtccacaaaagcaagggccttgaatttgattcggtcatcttgttgggtgtggaaaaagaggcctattggggtaacgacactcatgaagttcgatgcacattcttcgtagctatctcccgtgccaagaggcgcctcgtggtcacaactgctaagacgagagacaaactcgccgacataaacagttggaaaaccgtgcgcaggccacatcacgagtttcttggctacgttgagaaatggcgagcgcctgaaaggtga

SEQ ID NO: 72704 - DNA, 1905 bp, Pseudomonas amygdali pv. tabaci str. 6605
atgtatctacggcaattggatgtcactggattcaaatgctttggtgagccgttcaccatcgaatttcgagacgggctgaacgtgctcgtgggagagaatggggccggcaagactggcgtggtcagtgcagtgcgccagctcttcaacgactcggagtcaggcaagcgaatcattagtgagcgcgatttctaccggggttttgagccgggcgcggtcgctgctgaaagcatccagattcaggcgacgttttcaggtctggatgatcaggacgccattgcgttcgaatcctggtgtggaaatcacgacgaggccaagctgacttttgaggcccgcaatcaagagtctcgcgggcgcttcaggcaccacacctacgcggggcacgagcatgccaaaccgttcgagtccgagacgctggactacatccattgtatttacctacctccgctgcgcgatgccgagaacaagttgcgcgaaggtcgccagtcccgccttgcccggctcatgaaggccctctgccgcaaagagctcgctgaggccaggaaggcacagactcttcacccgctggaagagcatgtcggaaacttcaatcgtgagctttcacagagcgacgaatttgcgatcaaacaagccaatcagcgaatcggagacaacctgaaggcagcgctggggctcaatctctctcagggcaccatgattcagttctcagaagtcagcttctcccggatcgtggagggcttgcggcttctgtacttccctaacctcagcgaggctgacacgacccagttccgatcgctggaggagaacagccttggctacaacaacctcctgtacatcgcgtcgatcctggctgaactgatcctggaggaagaagaggatcgaggcgaagagacctatctgcggctcctgttgatcgaggagccagaggcgcatcttcatcctcagcttcaactgcgcctgctgcggcatttgaaaacggtggctgaagaacgtggcatccaggtcatcatcaccacgcactcaacggtcatctctgccgctgtctccctggatcacctcatccacatttcaaatgacgcaaggccagtagcaataccgctcagcgcgtgcggccttcctgagcacagccgccgctttgtggatcgctggttggacgtcacaaaatccaacctccttttctccaaaggggcactgctcgtagaaggaatcgctgaggcgatggtgctgccagagctggcgcgtattgtcctgcgcccctacggagaggggaagaactgcctggacgactacggcgtctcggtgatcaatcttggtggcatctacttcaatcatttcatgcagctgttttgcgatgtcacgggcggccagccaggcgagaatgtcccaatcaggtgtgcagggcttaccgacaatgacccaccgaaatctatcaggtcggttgcaggcgatgacggtaaagaaatccccgttccgtttcttccccatgatgatgacctccttgtaggcgacaatccggccttggcattgatagggccgatcagccagtcgcagttcggcaggttgttcgtaggtaagtacaagaccctcgagtacgacatcgcgatggagggtaacaacctcagattgatgtcgacggctgcggccactctctggcctgtgcaaggcggggaagtggtgagagagctgacaaggcgggctggactggactactcgaccatgagttcaggggagagggcgccgtacgcgaatgacatgcttgatcgaatcgaaaccaaagaaattggcaaagggttctatgcgcaggcattcgcggacgcgctggctaacgtgagggatgactttatcgtgccggaatacatccgcttagccgtcctctgggcttgtgggatcgaggaacaagccgaatga

SEQ ID NO: 72705 - DNA, 1752 bp, Pseudomonas amygdali pv. tabaci str. 6605
atgaacttcaccaaggagcagttggaatacatcgcagcgccgcttgatcagcacagctacctgaaagcatgcccaggtagtggcaagaccgaggtggtggctgcaatggtctcgcaaaccatccaggtgtggtcacgttcgccttcgggtatcgctgttctcacgttttctaacagtgcgaccgacgagctccggagtagggtgcacaagtacttgggcgggcctatcggcttaccccacagtatctctaccttcgacagctttgttctcactaggttggtggccagcatcgccagcgagctgacgggctatccaggcaaggatggcgatttccgtatccgtatccttgagaaggaagcgaatatcttccagacccagcaacggatttgtggtcgccgcatctcagcctgtcggtacaactatgacttggaggcggggcgcttcaagttttcgaccggcgatcgagcgctcgatcatcagctcaacgccgtggaggttactgacaatatgcatcgggatctcgtagccacgaagaggcggttctggctcggtggttacgctacccatggtgacatcgatatgctggcgcttatggccttcaaagatcaccagtttgaccgctacttctcccgagttgcccgtcggtttcccgttgtgatcgtggatgagtgccaggatctctccgctgaacaactgcaaatcgtgagcaaactcagcggctttgggatcaagtttcacttcgtcggtgacctgaaccagtcgatttatgggttccgcaaatcgaacccggccaacgtcaacaagctcatgggcgtactgcagttcaagcagtacgaactgaccaccaattggcgcagcggccaggccatagtcgatctctgcagcaacatcgtcggtaccgggaaggtttcggggaatcctgaaatcgcatccatccagcccaaaattctcgagtacgaaagttgtccatccgagctgctgcctacgatccgaaacctgacagctgcatacaatgaggtggtactggttgcccgagggcatgcaacccttcagcgcctgcgcaacgggaagacctttgaaggcattgagctgcttgcagtcgcctgcattggcgccagctcagggagcctgagcgatctcaaagtgagtctcaggacattcgcccagtggcttgcagggaagctaaagctggaggtcactaagacggggccctattgcccaacctcaatggagtcgaaactggcctggcgtaaattcatccaccaaagcctgaggttcatggttgccagcggcgccggcaattccgatcaaaactggtcagcgtgggtacgctgcgcaaaactcgcactgcgacaactccctgaccaggcgttcgtgcccgatgaaattcttaatgaattgcaggaattgagaggactcaacctcgtcaccaagcgtggtcaaggtgataagccagtgtcgatccgtctctcgagtcaggatatccaggatggcgaatcggagacattgcgttacgagacgattcaccaagtcaaaggtgagactcacgatgtcactgtggttgtgtcctcacgtaaacgcggcaaaggtgaatcacactgggccgactggctacagaaccgtgagtctgaggccgcccgttttgcctacgtcgcgagctcaagacctcggcacatgctcatttgggcagtcaaaacgctgaaacctcgcgagcgtccaaccctggtcaatttgggcttccaactgccgtga

SEQ ID NO: 72706 - DNA, 2133 bp, Staphylococcus epidermidis NIHLM088
atgtatatttcacaattagatttaataaattttagaaattttgagaatagtaaattaaagtttaataaaggtgttaatactataataggcgaaaatagtgcaggaaagtctaatgttttatatgctttacgattattactagatgataatttacctttaagcgccactaaacttattgaatcggattttaattcgttgttatctgagaaatggaaagggcattggattatacttaaaataacattttcagatttagacaatgatgttacagatagtttgattacacataatactcaaaatattgaacaagaagatggaaaaggaacatttactttctattttagacctaaagacgcaatcagaaaagaactatattcatattcccaacagattgaaatcttgaagagttctaatcaagacgtcgaagaagttcaaaaaagtttaaataattttataaatcaaataactttaaatgattatgaggctgtctatactagtaggggtagtgcagattttacaattgttgaacaatacaatgaaatagtaggagattttgaaagacaaatttttccaaatcctgacaatgatgataatgaaaaaattggtaataaaatttcacatattacttcaattaaaaaggaagtatcatgtacatatgttaaagcattaagaaatgttatatatgaattaaaacaaagaagaaaaagtccattattacaattattaagagggagcactaataatattgagatagttgatactcaaaatattaaaaagaaaattcaagatattaatagttcaattagtaaattagatgaaatacatgatttaactgaaaagttaaaaagctctcttaatagaacgcttggcctaacttattcaccaaacgtagatattaaatctgaattgccagaagaaattgaaacattatttcaatctttaacattatgggttgctgacgatagtatgagtaagcaaggaaaactagatgatttaagtttggggggagcaaatttaatttacattacattgaaattacttgaatatgagttttatcaagatacagaagaaaaagcagcacattttctgttaattgaggagccagaagcacatattcatacacacgttcagaaaacattattcgataaatatcattttgataatactcaagtaataattacaactcattctacccatatttcttcggcaagtaatattaactctatgaatatattaattaagaaaaagggacgcacagaaatatgtcaccctagcaatggtttatcacctgataaaattaaaaaaatagaaagatatctagacgcaactagatctactttgttatttgctaaagggataattttagttgaaggggatgctgaaataattttaattcctgaaatgataaaaaaagtatttggaatcaccttagacgaacttggaataagtataataaatatgagtagcgccgtatttgataatatagctgaattatttagtaatgatagaattagaagaaggtgcgcaattattactgacttagatacctcattaataaaattaccagaagatgaaaatgaggatactgatgaagaaaagagagaacgatcagcccaaaatataggtgcaaatagaaggagaaaactggaagaaaagtatagtgataatccatgggttaaaatgttttatgccgaatatacttttgaggctgattacgttttaaataataatgaacgtgagataattaatattttacataaaatttataaaaattcacattcggtagataatgctactgagaagttaaatgatagttcctctaaagcgaatgaagctttaaggcttgccaataaggtaggtaaaggttggtttgctttattgttagctgaagaaataaataggaataccaatattccagaatatatcttgagtgctgttgccttcgctgctaaccacatcactgagcaacatataaaaatgatggcagggtatagaattttagaattatatggtgaagaatacaatcaagaagatgataaaaacttgcaagaaatgttagaaattttaaattcaaatggacaagatatcttagtaaattttataaataaattaagggtgtacaatgaattataa

SEQ ID NO: 72707 - DNA, 1773 bp, Staphylococcus epidermidis NIHLM088
atgaattataaacttgacgagtttcaaaaaaaagctatagattttgaggggaatttattgattaatgctggtccaggaagtgggaagacgaaaattttaaccctaaaagttattaaagaacttaataggttaaaatatagaacaagtaaaatagcagccttaacctttactaatagagcagcagaagaaatcagtaaacgaataaattttgaaattgaagataattccaagttttggagtggtactattcattctttttgcttgaattggataattaaaccatacagttgttatttatcagaattgaaaaatggatatattataattgatgagtcagaagttagaaaattgaaaaataaaattaaacaacgctatgaaattccttataaaaaagattttataacgagaagaagtagtaaaggacattatttaaataataaagaagagtttaacgaagcagcaaaagcatatcacgagtatttacgagaacataagttagtagattatgacttaatacttttttattcttatatgattatcaagaagtttccattagtttcatataatttgtcaagaatatttaattatttttttattgatgagtatcaggatactcaagatcttcagtaccatataataggtcaaatagtctcatcttcaaaaggaaaatgtcaatattttattgttggagacgtggatcaagctatatataagtctttaggtggagaagttaaatcaagtgaagaaatagaagaaataatggggggctatccactaagacaattaaacctaaaatataattatagatcaactcaaagaatagtcgatttttacaataatttttgttgttcaggaaacttaatgtattctttatcaaatataaatagtgaagaaggggttatagaattcgataaaaatattaatgtcaatagattaactgatagaataagttgtattataaaagaaaatattgagcaaggagttctacctgaggatatatgtatccttgctcctcaatggcaaatgctgactaagacaattagaaatttaagaatgaatttacctaatttaaattttaatatgccaggattaactttaatacctaggaatagtgataatatttggtttaaaattgcacggttaattttaacctatagacttcctgataattatttaattagaattaaatgggcaaatgaaattttagaggagttaaaatctattctaaagtctaactctgaattagaaaacttcactccaaaaaaatttataaagatagttagtactataaatattaaaaataaaataatcactgaatatttagaagaaagtttcttactagtaatgagtcaattaaatatagatcatttgaaaaatgaggcactaaattttaagtgggaaactttttttgaatcgataactaaaagaatggagaatcaagagtttagaggtgtacctaatgatgctataagtaccaaagaaatgtttaatgtagatagagggattaatgctaatacatttcatggggtcaaaggagaagagtttgaaacagtaattgcttttgggttacttaatggatatattcccaattgggatattataattaatgcaccaaaatataaagataaagaatctaaacaattattgtacgtagtttgttctagagcgaaaaaaaatttatatctattttcagaaaaaggaagaaaaacaagaaagcaatattcgtataaacccaatcctcacttagcttcaattaattttaaagatatttag

SEQ ID NO: 72708 - DNA, 2307 bp, Acidovorax sp. CF316
atgcccgacacggccgcagccccgacaaacggcgatatcaaactccggtttcttgaactctgccagtttcgccggcttggcaaagttcagttggagatcgatcaaaaaacgaccatcttggtcggtgcgaataacagcgggaagacttcgatccttgcagccctacgtcactttcttgctgatggcacctcattcggggccttcgacatcagtctctcgcagtggccaaagttgcgtactcttggaaagagttgggaagcgctggcagaggacccttccacggtagcaagctctgaggtccaatggaaggagcagctgcagactctccttgaggcgatgcctaccctggacctatggttcgatgccgaggcaggcatgtatcactatgtcgcgccatttttgtccaagttcagctggacgggaggcgctgtcggtgttcgattgcgtcttgagcccgcagccactgtagacgagctgaaacagctggcctggacctaccaactggcacgcgctccagttaaggacatgggggcagattcgctggcgtggccgattgatctgctggacttttggcttcgcgaaccaggaaagcttggccaagttcgcgcgtacaagcttgatgcagacaacaatcccctagctggtattgcagcctacaccacacaggcgctaccagaggatgctagtcctattgagcgaaagaacctgtcgaaggtgatacgcgttgactttgttgcggcccagcgcggactcggcagcgaagaggctgattctcggtcggcttcaggcccacatagggtcggaatgttttccaaccaacttctgaaatttgctcggcagcacttgaatgtcgcaagcacggggcacggtcatcgtgcagacctcatcaaagccgttgcagaggctcagcgcgacctggacaagaagattcacgaagccattgcggattcagttgaggaggtgaaagaacttggctaccctggcctgcatgatcctcaagagatccactttcgaactcggatccaaaccgctgacttgctcgaccacggtaccgctgtccagtacagcatgcataaagagtcgctcgaggaactgcttccagagtattccattgggcttggctaccaaaatcttcagtcgttaagctatcaactagtttctttcaaaacagctcgactgaagccagaaaagggctctccagcgcctgttcacttggtcatgatcgaggagcctgaagcacacctccatgttcaggttcaacgcattttttccgaaaaggcgcacaagctcatcagcccgacagcaaaggatgagtcaaccctcaaaagccagctgctcatcagcacgcactcaagccatcttgcccatgcggagagctttgaccgcctaaggtatgttcgccggatagcaaaaagcgcctcaaacccgatgccgtccaccgaagtggtcaatctcggtcaggtgtttggcaacgacaagaagacgcggcagtttgcggagcgctacttccgtgtccagcacaccgaccttctttttgccaatgcggcggtctttgtagagggagtcgcggagaggatgctagtcccgctctttatggagcgtgactttaaagcactcaacagtcgatacgtgtcatttctcgacatcggcggaagtcacgctcatcgactgaagccgttagtcgagaagcttcgaattcctacggtcatcatcaccgacatcgacccttcagaagagagagaaggcaaacccaagaatggtggtgaaccgaccaagaagttggttgccgttgcgaatactggccaaccaggccttcagtgcggcaatccaacccttcgcggctggcatccgaagttgcagatgcttgatgacttcaagaacccgagtgactcacaatgggtttggcaagaaacggccgactgccttgttcgttttgcatggcagctccccgttgcggaagcaggagagaactggccgagcacatttgaagactccctggttttgaccaacatccagtggttcaaagacttgctgcaggagaaggtagatgaggcaggcatggagattgatcagcccactggggcgctccgctccgtcgcaacgctcgtcgcaaaagcgacgagcactgcagagctacttgctgccctccatgcactcatgcacaactccttcaacaagggggactttgccgcaagcatcttcgaaaagatctcatcagaagagccggttgtttgcccgaagtacatcgcggacgccctgggctggcttcagaaacagcttgatccgagccaggagcccacgccatga

SEQ ID NO: 72709 - DNA, 1950 bp, Acidovorax sp. CF316
atgatcgcagtgccccacgccatgaacgacgacagagactctggagttgtcgaggaaatttgcggctatctcactgaacttcctccccgtagctacttcctttttgccggtgctgggtctggcaagacgcgaacactcgttgaggtgttgcgtcgactgacaggcgtcgtgaagcatgagaagggaaatcacctagccaaacagctaaggatgtacggacggtccataagagtggtgacgtacacaaagaatgcggtatcggtcatcaatggtcgcctcggagaaaacgacctggtcaaggtctcaacgatccactccttttgctgggaactcattgccggattcaacgatgacattcgagctgcactcatagccgtgaaagaaggtcagatcgccaaggagacggccgatgcactcgccaagccaagaggcattactgcagccaaacagcgcgatcttgatgagctcaaagccgacattgaggcgttcagaacgacagatgtatttatctaccatccagatcgcaacacctacgggcccggagcactcgctcacagccaagtcctcgatgctacggcatggctgttaggaaacaggcatacgctgcaaacgatcctcaaagaccgtcaccccatagttctgattgatgagtctcaagacacgatgaagagcatgctggacgcatttatgtgccttgcggaacctaggggtagcggcctcaccctgggcttgcttggcgaccatcgacaacgcatttacaacgatggtcacgccgatctcccaagcctgataccaccgagctgggccactccagagctgcagatgaatcatcgaagccagcgcagagtcgtcgacctcatcaacgcaatctgggaagcggagctggagggccgaactcagccggcaagtggcgtggagcagcactctagatccgggaaagcaggaggcactgttcggcttttcgtgggtgacacatctcgttccgcggaggataaggtcgttggagaacgctggtgcgcagatcagatgcggcacgcaagcggatatgacgattggagccgaggtcagtatcaattgctcgcgttggagcacaagctcgtcgcgactcgtggttctttcctcgacgcattcagtgccatggtcctactggacgcaaatgccgctgcgcctagtggaagtggcgagaacaaagggccggcagttgtacaggtgctgttgaacgaactcgggcaattggaggcgtgcattggcgctgacggcacggtagatgaggtcaaagccacagatgtctttcgacgctacggccgccttgatggaatgccggacagtcccaccgaccgaactcggcgcgttgaggacatgcgccaggctcttgaagctttcgccatcgcccgagcaaatccgaattccaccgttgaacaagttctcaagccgatcctcgccgcaaatctgtttgacgtggattctcgattgacagcggcgtatgaggacaaatctcctgctccaccagaacccggcagaggcgaagacgaatctaagcaaaaccggatgcgtcggggttggtgcgcacttttttcagcaccgtggaatcaactccagaagtaccgtgtgtacctcacgggcgattcagtgcttgccacgcatcaggtcgtcaaaggttccgagtttccacacgtgatggtggtgatggatgacaaattggcagctggcaatcaaatctcatacgacaagatttttggcggtgtccaactcaccaaggcagatcgagagaacatcgacaaaggcaaggaaacgagcattgaccgcacactaaggcttttgtatgtcacatgcagccgcgctcaagagtcgctggctcttgtactttggtcttccgatcctgccgccgctctactgcgagtaaaagacagcggttggtttttagagggagagtttgacccgattcaatag

SEQ ID NO: 72710 - DNA, 1677 bp, Clostridium sp. MSTE9
atgaagtttgaaaatatagaaattaagaactttagaaactttgaaaagataaatcttaacttaacaaataagaatatattctttggcttaaacgatgtaggaaaaacaaacttcctatatgctttgcgctatgtatttgataaggatgttcggaagctgaatcttctggactctgattttcataataaaaatttggacaagccgattgaaatcttgataacactcgatataagcgatacgatatgtaccgactgccaaaaactacgcgctcaattaaagggtgcattatcaagcgaacacaaaaaagtttatataaagcttcaagccgaatacgataggaaagaaatgcttgctttgcctatattgttttggggcggcgataaaggcaaattgcaagagatgaaacagagaggctatttgtatgagcttgattatgtttttaatgttatatacattgactcgtatgttgatctgcattcattatttaagaaaaatgtaaatcttcttgtcaaaaatgaaagtgaaactgataaagatatattatctaccattcaaagtacggtggatcagttgaatacgcatatagcatcactatctggaattaaagattttgaatcaagaattgctccggaatatcaaaagtttcggaatgaaggcatttcagtttcgataaaatctgaaattgctgtaaaaggactgtattcaaatattattccatatataaaacaggatgacgacgataacttatatcctaccgccggagaaggccgtaagaagctattatcatattcaatatttgatttgctatctgacgaaagcgcagagaaaaaaataaatttatttttggttgaagaaccggaaaaccatttgcataaatcaatgcagattgccttatcacagattttgtttactgacagtaaatatacatatttgtttatatctacccattctccctttgttctctatgaaatggataatgttagtctaatccgtatttatagtgaaagaaaaattaccagcgccagcaccttttataaagtacctgatgcttttgagaaaaatcgaaaaatgctaaatcgctctttgtcggaagcaatttttgcagatagagttctattggtagaaggcccctcggaacagcttttatttgagaaaattctttctacaataaaccctttttatgaggcagacggaatttatattcttccggtcggcggtattgggtttgaggcttatatcaacattttagacaatttgaatattttgaatgtaattaaaacagataatgacttgagaaaagtaaagggaaaagatgcgtatagcgtattaggcttttcgcgttgtaataatatcattggccaagttcttcttccgacagaccaaatatctgataatagcattaaggcaaaattagctctgtacagtgaaaaccgtgagatactggataaaatcagggacgagtatcaggtgcatttgtcaaaatcggatttagagcatgacttagatgaaatattacatgataggctggtaaagcatttgggagatgaacctgttgagtatttgcaggatgcaaaacaccaccatatggtggaactaatagaaaggctctccgatgcagattgccggataatttacggtcattataattttgcgtgcttaaaggaggtagctgaatga

SEQ ID NO: 72711 - DNA, 1503 bp, Clostridium sp. MSTE9
atgaaattatctccgatacaggaagaaattataggcatttctggaaatttaattgttcgggcaagcgcaggaacaggcaaaacacatacaatggttaataagattgcgaaagatattgaagataatcacactcataaagtagttgcagccattacttttacgattaaagccgcgcaagaaataaaagatcgtctatctgttgatattattcaacattttatcggaacaaataacagctttgctattgaagaaatcattaaacctttcatgaaagatgtatatggttctgacttcgataaagatatgagcacggattatgcaattaaggttgaaacttttcaagatggtatagataaaatcaatgtcgatggcgttctctgttcgtatcacgataataagagaaattttattttcgatttggctcaagaaattgttgagaaatcttctgcttgtaaactctatttacaagcaaaatattttaagatttatattgatgaataccaagactgcgataaatccatgcacaaattctttatgtatttatgtgatgaattaagcacagatacctttgttgtgggtgacgaaaaacaatcaatttatatatggcgcggtgcttatccagaagcatttaagagtatttgggacaagccgaattttgaaaaaagatttatgggtgacaattttcgttcttgccagcaaattcagaattactcaaatttattatgtgaagagacccgtaccctctataacccactggataatctggataatataatttggcttactccaacgggaacagattgggcttcgcaagtaatatcacaaatggatgcagataaaaaatcagcattattgcggtttagtaatgataatgcaagattaggggcggatgggctgaccacagcagggatagaacatatttatattccacaaacaccaatagctgatattactacggatactgcatggctatattctgctgttgccaaatatatgataattgataagtattccgcttatgacgttattgcagaaatacccgttgaaggaaatgaaagccggaaaactgtatccacaataagaaaacttctcaacgacatagagttatccatagacgatgagcattctttttacaccgccatcaatgaattggctgaatatttaggatatggcacacgggcagatcacttaaagaaattatttcggacaatttctgacacgagttttcatgtagcttttgaacccgaaaaatataaacatatagcaattactttccattcttcaaaaggtttggaatttgaacaagttatcgtatttgcagaggactaccgattatccgatatgccaagtatatataatcattacgtcgcagtaacaagagcaaaaagcaaactaatcattgtcaagctaaataattacaacgcaaattgctttcaaactaatttgacaaagattttttctgaaagtggattaaatcttaatgatattgtttcatatcaataa

SEQ ID NO: 72712 - DNA, 1399 bp, Xanthomonas vasicola pv. vasculorum NCPPB 1326
gtgggtcagtttgaagttgctgttgacactcgggcggacgcttcgagcggcagactggaccgctgagcgcacgaaggcaaacgatctatccgagcagctcggtgaggcggtcaccgaaaacgcgggcgttgcagcgtttggtaaggcactgacgacagggtggggaaagcttcacaaggggaagttcttcgcctcccctagcattgcttttggcacaggcgggctcgctgaggtgttgaagcaagtaagtgttcgcttctcgcccggtcacgaaacgccctcagtggattttgagcgcctcagtgacggtcagcagtcattgctctacatctcgctcgtgttggctgcccatgcggttgatgtcgcggcgctggctgacgaggagtcgccttttgacttagctcggctgaggccggccgctttcaccttgctggcggtggaagagcctgaaaatagtctttcgcctcagtatctaggtcgcgtcatccaatcgctccgagacctcaaagaagagtcaggagggcaagcgattgtggccacgcactcgccagccatcttgcgcagagcgacccctgatttgatccgccatctgcggcttgatgctgatcgaaccacacaagtcagccaaatcgctcttccggatgaggccggagaggcaggaaagttcgttcgccaagcggtcatggcctatccggaggtctacttcgccaagctcgtcgtgttgggtgagggcgacagcgaagacatcgtgctgcatcgaatgcttagcgccatgggagttgaagcagacgcgtccagtgtatgtgtagcaccgcttggcggtcgccatgtcaatcacttctggcgattgctatccagtctgcgcgtcccgtatgtcacgttattggatcttgactacgggcgtttcggaggcggatggggacgcatcaaagtcgcacacggatatctacgtgagtttcctaatggcaactcagtgcgcaccgctgccgaagtcaaagcactgcccggatggaaagcgacttgtggtggggaggatttctttgaagaattgcgcttcttgaagaatgcgggagttttcttctccctccctatcgatttggatttcgtcatgatgcgccaattcccaggcgcttatggcgcaaccgaacacccaatagacgatggcgatgatctggtcactgcggtcttgggcaagagcggaatcgcaagccacatcggtggagaggctcgaagctactttcacgactatcaccgtctgttcaagcttggcagcaagccggctgcgcatcttcaagctctggccgaactgagcgatgaagaattgatagccggtgctcccaatacgctcaaagtcctttgccagcgtgtggttaagatgctggcggaagacgccgaatga

SEQ ID NO: 72713 - DNA, 1644 bp, Xanthomonas vasicola pv. vasculorum NCPPB 1326
atgattacgccagcgcagtggagtccagttgccattaagttgttagagcccggagcgaaggcggcgattacggcatttcatgggaacagcatggtcattgctaatcccggatcagggaagaccgagcttttagctcagcgcgccgactttgtgctcaggactgggacgagtcgttatcccaaaaagatcttggccatttcgttcaaaaccgacgccgcccacactcttcgtaggcgcgttagggaccgatcgggctttgaccacgcccaccgcctcaatagcatgaccttcgacgcctttgcgcgtcggatcatcgcaatctaccgcccgcttctaaaaccaaaggaccggctggaccatgggttcaaagtcggcgtgaaccgcgtcgataccatccaagtagcgttcaaggagttggtgccgcttgcgcaacaactcatcgagcagcatccgatgatcaagcgatccatcaacatggcttacagccacgtgttcttggacgagttccaagactgcacaagcgcgcaatacaagctgatccacacgttgttcaaagatacgcccacctccatcacggctgtgggagatgcgaagcaaaagatcatgggctgggcgggggcgcttgatggggtgatgggcaagttcgctgatgagttcccagcagtcgtcctgagactcgttcagaactggcgatcagcgccagccattcgtcgcgtgcaaaaccgaatgatcagccagatggagccggaatcggctgtggcggagagcgatattgttggtgaagaaggtaaggtctatctggctcgcttcgctaacgagcaggccgaggccacgcgtattgcagaaaaaattgaggagtggatcgccgaaggcattgcaccgcacgaaatcgccatccttcacattcgccaaagcgctatgttcaatcaagccatcgactgtgagttggatcgcctcaacattccgcgtcgcaatgagcaagagttgcaagacttggtgtcggaacccgtcacggagttcgtggtcaacatcttgcgcgtcctaggacataagccagcgccaagtgcatatacatcgttgctatacgtcttaaccgcacaagacgatggcgagcaaggcgactgggtcaggctgttgagtgccgctcgcgatcgtgtggctcagggcccggctcatgatcgcgccgagattgcctttaagcagctgcaagaagtcatggcattgattccgatcgcgacgctactgtcgctatctgccgaatacgatgccgcgcgcattgccgaaatcttgggccaggtctatgaggtccttggcaggttcatcggccagcatcacgatctggaccaagccctggcgagatttttggatgaaggatcagtccgggtcatgacgatccacaagtgcaaaggcatggagtttgagtgcgttgttttaccgtgcacggagcaggagacttggtggggtgatcgagacgagaaccgaaatgcctacttcgtcggtgtgagtcgtgccaagcagaacctggtcgtgacctatgcagacaggaggagcaagccgactcaggcttcgtctcgctgggaaaccacacgccgtccgcaggaagaatttattggctatgtgcaagctggggcgcttccgctataa

SEQ ID NO: 72714 - DNA, 1371 bp, Xanthomonas vasicola pv. vasculorum NCPPB 1381
ctcgggcggacgcttcgagcggcagactggaccgctgagcgcacgaaggcaaacgatctatccgagcagctcggtgaggcggtcaccgaaaacgcgggcgttgcagcgtttggtaaggcactgacgacagggtggggaaagcttcacaaggggaagttcttcgcctcccctagcattgcttttggcacaggcgggctcgctgaggtgttgaagcaagtaagtgttcgcttctcgcccggtcacgaaacgccctcagtggattttgagcgcctcagtgacggtcagcagtcattgctctacatctcgctcgtgttggctgcccatgcggttgatgtcgcggcgctggctgacgaggagtcgccttttgacttagctcggctgaggccggccgctttcaccttgctggcggtggaagagcctgaaaatagtctttcgcctcagtatctaggtcgcgtcatccaatcgctccgagacctcaaagaagagtcaggagggcaagcgattgtggccacgcactcgccagccatcttgcgcagagcgacccctgatttgatccgccatctgcggcttgatgctgatcgaaccacacaagtcagccaaatcgctcttccggatgaggccggagaggcaggaaagttcgttcgccaagcggtcatggcctatccggaggtctacttcgccaagctcgtcgtgttgggtgagggcgacagcgaagacatcgtgctgcatcgaatgcttagcgccatgggagttgaagcagacgcgtccagtgtatgtgtagcaccgcttggcggtcgccatgtcaatcacttctggcgattgctatccagtctgcgcgtcccgtatgtcacgttattggatcttgactacgggcgtttcggaggcggatggggacgcatcaaagtcgcacacggatatctacgtgagtttcctaatggcaactcagtgcgcaccgctgccgaagtcaaagcactgcccggatggaaagcgacttgtggtggggaggatttctttgaagaattgcgcttcttgaagaatgcgggagttttcttctccctccctatcgatttggatttcgtcatgatgcgccaattcccaggcgcttatggcgcaaccgaacacccaatagacgatggcgatgatctggtcactgcggtcttgggcaagagcggaatcgcaagccacatcggtggagaggctcgaagctactttcacgactatcaccgtctgttcaagcttggcagcaagccggctgcgcatcttcaagctctggccgaactgagcgatgaagaattgatagccggtgctcccaatacgctcaaagtcctttgccagcgtgtggttaagatgctggcggaagacgccgaatga

SEQ ID NO: 72715 - DNA, 1644 bp, Xanthomonas vasicola pv. vasculorum NCPPB 1381; identical to SEQ ID NO: 72713

SEQ ID NO: 72716 - DNA, 1881 bp, Xanthomonas vasicola pv. vasculorum NCPPB 206
gtgcatcttgtgcgtgttcgcgtccggaacttcagaggcatcgcctacggtgaggtccatctcaatggacacactgcttttattggtgacaacaacgccggcaagtccacattgctggaagcggtggatctggtacttggcccggagcgcctgagtcgccgtcctgtaattgatgagcacgatttctatgcaggtacgtatgtagaaccggacaagaacgaggtcgtcccgatccagatcgaggttgttgtcgctggactctccgatgagcagctgcggcatttccgcgaccatatcgagtggtgggattcacaggccaagacattgcttgtaggggctcccccagagggaacagacgcgccccatgttggcgcagcaatacgcgtctttttcaacggctggtatgacgtagaagaggacgacttcgctggggataccttttacgccactcccgaaatgccggatggctcctacctgcggttctctgcgcccgacaaacgaaagtgcggttttctttatcttcgcaccctacgtaccggcgcccgcgcactcagcctagagcgaggctctttgttggacgtaatccttcggctgaaggagacacgactgacaatgtgggaagacttgctcgaccaactgagggcattgccagttggagagaccgaggatatcggcgagttacttgtcgcagtccaagatgcagtacggcactacgtaccatccgactgggcagagcaaccccacatgcgggtttcggacctcacccgcgacatgctccgtcgaaccctgactgtcttcatgggcactggcgcgaaaaggccggacggctccatctattccgccccatatcagcaccaaggcactggcacgattaacacgctggtattggctctgctgtctatcatcgccgaactcaagcaaagcgtgatcttcgcgatggaagagccagagatcgcgcttccgccacacacccagaaacgaattatcaattcgctacgccagaagtcggcacaggccatcttcacttcccactcaccctacgtgctggaggagttcgatcctgtccaggtggtggttctcaagcgcatggccggtgttatgaccggagttcctgcaacatacccgccagcagtcaagcccaaggcttatcgcacagagtttaaagctcggttctgcgaagctctacttgcccgctacgtacttgtgcttgagggccgtacggagttcgacgcattgcctgccgccgcccgccggcttgccgagctggatcccacgcgtttcaaatctctcgaaaaccttggagtggctatcgtcgatgctcgcggcgagaccaatgtcgctcctctgggtgcatttttccggtctctcgggaagatcgtgttcgcggtgttcgacaagcaatcacatgaggcgctcgcaaccatcactgcctcggtcgatcatgcctatgagtccgcgactaagggcttcgaaaaccttgtgttgtatggcgtgtctgaggtcgcactccgcagctatgctgctgttgtagttgctggcggcgattggccgcagcatctcgcggcatggacgccaacgcccgcaacgccgctggccgatctgcaggcggctctgtcgagctatttcagctgggccaagggtggtggcgacgccggcgacttgctcgcctcctgcccaaccgccagtgacatgcctgaatacgtgagaaccacgctggcagcgatcaagaacgtcattgagccatctccgctgcctccgctgcctccactacctccccagctagccggcgtgccccctctcccagaggcggcagccgagtcgccgccattggcacccgcctatgggaagttccaaccgtccccgccccagcctctggcatga

SEQ ID NO: 72717 - DNA, 1713 bp, Xanthomonas vasicola pv. vasculorum NCPPB 206
atgacgaaagtgtggagcgatcagaagcgcgactttctggagtgcgccaggcacgccctggcgctaggtggccctggtgccggcaaaacacacgtcgcgctggtcaaagctcgcaatgagattcgctcaggaatactcaagccaggccagaaggtcctcttcttgagcttcgccagaccgaccgtagcgcgcatcatcgaaaaggcttctgagctgatctctcgcgaggatctgaagcaactagaggtcagcacgtaccacggtttcgcatggagcattctccgaagccatgcctatctattgaatggcagaccgaacctgcagcttctgccaccgcccgaagcagcagcgcatttggcagatatcgataaggcccagcacgaaaatgagaagcgacgccttttcgaacaggagggccgcctgcatttcgacttgttcgcaagcttggccagcgaactgctgagccgcagtgatcggttaagcgccatcttctccgacacctatcccatcatcatcctcgacgagttccaggatacaaacagtgatgaatgggcgctgatccagcagcttggaaagcgcagtcgcctcattgcactggccgaccccgaacagcggatctatgagtttcgaggtgctgatcccaggcgggtgggagactttctggagaacttcggcgccgcccatttcgatttcgcgggtgaaaattatcgcagcagcggtaccgatatcacggcctatgggaatgacctgctcactggcgcaaacaagggcaagacctaccagcaggtcaaaatcacgcgttacgacttcatgtatggcaaaagcctgcacttcaccgccaaggccgcggtgttctcggcgttggatcgcctcaaaaaagtacctgacaaatcgatcgcgatcctggtgccatccaggcggctgatgctcgagttttctgactacctttcttctgcagctgatggtctgccagcattaaatcacgacgtcgcaatggatgctgaaccgccggctctagccgctggcgttatcgccacgttactggcgggaggtacagctggcgatgtggcgagccgcatgctcggcgcacttcactcgcacattcgcgggcggcgcgggggcaggtctaccccacagaccgagcttgacctggcgggtgcgcttagcgggttcctctcctcgggaaagatccgcggctccaagcgcctgttgattgtcagcgaagttcagcgcatctcagaattgcggtggcaactgcaattaacgggcgaccctgcggaagactggttacacctgcgcggcctgttggcatcgtccactgcggaagccttgaagcaagtagcaacagatgctcgctacctacgactgctgcaccgaggctcagtattgcgaaccaatttgggtgcgttgtggcgcacccagggagagtacatgggggctgaagaggcagtccgaagtgccttgatgcaggagcattttgctgcagctcagaaggactggcgtggcatccatctgatgacgatacataagtctaaagggaaggagttcgatgaggtcatcatctacgacggcctttaccagcgcatttccaaagccccgcaggatccaaaaatctgcgcccaggatcttttagtactgcgggtgggcgtgactcgggcgatacgtcggaccaccattgtgactccgaagcgcgatccctgccctttactgtga

SEQ ID NO: 72718 - DNA, 818 bp, Xanthomonas vasicola pv. vasculorum NCPPB 890
tccgccatctgcggcttgatgctgatcgaaccacacaagtcagccaaatcgctcttccggatgaggccggagaggcaggaaagttcgttcgccaagcggtcatggcctatccggaggtctacttcgccaagctcgtcgtgttgggtgagggcgacagcgaagacatcgtgctgcatcgaatgcttagcgccatgggagttgaagcagacgcgtccagtgtatgtgtagcaccgcttggcggtcgccatgtcaatcacttctggcgattgctatccagtctgcgcgtcccgtatgtcacgttattggatcttgactacgggcgtttcggaggcggatggggacgcatcaaagtcgcacacggatatctacgtgagtttcctaatggcaactcagtgcgcaccgctgccgaagtcaaagcactgcccggatggaaagcgacttgtggtggggaggatttctttgaagaattgcgcttcttgaagaatgcgggagttttcttctccctccctatcgatttggatttcgtcatgatgcgccaattcccaggcgcttatggcgcaaccgaacacccaatagacgatggcgatgatctggtcactgcggtcttgggcaagagcggaatcgcaagccacatcggtggagaggctcgaagctactttcacgactatcaccgtctgttcaagcttggcagcaagccggctgcgcatcttcaagctctggccgaactgagcgatgaagaattgatagccggtgctcccaatacgctcaaagtcctttgccagcgtgtggttaagatgctggcggaagacgccgaatga

SEQ ID NO: 72719 - DNA, 1644 bp, Xanthomonas vasicola pv. vasculorum NCPPB 890; identical to SEQ ID NO: 72713

SEQ ID NO: 72720 - DNA, 2403 bp, Xanthomonas vasicola pv. vasculorum NCPPB 895
gtgaaactacaggcttatcggctacacaattatcgccggttgcgtgacgttgtcatcgagctcgatgatgagatctctatctttgtcggtgccaacaacagcgggaagacgtctgctgtccaggggctgtactcaatgctgcgcggcgatgcgaggaaatttgaactctttgatttcagcgcggcgctctgggctgaaatcgacgcgatcggaatgtcggctccaggagatgaggaagcgcccaagaggttgccatgcattctcttggatctatggttccgcgtcggtgaagatgatctcgccactgcgatgtcgctgcttccgagcactgattgggacggcaagtgcgtcggaatccgtgtggcgttcgagcctcgcgacccccgcgagctcgtccggcggttccatgagctgcatcagaaggccaacaacgtggcgatcgagatggcggccaagcgtaaggtggccagtgcctctgtcgccgaggcgggagcaggtcatgaggttgaggcagccgaggccagcgagtacaagccttggccagaaagcctgacgaagtacctcacaaaagaactgagcaaggaatacaccttccgttactacgtgctcgatgagcggtccttcatcagctatcgggcctcagaggccgattacgagccactgcccttgagcaaggagcctggcggcgcggccattctaaagtcgctggtcaaggtggacttcctgcgcgcgcagcggcaccttgatgacccggatactggcagttctgaccgcgccgaaagcctttcgcggcgtctcagccgtttctatcaccgtaacttggagaagcgtggcgacgaccatgctgctctcaaagcactcgatacctcggagaagaaactcaacttccacctggaggaagttttcggtgacaccctcaagcgcctagccaagctaggctatccaggcgtaaataatcccgaaattgtgattcgggccgcgttggacccgaccactgtcctggggcaggacgccaaggttcactatatggttccaggcgcggcttccgcccaactgcccgacagctacaacggcctggggttcaagaacctggtctacatggtggttgaactcctcgatctgcacgagcagtggaaagccgaagaagacaaacgggctccgctgcacttgctctttattgaagagcctgaagcccacctgcacgcgcagattcagcaggtcttcatcaggaatattttgcgtctgcttgaggatgccaacgaccacgcgacgtttttccatacgcaactcgtcattaccactcattccccgcacatcctctacgaacgcgggttctcgtccatccggtacttccgtcgcgtcagcgaccagctggaccatcaaaccgatgtacgaaatctgtccctcttcaagacgagcgaggccgacgccccagcacgccagttcctgcagcggtatttgaagcttactcactgcgacctgttcttttccgacgcggtcatcttggtggaaggcaacgtcgagcgcttgcttttgcctgccatgatcgagtcggctgccaagcgccttcgctcctccgccctgaccatccttgaagtcggaggcgcgttcgcgcaccgctttcaggaactcattaactttgttgggctcacgacgctggtcgtcacagaccttgacagtgtgaaagttaagtcggatgacgagaaggccgccgcgcaaaccgctggcgttggcgacaccgtggatgacgacgacttgaaacccttcgaggtcgaagacgacgacgtgacacagccgagcggcaagaagaagtccaagcagcgcgggagcacttgccatgcacacgtggagggtgccgtcacggccaaccagaccctcattagctggattccaaagaaacgctcggtggccgaactctgggaagttacggcggagcagaagacgttgtcgctggctgaaggttccagtgcagcggtccgagtggcctatcagacaaaggtttcggtgacggtggggtcggcgaccgcgcagctctgcggtcgcacgcttgaggaggcctttggccttgagaacgccgactggtgtcaggctgaggcgaaccgggcggtcggcctcaagctgaagtgcgcaccgaacagtcctgaggaactggctgaaaagttgcatgacagggtggtcggcaagaacttcgacaagacacggtttgcgctggaggtcctcgcaagtgggccgctcaatggctggagggttcccacgtacatcgctgaggggttggcctggctcgaggcgaaagtggcccatgagcttgaagcggatgcggccatcgccagcgaggtcgcgacaatcgagcctactgcggccagcactgtctctgtcattgctggcgcggagcagacggcatga

SEQ ID NO: 72721 - DNA, 1509 bp, Xanthomonas vasicola pv. vasculorum NCPPB 895
atgatcaggcgagtcgatagcccggataccgatgcggaccgcgagatccacgcgtgcattaccgcaacgcccccgcagcccttcgtggttcgtgccggcgcaggttccggcaagaccacctccctcatcaaggcgctggactgggtggtgtctgagcacggcgccaacatgcgggcaaagaagcagaaggttgcttgtatcacctacacagacctcgccgcgaatgaaatcctgttggacgtcaactccagtccgctggttcatgtctcgacgatccatagcttctactgggccattgccaagacgtttcaggctgacatcaagatctggctgaagagcgacatctacaggcggatctctgagctggaagaagagttcaagaactacagctcgcacgttcggcaaaccacgcgtgacaggaacaaggctgatcaggagcgctatgcccgaaacctggaagctctggatggcgtcaaaacgttcaattacggcgtcggcagtgattacgcgaagggcatcctcggccacgaggacatccttcagcttgcagatttcctactgcagaatcgaccactgtttcgaagggtcgtggcgttgaactacccgttcgtgtttatcgacgagagtcaggacacattcccgaacgtggtcaagtccttcaaggaagtggaagcccagatgcggggtaagttctgtctcggtttttttggcgacccgatgcagtcgatctttatgagaggcgcgggtgagattccgcgcgaagaccattggcaagccatcaccaagccggagaacttccgctgcgccaagcaaatcctagacgtcgccaacgccgtgcgcgcgcagggcgacggcatggagcaagttcgcggactgcacgagagggtcgatggtgagctcaagcccgtggagggctcggcccggatgttcgtcctgccgaacacactgaaccgaaatgagaccctggcaagggtccgagcatggagcgcggcagcggacaacgacgaagggtggactaccccagatcttggggtcaaaatccttgttatcgtgcaccgcatggccgcaagccggcttggctttggcgggatctactcggctctgaacgacaagacgtcggaggccatgaagcaggggatgcaggatggtaccggctggcccgttcggcccttcctcagtttcgcgctgccaatcgtcgcagcgatgaacgccggcaacgagttcgccgcgatgaatctgctccgggagttcagcccgcgcctgacgcctggcgccctgaccggccgccgtgctgcgggtgttttgcgtgagctgcgcacagccgttttaagactcgtcgccatgctggatgaggccggcaccactgttggagacatagccatccatctccgcgactcgggcctattcgatttcgacgagcggtatgagcgagtgcttgagttcgtcggagacatcggtgacatggctcaagaagccgaggccgctgatgcagctcctgcaaagggacgg

SEQ ID NO: 72722 - DNA, 2142 bp, Flavobacterium sp. F52
atgtttatatctaaagtcagtctagttaattttagaaattttgtaaatgcaaatttttactttaagaagggtataaataccattataggtgaaaatggtgcagggaaaaccaacttattcagagcaatcaggttgcttttggaggatacctctcttccatttgcttataaacttactgagggagacttcaacagaacattggaaaatggaaaatggaaaggacattggattattattagtgttgagtttgatgaccttaacaatgaagaagcaattcagtcattatttattcatggactgggaattgcgaaaaaagattacgtaaaaaaagcatcatataatcttttttttcgccccaaagcggatattaggaagaagttatccgaattggaagaaggagatactgcttcaatggagactctattggcagatattacgattcaggataattacgagacgttttttactggaaaaagcactgtggattttacagaccctgatgtttataaagaacttgttggtgattttaataatgttatttttccttctacaatagattcttcattatttggggcaaagattccgcatcaactgtcagttgcaaaagaagtttcctttacttttattcaagcgctgcgtgatgtggtaagtgattttcataataatagaactaatcctctgcttgcgcttttgaaatataaaagcggtgaaataaaagaaaaagattatgagccaataaataaattggttaagagtttaaacgaaagtattgaagctcttcctgacgttcagcatatcagagcggatattaaatctacaattcaagatgctgttgggcttacgtattctccttcttcactatctataagatcaagtgtcccaaaagaaccagataaattgcttcaatcactgaagctattcattggcgaaccaggagaaggacatgaaggaggtatcaatgaattgagcttaggaggtgcaaatcttatatttcttactttaaaactactggagtttaaatatcgaaaatcaaaagattcatttgcaaattttttaataattgaagaacctgaagctcatattcataaccatattcaaaaaacgctatttgataaattggattatgaagatacacagataatatattccactcattccacacaaatatcagaggtaagcaacgtcgagaatattaatattctagtaaaaaaatttaattatgctgaagcttaccagccatcaactggattacagcctgaaaatatagaggaaattcaacgatatctcgatgcagtaagaacaaatctcttatttgcaaaaggagtaattttagtagaaggcgatgcagaagaaatccttattcctgttatgataaagaaagctttcggaataaatttagatgaactgggaatcagtctaattaatattagaagtacaggttttgaaaatgtagcacaactttttcatgatgacaggataaggaggaaatgtgctatcctaacagatttggatgacgcgatatgcgatactagtgaagtagttgcggattctgacgccattaaaaaatataaaaagaaagttgagggttcaaaagtgaaaggtctggcaaggaaggcaaaattagatgcatttcaagccggaaatgactgggttaaggcattttacgcaaaatatacttttgaagttgattttattactgaaggaaatgcatgggaagttaaaaaattaatcgatacagtatacgtggatccaccaactcgggttttagcagagtcagaaattgacaatgcaagtgttgctgtatatgggaaacgcgtacttacgatggcgaaacaggaagggaaaggctggtttgcaattatgcttggaaaacatatttcctataaaactgtagttcctggatatatattagaagcaatattttttgcgaaagagttatactcccgagacatgattgcagatatgataaattatagaataaagatgaatcttgaggataataatctgctcgattttacaggttgtcggtcagaacttttaagatatagagccggcgaaataaatctggaagatttaatttttgattttgatcttgtaattcctaatgatcaggtttttagtttaattgaaaaatttaagtag

SEQ ID NO: 72723 - DNA, 1800 bp, Flavobacterium sp. F52
atgtttatttgggaagaaggtagcttaaatagtgagcaagaaaaggctatcttagaaaaagaaagcgtactactaatagcttgtcccggcagtggtaaaactagaactcttacatttaagattgcttacgaattaggtaaactgaccagtaataaagagtttgttatcgctataacatatacaaatagggcagccgatgaaataaaagaaagggtagagcttttgggtgttaaaacagatcaattatggataggtacaatccattctttttgtatggaatggattttgaagccatatcatttatactcagaaagattaaaaaatggttttaaggtaattaattcttatgattcagaaaagattcttagtgaattatgtgtaccttacagaagggaggatattacacactatgattgcggaattcttgctaaaacagataagttttatttgacctgtccagatagtaataaatatagttcttttaaaaaaattattgcagaatattttaggattctgaaggaaaatcatcagattgattttgaacagatattattttatgcatataaaataattgaatctaaacctgtaatagcggatatcttatataaaatgtttccgtttattctaattgatgaatatcaggacacaaaggaaatacaatatcatataatttctaaaatattaaaggcaggtaaaggaacttcaaaaacattaattgttggtgatcctaatcagtctatttatgattctttaggcgggtatccaatgccgcaagttcaattggagaagttattaggctttaatttgattccactaagccttgataagaactatagatcttcagcatctataattggctattttgattattacaaaacttttgatacaccaattattccagctggcagtgaaaaagattattcaagtgtaattacttttaatagtaaagtttctgttgatggcttaataaaagaaatcacacgattaataattttgaatgttgataaaggcatttcaccaaatgaaatttgtattgcggcaccacaatggatacatatagcaagtattacaagaagactgatggttgagctaccagatttcagtttcgatggacctggaatggcaccattttcacgcgatattgaaaacttttggtttaaagtttctagaatcgctttaacagaaccatcaccttatatgtatgtaaaacgtcttaggtggagtaaagaggtgctgaatgaattagattccgctggggtagatgtttcaaagattactaataaacaatttcttaaaatttgtaattctttggaaataaatgagacagacggattagcttatctaagaattttctttactaagatttgccagcatcttaaagttttattgaccagtttccctgttcttgacgagcattttaattcgttttttgcaagctcggaagcgagaattcaaagattagtgaaagagggtaatccatttattggagaaattgaaaactttagaaaagtttttaagcaacgggagggaattactgtctcaacaattcatggaactaagggagaagagtacgatactgtaattggttttggtttactggatgggtatgttcctcattttaaagatagtaatggaattcataattccagaaaactattgtatgtgttagcttccagggcgagaaaaaatttgcatttgatatctgaggttaatagagatgtgcattggtaccatgctccagatggtaaacttccttgtgatcatttattgttatacgaatacaattattttaaagaataa

SEQ ID NO: 72724 - DNA, 2070 bp, Streptococcus pneumoniae GA52612; identical to SEQ ID NO: 71808

SEQ ID NO: 72725 - DNA, 1818 bp, Streptococcus pneumoniae GA52612; identical to SEQ ID NO: 71809

SEQ ID NO: 72726 - DNA, 1539 bp, Streptococcus mitis SPAR10
ttgctaaaggtagaaacaatagaggcaaatacggttaaaaatgacaagacactttcgcaagcttacaataaaatagtctcaacttatataaaaaataatgatatagctacaattgataaattagttggtgccattaattatcaagtaaaggatatggttgataccaatatcaagaatattcttcagagtgcagtatcaagcattgaatcaactaagaatttaaagatgaatttacatccagatgtaactttagagaaaatttttgcaaatagtattatttatgagtatcaagagggaaataataatatacctgaaagccagtttggtatgggatatacaaacttgatggttattattgcaaagattgttgactacattgaattatacagcaagaaagatattaatggttcagtaaatattctttgtattgaagaaccggagtcgtttatgcatccccagatgcaggagctgtttataaagaatatttcaaaagcaatcgctaccttattaggaaaaaaacagcagctagatacatttcaaattatcattacgactcactcaacacatattttgaacagtaagattcaatcaggaaatacacttaataatattagttatctaggtcaagcaggtgtaaataatatcataaagaacataagtgatgacgcaatagtatctggtagaaatattgataaaaaagcttatgaatatatcaaaaaatatttaagactagaggtatcagatattttctttgctgatgcagttgttttagttgagggagtttctgaagaaacttacctgagatatgagattgataaacacccaatattgaagaagcatcatattaaagtttacagaattgatggagcatacgctcaccagtttattagtttattggacttattagaaattaaaactgttatttttacagatttagatttaaaaagatctgaatctgaaaagaaagttgatataaaagataatgatgatcctgatcctgatgtgattccacaaaacatatcagatttagagagtaaatatgcagctgcaacgagctccttgagtacgaatggtactctgcaatattttataaaaaaagagctaaaagatgaagaagctaaatatggtgagattaataacaagataatcgaaaagcttaataacaatgaagaattgattattgattacaataacatcactatgttctcgcaaggtaaaataaatggatattatgctactagctttgaggaagcagttgttttaacgaatgcaggaaacgaagatgaaaataaatacaagaaatccttgattaaagcactacaatatgtccatcctaatatgaggtgttttggtgatattgatgaaacatcagaaatagccgataaatcttatatgtatcaagttaaattatctgatggaaaatcaaggttttctactgggattgtatatttatctgtaactgatgacgacttcagccttaaacaacctcagtatattgaatcaggtttgaactcactttgtagttattttaaggagtaa

SEQ ID NO: 72727 - DNA, 750 bp, Streptococcus mitis SPAR10
atgacatatacgattagtccagaaaataaacaactagagttagacattcagaaagatattaatgaatgtttagataactttgagagcttttgttttgatgccggtgctggagcagggaaaacctatgcattacaaaagtcaattgaacatattttgaagacggagggagaaaatttaaaattacgaaatcaaaaaatcttatgtatcacttacactaatgccgcaaaagatgagattcttagtcggcttggtaaaaattcttcagtagtagtttctacaattcatgaatttctatggggatttatttctattcagcaagaattattgactagagaacataagaataaaattatagacgaactccatttaattcaacaaaagatagatgatagccctctttctagtagtttagatcagagtgaattccaaaaaaatatctgtgatgaagggttcctaaaaatcttttataatacacctagtagcccagcaaaagatttcaaagagaagattataagttatagtaaatactttgaacagtatttaagtagtgttgaaaaatttagtagtttagtcaagaatgttaacaaaaagtgtaaatttgagataacattaaaggaaattgaagaaaaaaatcacaaaagattatttataacccagttcaaaaccgagataagcttgaaagttatgtcattagccatgatacgttattacgatattgtaaaaatatcattactggtcagaatatattaa

SEQ ID NO: 72728 - DNA, 2070 bp, Streptococcus pneumoniae GA60132; identical to SEQ ID NO: 71978

SEQ ID NO: 72729 - DNA, 1818 bp, Streptococcus pneumoniae GA60132; identical to SEQ ID NO: 71979

SEQ ID NO: 72730 - DNA, 2013 bp, Streptomyces auratus AGR0001
gtgagcgtcaacttcgaacaagacgtcactgtatgcgtaggtagaaacaatacgggcaaaacatccctcgccgaggtactcagtaaatttctacgctcgggcgagatttccctgcgggtcgaggatttttcggcagattcatatgttgaattcgccaacgcctaccgcaaattttccagcggagacgaagctgcagcgcgggagatccttccggaaatttctgtgaaggtattcctcgcctacgacagcgagaactacgagtacgggaacctcggtcccatcatagtcgatcttgacccagattgcgcacaagccatcgtcgcaattcgctatgctctcaagcccggcgctatgagggagttctttcgcgacgctcccgcgaccataacggaagaatggggggagtcgctgctactatcgctgatcggcccgcgaattcctcacctttacgaacggaccgcaattgcgatcgaccctacagacgcaggtaactttcgccacatttccatgaacgaagtaacgagggcaatcaaggttgactttgttaaggcacagcgaggtctggacgacgaaaaagaacgacctaaagatcaaatcggcaaaatcttggagtcgctcttcatggttgccgccaaagcagacgacggatctatcctcaaagacttcgcgaatagtgcagaaaccgcacttgaagacatcgtcgccaaactgaatgaccatttgcaaaacatgtacagcaagatggcgcctaccatctcggatttcggttacccaggcctgggtaacaggaatttttcaacccgaaccactctggattctaagcggcttctatcgaactttaccagcattaaatatccaggatcgactggcgttgagcttcctgagtcctacagcgggctagggtcacggaacctcttgatgatccttttgaccctattcagctactaccgggagcactccgctcaggcaaatagatcttgcgtgcatttggttttcattgaggagcctgaggcgcatctgcatccccagatgcaagagatgttcatccatcagcttggggtctttaagaaaaaattccctatcgttgatggtgaggacggaagctggaacgcacagttcctcgtaactactcactctgcacacatcgccaacagagccggcttctcagcaatcaggtacttccgcttgtgcgagggttacagagaagcaaccagctcctcggtactcaaccttgccgaagctccggggatcgacaaggaatttttgcataaatatttgaccctaactcgggccgatcttttctttgccgacaaggcaattctcatcgaaggcacaaccgaacgcatttttattcccgccgcgatagccgaattggacgagaatcagcgcaacaggaagggcagtagcctttcgagacagtatgtcagcatcatggaagtgggcggcgcatacgctcacattttctacccgttcattgattttctcgggttgcaaacgctcgtgattaccgacatggactcagcgcgccccggctcctccaagcagctagaagcttgctgtgttcaggagggcacagcgaccaccaatgaaggaatcaagaagtggttcgcagaaaatgatatgtctccctcagacctgctaaagcaggcagcagatgatcttccagtctccggtatgcggggtctggcgtatcagattcccgagagtttagaggggccatgtgggcgaacatttgaagacgcgttcatcctggcaaatccgacacttttcggactgagcagcgagcacggcgaagacttcctagaggccgaactaaaggctagagagctggccaagaaatataaaaagagtgatttcgctctggagttcgccatcgagcaacagaattggaaaatcccgcgctacatcaagcgcggcctcgattggctcctcgcacagatgccgcctggggaaatcgatgaggaatctcagggtgacgacgaatcgccaggggggcaggtggcagtgcgatga

SEQ ID NO: 72731 - DNA, 1779 bp, Streptomyces auratus AGR0001
atgactcaggatggcgctgacgtgaccaccgcagagcaggagagcaaggagactctgcggagaatccttgcggcactagatggccggtgcaatttcaagttggaagccggggcgggggcaggcaagacgtactcgctcatcgatacgcttcattacgttatgcggaatcggcaaaaataccttcccggcgatggccagcgagtggcatgcattacctacacgaacgtcgctcgcaatgagattatccggcgcaccgatggcagcccatacatctttgctgccacaatccacgggtttttgtgggaggcgatctctcgcttcaggaagcctattctccaagagattgtggctatgcctagctggagcagcctattggaggggcggacttccctgcatggatgcgatgtttcttacgacctcggatttcgtggaatcgaagagaataccatccatcttcatcacgacgacgtccccgcactcgctatcagactcttcgccaatcaaaaattcagatacctcgtcgctgataggtttccaattatccttgtcgacgaatatcaggatactccgtcaggtctggcagaagctatgttggggaaccgttcggctacatctaccgagtcgacctatggcttctttggggatcactggcaacagatctatgacaggacctgcggatcaattgatcaccttccagttgaggggattccgaaacgcgccaactggcgatccagccgggccgtcatcaatcttcttaataacatgcgcccagaattgcctcaagctcctgtcgctgatgccaagtgcggatcggtaaccgtgtaccacacaaacaattggacgggccctaggggagtacgttcaaagaaggggcagatcccggaccacgtccttaagcaaacattggcatgggttacggaggattcttgccgccggcacgggcgcgggagtgggagttccgttcaggctaaggttcttatgctgacacattcctcgatcgctaatgaattgggttttggaggtattgataaagccttcaagcgcaacgaggattacgtgcgcaagaacgacgatgttgtggcgttcctgctggatatccttgagcctacctgcgcttattttgcagataaaaagtacggccctatgttcgatctcctcaagcgatcacggccgcgcatgaggaagcggagcgataagagcggttgggtggagctattcgatgagatcaatgcggcacgcaacaaggggtccgtcggggatgtcatcgatatcgtactcaaccagaaatattttgcgcttcctcggtcgattgtgagccgtcaacgtaattgggagcttgcccacaaggatttggttgatgcgcaagacatctctgaacctcgacgactcgtggagtacggaaagttcagaaatgttagttatcgtgaggtcgtagcgttacaccggtacgtagaagaaaatacgccgttctccacccagcatggtgtgaaaggagcggaatatcctagcgttctagcagtttttggaggctggaatttgtacaactttccggatatgctggcaaatttcccacggagggacgctctcagtgatgaggaccgaaagcgcttcgtaaggtcgcgcaacctcttctatgtcgcatgctcgcgcgcccaacatgatttcgcccttctgttcacaacggagctttccaggggtgctctgcagacccttaaggaatggattggggagtctaatattgtcgatgtacagtactcgccggaaggcgctcccatataa

SEQ ID NO: 72732 - DNA, 2325 bp, Rhizobium sp. CF142
atgcacatcgaattcgttgagatcggcaatttccgaaagcttttgggcgttaggatagtcttgtccaaagaaaaaacagtgtttgtgggagccaataatagcggcaagacgtccgcaatggttgctctccggcactttctggtagagcgtgagcgcaacaagttttccttaaatgatttcacactgtctcattggccgatcattgatgccatgggccaatcttgggaggactcaaaggcagccgatcaggagcttgccttgcccgattggactccaatccttccgttcgttgacctgtggctgtcagttacaaaggctgaagcacattacgtgcaaaaactcattccgacactcgattgggatggaggtctcctgggcgttcgcttgagattcgaaccgcgagattcgcttcagttacaaaaggattatctcgcagcacgcgatgacgccaaaactattcaggcggttgacactccaccagctacgaccgatagctccgcaaaagccatcatgctttggccaaaatctttgacggagtatttgcaacgtcgtctctccaagcagttcactgttcgagcttatattctcgaccctgcgaagatagctgatccaaagttcggcgttgcccagccacaaattgtgcccgttacagcagagcccgttgatggcgaacccttcaagggtcttattcgcattgatgaaatcagtgcacagaggggttttgggcagtccgaaggctccaaagacccagacgacgacaatgctgctactggcgcatccggaacaagacggatgtctgaccagcttcgtcgttactggaatcgtcatcttgatccctacgagaaccctgacgcgcaagatttgcaggcgcttaaagcaattgaaacagctcagaaggctttcgatgatcgcttgcgagagggctttgccccagctctagaggaagtgcagggactcggttatccaggtgtaacggacccgcgtctaaacatctctacacggttgaagccagttgacggactcaatcatgaggcagcggtccaatatatgattcaaatggtcgacggcgaacacgcttttgatcttaatttgcccgaggactcaaatggccttggataccaaaatttgatttctatggtatttcgcctgatgagcttccgggacgcttggatgcgcgtaggaaaggcaaattcgagctcagatcttgagacggatatgctcgtccctccgctccatctagttttaatcgaagagccggaggcgcatcttcatacgcaagtgcagcaagtttttattagacaagcctacaaaattcttcgcaagcataaggagcttgggtcgaaatcaaccctttcaacgcagatggttgtcagtacgcattctagtcatgttgcacatgagtgtgacttcgacgccttgcggtatttccggcgcctcccatcagaaatgaaaagcgtgccgacctcatgcgttgtcaatcttggtacagtttttggaacagacattgagactaagcgctttgtcacccggtacttgaacgtcactcattgcgatcttttcttcgcggatgccgccgtgcttgtggaaggcccagcggagcgagttctagtcccgtactttgtcagcacccaacccgaacttgcggatcttgccgagtgctatgttacgtggctagaaattggcgggagccacgcgcaccgtttacggtcattaattgaacatttgggacttacaaccctggttgtgacggacctcgatgcaatgacggatgcacgaatttctgttcctccgaaaaggggagcgaaacaaaaatcccgaaacgcaaccctcagcggctggtggcccgcgagtgatgacctcgacacgcttcttgatgtaaagccagaagccaaaattaagaattacaaagatgaacgctttggcatgagggttgcctaccaaagccccgtccaggttcagtttaaaggtgtcgcgtcggaagccgttgccaatacgcttgaagacgcattggtattccaaaaccttgattatttcgccacgactacagggaagggtttgtttgcaaggttcaaagcgtctatcgcggcgagcgggtcgattggtgaacttggccagaaactctttgatgatctaaaaagtggaggaaaggcggaattcgctctcgacctccttgaaattgaagatcccaaagcgcttcaggcgccgcattacatcaaagagggacttctctggttgtctacgcaattgcgcaaacagcagcaggagttgggtgtcgctacctccgctctaactcccgagccgcagaacgcgaaagccgcagcatga

SEQ ID NO: 72733 - DNA, 1890 bp, Rhizobium sp. CF142
atgatagtcgaagcgattcctgcctctaacgtaggcattgatgaccacgttgacgatgaactcgccacgtacttgaatccagaaaatcctcgcaatttctttttgttcgcgggcgccggatcaggcaagaccagatcgctcgttaaagcgcttggccatattcgcagaaatcacgggcgatatcttgcctttcgcggtcagcgtgtaggagtaatcacctatacaaatgctgcctgcgatgaaattaaacgtcgctctgattttagtagcctattttatgtgtcaacgattcatagtttcgcttgggagctaatccaagggtttagtagtgatatccgagaatggcttcggatcgatctcgctgcggacatcgccaggctaaaccttgaggaatcgaaagggcgggctggtacaaaggcgtcgatcacgcggcaatcgcagatagtgtcaaagacaaagcggctttctcgattagacgagatatcatcttttgtttacagcccgaccggcgagaatagcgaacccaattccctaaaccattctgaagtcatatcgatctgtgctgcgtttcttaccgcaaagcccctgatgcaatggatattgattggtagatttccattcttgctgatcgatgaaagccaggacacaaacaaatatttgattgacgcttttttcgcaacagccgcggcgcacgaggatagatttggattgggactgatcggcgatgtaatgcaacgcatctatgctgacggcaaagagaaaatagaaaagagcctgccagtttcttggaaaacgcctgagaaaaagctaaatcaccgctgcccgaaacgggttgtcgagctcataaatcaaatacgatctgttgcagacaagcatgcgcaggtgccacgcagcgacgccatcgaaggtcacgtcaggctttatattcgctcagtgggtgccgaaaatcgacaagcagtcgaggatgcgatccgcacggatatggcgatcatcacaagcgacgaaaaatggaatgttcgtaatgactgtaaaattctaacgctcgaacatcacatggctgcgaggagattggggtttgacgccgtacttcaacctctcttagccgtagagagttggagaacagggttgctcgatggaagtcttccagcaactcggttcttcagtcagatagtattacctctcgttgagttcgggcaaaaagacgacaaattcgctgtggcacgtatcgtccgggaaaaatccccattggtttccagagatgcgcttaaagaagctgccgatcccacctttctactgcggaaggcgaacgacgcagtgaaaaatctgttgaaattgtgggatgatgacgagcctacttgcgggaaggtgctcgattgcattgctgagagcaatctatttgagatacctgatgtcttaaagccggtggttgccctccggttgtccaaaactgtttcgaagcccgccgacgacgacgctgatccagtaagcgaaaaagtaacggcgctacaaggctttcttgaagcaccgtttggccagattagtctctataatcagtacgtatccggcctcgcctccttcgacactcaccaaggagtcaaaggtctggaattcgaacgcgtcatggtcattatcgatgactccgaggcacgaggatttatgttcggctacaacaagctcttcggtatcgaaggggcgtccccaaccgatatcaagaatgtaaaagaaggaaaggaaacaggggtagaccgcactcgtcgccttttgtacgtaacctgtagtcgcgcagagaaaagtctatcggtcgttctgtatacagagaatcctcaagccgcaaaaaatcaggcactagcccaaggctggttcaaggaaaacgagattgattacagttag

SEQ ID NO: 72734 - DNA, 1785 bp, Klebsiella pneumoniae subsp. pneumoniae DSM 30104
atgcggatttcccgaatccggttaattaatttcgccaacttctccgatgttgatgttgaaacgggtgagagtattgttattgttggtgaaaacaaggttggcaagagcaattttattcgcggcctgcagctgattcttgacccagggttgtctgagcgtgaccgtcaactgggttttgaacatttttgggatggattgggcgaagacaaactgggggagaccatcgaaatttcagtggatcttactgagttcactgacgatccccgattgatggctcatctgaatgactgtgtcctaaatccggggcctccgatggtggcccgtcttacctaccgctttcagcccaaaaccgcgttaaatcgagctcctgaatcgttaaaagattatgagtatgtgatcttcggtggagctgatcctgacatgcatattggtggtgcctttcgccgtatgttgcccattgatgttcaaggcgcgttgcgtgatgccgagaaggacctttcaagctggcgtaattcacccttaagaccgcttattgaagaactgtccgcatctctggacgacgagactcgtgaggagattcaaacccaagttgatgaggctcagcgggaactggctgatcatgatgaggtggcagcgacagccgaacgaattagcgaaaggttgatagctatcgcaggtgagcaacatgccgttccggtatcgctcggacttgcaccgactcgcgttgatgcgctgctacgtagcctgcgtttgctgcttgatagtggcattcgtggcattggcgatgccagtctggggactgctaatctgatttttcttgccctaaaaagcctcgaacttgatcgtcttgttaatgacggagaacgagaccatacgtttttcgtagtcgaggagccggaagcgcacctacatccgcacgtacagcgcctggtttaccgttatttcctagggactgacggagacaatggtgatgaaggaacaccgttgacaacgatcctgaccacccattccccgcatatcgccagcgtcacaccaatcagatccatcgttttgctgcgccatgatccggagggagggaagacgattgcggtttcaacggcaaacgcaccgtttacgccgcgggacgaagatgatctgcagcgctatatcgatgtcactcgcggcgaaatattcttttcacgtggggtgatcttggtggaaggggatgctgaacgctttcttgtcccagcattcgctgatgctcttaatattcccctagatatgcttgggatcacggtgtgctcgatcggtggaacaaatttcactccgtatgtgaagctcctagggccgcggggactcaatattccacatgtgattctgacagaccgcgatcctgaggaggatggagagccgctggttcgtaagagatttatcaatatcttagacgtgcttgagagcgatgttgatcatgatgatatgactaccgaggaggtgattgcacgtgccggagattttggatgcttcgtcaatgagaccactctggagccagagctgtttaccggtggactgggcgaagccatgaagttggttatcgagcaggaattgtctcctagacgagctactctgaacaggatacaggcgtgggtggatgacacggaccagcttgataatgtccggttgttgaaactgattgagcgaattggcaaagggcggttcgcccaagcgctggcaccctcggtgtcggaggatgtatgcccggattacattcgtgaagcactggagtatatctgcgatgccgtcacgtag

SEQ ID NO: 72735 - DNA, 1842 bp, Klebsiella pneumoniae subsp. pneumoniae DSM 30104
gtgaagcactggagtatatctgcgatgccgtcacgtagtgtcagtgcagcctacttagctcaggctgccgagctggccgggaatccgggccagttatccgcgtatcactcccagggacactgcgtggtgctcgcggggccggggagtggtaagacaaagacgcttgtgctgaagctggcacgaatcctagctgaggatgttcaagctccacgtggtgcggcatgtatcacatatagccaagaatgcgcacgcgagctaacccgtcgtctcgaagcgctggggcttagagaggcaccgaatctctttattggaaccgttcatgggttctgcttgcgccatctgttgatgccctatgggcgactggccgatctgccaatcccatttccgctgtcagtagcgtctcagcgcgagagcgaacggttacttcgacaatctggtgaccgtctctttggcgcaaaccatccctataaggctattgatctcggacggcatcgccgttcggtgttgaatcgcaacagcgttgcctggcgtacagaggaggaactcgctgcatgggccgaggcctacgaagctgcattgcggcagcaagggctaatagactacgacgatatggtgatatttggtcagcgtctgataattgagcatgattgggttctgcccctagtacaggcgaaatttccgatccttgcggtagatgaatatcaagatttgggcgtggcactccatcgtatggtcaaacgtctggctttcgagggaggcgtacgcttatttgcagtgggtgatgcagaccaatctatttacggtttcactggtgccgatggtgcgttactactagaactggcaggcaggagagacgttgaaacagtccgactccagttgaactatagatcaggagcggacatcgtgaatgcatcggagatggtgttgggtgaggttcgtggttatcgcgcaaacgacccaaaccgccagacaaccattgcgttccagctgtgtccggatggcttgggggatcaggctgtctatgctgtcgagcagattattcctgctgcgttggctgctaagccgggccgaacacttggtgatatcgccattctgtacaaggactaccgtgccggcgatgttgtggccgatgcggtgacagctagcggttttgattacattcgtgtggataccgcagcaccttatcgtaaagttgccttgacgagctgggtggaggattgcgcagcatggtgtgctggcggttggcgtatcgggcgccctcaactgcgcggacttatagaccgttatctggcatttcatcgggcaaggctggatgatgcatgcgcccggagtaaggggcaggagttaaccaggctactttgggcacttcgtgccgaccaacattctgcatccgattttgtcgcgtcgttgcgcaacggtctcgttgattccctgctggcaactgaaccaacgctttctgatcaggctgagcaactagatcgcatgactgcagcacttgccgaaggcggtgcgttagcgatgttggatatcacgagcctaggtggtcgtgacggttcacctgagcacctcaatttgctgacacttcactcagccaaaggttgcgaatatgacgtggttatcatggtcggcttagatctggggaatttgccgtggcgtaatgagacgccagagaagctgcgtgaaagccgacgtcttttctatgtggggctgacccgcgcacgggacgaggtgcatatgctgtattccggttttgttgatggtcgctacggccctatgcgtctagggcgttccccatttctggatgaactggaggagcgaatgagaggggcaggtttaaggtag

SEQ ID NO: 72736 - DNA, 1782 bp, Novosphingobium sp. AP12
gtgcgtctggccaagttgagtatccgcaacttccgtaatttccaggcaatcgacgtgcccttggcgggcaatgtcgtcctcctgggcgaaaatcgcgttggcaagagtaacctcctctttgcggtacgcctcgtcctcgacccgacgcttcctgattcggcgcgccagctcaagctctcggatttctgggacggctgcgatttggcggcatcgcccgaaatcgaggtccatctccatttcgccgacttcgacgatgatgccgcgctggtcgcgctgctcaccgatttccgcaccgccgccgatcccgccgtcgcgcggctgagctacgtctatcgcaagaagcccgaggtcgccggcattccccagtcgggcgaggactgcgagttcatcgtctatggcggtggcgacgaatcgcgcgccgtctccagccgggtgcgccgtcgcatcgcgctcgacatgctcgacgccctgcgcgacgccgagggccagctcgcctcgtggcgcaactcgccgcttcgccctttgctcgaggacgctatcgcctcggtcagccgcgccgatctcgacggcgtcgtcgccgacctcgaggcggccaccaagcggctagagaatttcccatcggtaaaggcgctcgagaccgcgctgcgctcgggcatcctcgatctcgccggcaccgcccacgacatcgacgcccggctgcgcttcgcgcccgccgatccgctgcgcctgttccgcgcgatcgcgctctacatcgacaatggccggcgcggcctcgccgaggccagcctgggctccgccaatgtcgcgctggtggcgctcaagctcgccgagtttgcctggcggcgcgccaagaacgagcgcaactattcgctgctgtgcatcgaggagcccgaggcgcaccttcatccccagcttcagcgcgccgtgttcgacaagctcttccaatcccccgatcccgcacaggcgctgatcgtcactagccattcgccgacgctcgccgcggcagcgccgctgcgcgccatcgtccagctgcgcgcggcgggcggcgctacccgggcctactcgctcgcctccctaccggttagccccgacgagctcgatgatatcgagcaatatctgaccgccacacgctccgagttgctgttctcgcgcggcgtcatcttcgtcgaaggcgacgccgaggagacgctgctgccggtcttcgccgacgcgatcgggcataatctcgaccggctcggcatcagcatctgcaatgtcgccggtatccattttgagccctatgtgaagctcgctgcgagcctcgggctgcccttttcggtcattaccgactgggatccgctcgatggcgctaagccgccgctcggcaaggcgcgcaccctcggcatctgggacgcctattgcaccgtcaccggcaccgcgccgctgacgcccgagcagcgcgcgcagtggcaggccgccgattttgccggcttcagcgccggatggcgccaggccggcatcttcctcaacgaccagaccttcgagatcgcggtcgcgaacacgccggggctgcaggcggcattgctcgatattttggaggagcagggctttggcgcgattcgcaaggcgcgcatcgccgcctggcgcgccggcgcgccagtcgatcctgcgcagctccttgccatggtcgccgacatcggcaaggggcggctgagcgccaagctcaagaagaagttggcctggaacctggcgccccccgcctatgtcgccggcgccgtcggctatgtagccgcgcgtgtctaa

SEQ ID NO: 72737 - DNA, 1782 bp, Novosphingobium sp. AP12
gtgtctaaccatctcgcgctggtgcgtgcgctggtcgaccttgccggcaacccggaacaagccgatgccgtacgcgaacgcggacactgcgtcgtgctcgccggcccgggcagcggcaagaccaagacgctgaccaccgccatggcgcgtgcgctggtcgaggatgtcgtggatccgcgcggcgtcgcctgcatcacctacaacaacgaatgcgcgatcgagctcgagaaccggcttgcggcgctcggcgtgctgagcagcgaccgcaacttcatcggcacggtgcacagtttcgcgctgacccaggtcatcatgccctatgcccggtgcttcccgggcctgctgcctgcggattttcgcgtcgccaccaccgcccagcgccgggccgcggtcgaatccgcctatctggcggttttcaacgaccgcttcgatccccatgaccggtggagcttcgccgaggagaaacggcgccgcgacgtcgatcgcagtctgcccgcctggcgcgggatcaatcccgaactggccgatttcatcgaggcctatgaagccgagcttcgccgccgcgggctgatcgatttcgacgacatgccgctgatcgctttcggcatgatcaaggcgcatcgctggatacgcgccgcgctgcaggcgcgcttcccggtcctgttcgtcgacgaatatcaggacctcggccatgcgctccatgaactggtcctgctgctctgcttcgacggcggcatgcgcctgttcgcggtcggcgatggcgaccagtcgatctatggcttcactggcgccaatccgaagcttcttcagagcctcgcggcccgccccgacgttcgagaaattcgtctccgcttcaattaccgctcgggtgcaaggatcatccgggcgtcgctcggcgcactcggcgaggaacgcgactatcgcggcctcgacggcgcacccgaaggcgagctcactttctaccccgtcatgggaggccacgatgcgcaggcggcggcgattgccgagaccgtgcttcccgcgctgcttgcgcgtggccatccccccgagcagatcgcgatcctctaccgcgccgcctggctcggcgacaaaatatcacacgcgctcaatggcaggggcgtcgcgcacgtccgcaccgatggcaatgcgctcatcaagcgcagctcgcgcctcgcccgcttcgttgagggctgcgccggatgggtcaccggcggctggcgcgaggccgacccgccttatggccggctgctcgcccaggcgctcgcgctcgtctatggcggccgcgccagcgacgccgagcaggagacggtctctcgccagctcatcgccttcctacgcagcagcattgatgcgggcgagacgacgcatacctggctgcaacgtctctgccgcgagctggtcgccccatggcgtgtgctggcgcgcaacccccagcaggaatgggagatctgctccgagatggtggtcaagaccgatcccgcgcaggacaaggacatgccgctcaacgtcttctcgggccgtatcgaaggcaccgggccgctcagtctcagcaccctgcacagcgccaaggggcgcgagttcgacgcggtgattctctacgggatgaacgccagcgacatcccgagcaatcgcgacaggaagtccgccggggcgctacgcgaggcgcgccggctcttctatgtcggcgtcacccggccgcgaaaggagctcgccatcgtctatcaggaaggccatcactcgccctgggtcgccgagctctaccagcgcagtcagcaagggtga

SEQ ID NO: 72738 - DNA, 2043 bp, Flavobacterium sp. CF136
atgaaaattaaaactcttgaaataacaaattttagattattaaaacatgtagtcctttctttggaagaccacacaacagttatcgttggaagaaataattcaggtaaaacctcattaactgaaatttttcgtaggcttattggggataaaaacccatcattttcaatttatgattttagcatttctgcaatggatggttttattaaggcattgcattctaaattggaaggtaaggatgatgatataagagaagaaattccttatattgaaattcgaatcaccattgaatatccagttgatcttgaggatctgggaatattaggagattttataatagatcttgaccctgcaagcaatatagtgatcatagctgttaaatactctttaaaaaatggtagaattgattctctttttgagggtgtagctgatatgggggaagagagcataaagagctttatgaagtcacttaaagaaagaattcctagtctttttgaaactcatataacagctgtcgaccccacagatcctgaaaatactgcgctaattgaatattcaaaattcaggtctgtattgggagccagttttataaatgcgcaaagaggacttgatgatgttacgcattctgaaaaagatgtgttaggaaaagtattggcacagctttttaaaacatcccagtcaaatgctgcgcctgatgatatgaaaagcagttcagcagctttgaaggttgttgttgatgatattcaaagcaaggtagatactgattttaatactcaattaaataaacttttacctgctcttggtttgtttggttatccgggactttcagatcctaacttgagtactgaaaccacaatagatatatctaatattttagagagtcatacaaaaattagatatggacaaggaaataatctttttctgccggaaacatataatggattagggtcaagaaatttgatttatattttgttccagctttttgagttttttcgcagatatcaaagcaggcaggtttcgaatagtttggatattatttttatagaagaacccgaagcgcatctgcatccgcaaatgcagcagatttttattcgaaaattgtatgagattgctaatgagttttcaaagactttaaatgatggtaaggcctggcctgttcaatttgttgttacaacacattctacacacatggctaatgaagccgagtttgaagcaattcgatattttttaacttcaaatggggtggcaagagaaactatagtaaaggatttgagaaaagaattcaaggctgctgatctgaaacaagataaagaatttttgcataagtatttgactctaacgaagtgtgacctatattttgctgataaagccatacttattgaaggcccggccgaaagattaatgatgccgttgcttatagcaaaacgagatgagttagatttaactaaagcgcagctcggcttgcaatatgtaacaacaatcgaggtaggcggtgcatatgcacatcatttttacaaatttttagattttcttgaattacaatgtttggttattacggatttagattcggtacttatgacaaaaggagaaaagattacttatccaggttcatttgtaaaaaatggttcgcatacttcaaatgcgggaataaaaaactggtttgccaaagattctgtcgggcattatccgctggcagattgtcttgttcttacagctgacaataaagtttccgggtctagaagaattgcttttcaaattgccgaagatggtaaggtggcaattggtagaagctttgaagaagcatttatattggcgaatagagaacattttggaatttcagaaattgaagaggatgatgtcgaagcaagcgctgaaactcatgctcctgagaataagaaaaaaactgaatttgctttgaaatattcccttgaagaaaccaaatggaatgttccaaaatatatccttgaaggccttgaatggttagcaatcaagcctgtaccggcagttatagatcctgtagaagatgttaaagaaccaacagaatag

SEQ ID NO: 72739 - DNA, 1761 bp, Flavobacterium sp. CF136
atggcggaaaatttagaaataagtcctgcagaaaatgcatcgattgaatgtttagaaaaagtatttaaagctattgatgaaaaaaaacactttcttgttgaagccggtgcaggcgcaggaaaaacttatacattaattaaagctttaaaacatttaatagataaatatgatgctgagtattttaaaacgagcagaaaaattgcttgcattacatatacaaatgtggcaaaagatgaaattcgatcaagaacagataatcatcctattgtattggctgacaccatacatgcttttgcatgggaagcgatacagaattttcaaaaaggacttcgtgatcggatgatagaattgggtgatagatggcaggaaaggattgcggaggccgggggaattagatcacaaaaggtcatatatagtttaggatatccgaaaataacagccgaagaaatatttttacatcacaatgatgttataaaattgtttacatctcttctatatgataataagtttaaaaagatatttacaatcaggtatccgataattctaattgatgaatatcaagacacaaatagaggtttggcggatgcattagtcgctaattttattgaggaaaaatccaatataattttaggtttttttggggatcactggcagaaaatttatggtacggagtcttgcggttttattgagacgactgagggaaagatggaaattattggtaaacaggccaattttcgttctgataaaaatattgtctcagttttaaataagatgagacccgaattagagcagtttgagtacgatcctgaatctgcaggtgaaatagtagtttttcacagtaacaactggaaaggtgagcgaagaactggtgctcattggaatggtgatcttccagaagctgttgcacatgattatttagaatggactaaggaagaattaaataagaaccattgggatattagtaccgaaactacaaaaattctaatgcttaccaataatgtcctggcttctgagcaaggatatcagaatgttgcaaatacattttctgataatgacgattatctaaaaaagaataatgattatatggcatttcttatggatacggtagaaataggctgtgaagcattcctaaataaaaaatatggagaaatgattcaagcttttaatgtgggagcacccaagatccgaaagcatgcagataaaaaagtctggtttgatgacatgactaaacttctcgcactttgccaagtcggaactgttggggaagtattagatttattaaagacaacaaataaaccaaaaataccaaggaaaattgaagagaaagaacagcgttttacacaaattgaagctgttgaggaaaaagatagggaggaagaagataagagttttgcttcgaaaatcaaatcaataagatcaattccatattctgaaattgcaaatgtatcaaactacattgatgacaaaacgttgtattcaacaaagcatggtgtaaaaggtgctgaatttgaaaatgtaattatagttttaggtagagggtggaatcaatataattggaatcaatttttagaatggatggattcagtaaaggttccagctgataagcaggattcatttgaacggaatagaaatctattttatgtagcatgttcaaggccgcaaaagagattatgcctgctttttactcaggagcttaccgaaaatgcatttcaaagtctgaataagctgtttggaaatgttgttaaggaagcatgtacctaa

SEQ ID NO: 72740 - DNA, 1893 bp, Pseudomonas sp. GM16
atgtacttgagacagctagaggttgagggcttcaagagtttcggcaggcgtttcacggttgagtttcatgaagggttgaacgtattggttggggagaatggggcaggtaaaacgggcgtgatcaacgcgttgcgtcagctgttccaggattcggagtccggtaaacgctcggtcaacgagcgcgattttcacaagtcgttcgagcttgacgccgcgccagcctccagtttcgccatcacggcgacgtttggcgacctcagtgtgttcgagaaagtagcactcgactcctggtgtggtgaccaggacgaagcggtactcaatctgaccgtgctcaaccgcgagttgcgcggtcgctacagccaggagctttggggtggcgcaatcaggactggggccttcaatcaacagacgctggagctaattcactgcatctacttgccaccgttgcgtgacgcagagcagaagctgcgggagggccggcagtccagattatcccggctgatgaaggcattgtgcaaagatcagttacaggtgtgtgctaaaaccaaaacattgcatccgcttgaagtaaaagtcgccgacttcaattctcagctggcggctgaacaagacattaaaagggcaaatgacctgatatccagtagtctacgcgccgccttgggagaaaggttgtcgcaaaacactacgatccagttttcggaatccaacttcaccaggatcgtcgaaggcttgcgtttgctgtactttccgaacgcgtcatctgccgagctgtcgcagttccgctcgctggatgaaaacagcttgggctacaacaacttgctgtacatcgcctccatcctcgcggagttgatcgtcgaggatggggaggggccgggggagcgcacactgcataagctgttgttgattgaggagccggaagcgcacctgcatccgcaactgcaaatcaggctgttaaagcacctgcaggaggtggccctcaacaagaatattcaagtagtaatcactacccactccacggtgatttcgtcggccgtctccatcaacaacatcatccatatcaacggcggaggcgaaccactcgccgttcctgcgcgtttttgcggcctagcggaacaaagtcgacgatttatcgaccgctggctggatgtcaccaaatccaacctgcttttctccaagggcgtcatccttgtcgagggcgtggcagaggccattgcgctgccagagctggcgaaaatcgtgcttgctaatcgcggcaaagggttgaacaccctggaggattacggggtgtcagtcatcaacctcaatggcatctatttcgcccatttcatgcagctgttttgtgaggttgatgggcagttgcgcagccgtaatctacctattccctgcgcgggcctcaccgacaaagatccggcgaaaacccataaggtgcgggtacaggaccagttggtcgacgtggccatcaaaccgcacccagggaatttggccgccggaacaaatcctgctctgggcctgattccaaccatagcgacatcccaatacgggcgcttgtttagtggcgaccttaaaacctttgagtatgacttggcgatgacggcaggcaatctgcaactgatgctgcaggtagcgtacgacaactggcccaccgatggccccgtcaaggctgcgttccaggacatgctcgcggccgatttcgtggccttgaccgaggcgcagaaagctgaatatgcctacgagcttctggagcgtattgattctaccaacatggggaaggggctttacgcccagctactggccgacaagctcgaacagggtgactacgtctttgccgtaccgcgctatatccagcaggcaatctgttgggcctgcgctattgctgaggagggatctgaatga

SEQ ID NO: 72741 - DNA, 1758 bp, Pseudomonas sp. GM16
atgacctttccgagcgacgaccaacgtggatatctcggttcctccattgacgacaatatttacttggaagcttgtccagggagcgggaaaaccgaggtgattgctgccaaggtggcacgcgaaatcgagggttggcagggctatccgggtggaatcgcactgctgtcgttcgccaacagcgcggccaacgagctgaagagccggctaattgctcataggcaacgggcaccggtggcctacccgcactgggtgtcgacgattgacagctttatcctcaattgtctcgtggcgcccgtggcccatcggctcaccgggtatgctggtaaaaacggcgacttccggctgaggttggtcgatgccacgtcaacggtttacatcaaaaccaagtacgccatcgaacacatccgcgttcccgccaaccagtacgacttggatctggcaacgggtaagtttgtcttccgaacgggggaacctgggctggaccgcaagctgaacgccgttgtattggcggattggcaattgcgcgacctcagggaggccaagacacgttttaagggggccggttttgccacctatagggatgttgaacacctcgccatccagatcttgcaggaggaaaagctgtccaccttttgcgcacgactggccctgcgctatccatttctggtgatcgacgagtgtcaggatctttcggttgagcagttgaccatcttggagggtttgctggggctgggcgtgaaaatgcacatcgtgggggatctcaaccagtcgatctatggattccgccatgcagatcccgcacgtgtcatgcagttcatccgcgatcatggattcaacggtcttcaattgtgtcagaattttcgcagttctcaggccattgtcgacctctgctccgaactggtgccgggaaacaaaattcacggcaatccaacgattcagccggctgcaccagtgattgtcgaatatgacgattgtccctcggaagcgatgccgctgtttatgagcctcagtgacagctacgcgaaccgggtgatcgtctcgcgcggtcattcgacgctgagtcggttttgctccggtgccaatgacctgaacgataccgagcgtttggcactggcctgcgccttggcaggtaatgattcggcaatcgccatccagaagtcgcttgcgctgtttggagggtggcttgccagcaagttggagtattcggcaaaacccaactccttccactgccctgtggatgtcgagtccgagttggaatggcgcttatttcttcatcaggctttggcatttgtcacaattacaggcgcctcggtcgcaggtcagcactggcgcgggtggtgcaaggtcgccaaagctcgtcttaatgaactgccaaagcaggcctttgtcatcgccgatattgccgtagcaatagcaccactgacagcacttggattgcgctcccccgcgggcctcggtgagcaattggtcactcaaagactctcattggtgacgttgcaagagagcagcatccggttggcaacaattcatgagatcaaaggcgaaacccacgaagcgaccatgcttgtctcagcttccaggcgaggggatcagtcacattgggcagactggattggtgatcggaactcagaagcggcaaggctcgcctatgtggcgagttcaagacccagaaatctcttggtctgggcagtcaagaaattgaaagccgcagagcgaaccacccttcgagggctcgggtttcatgtagctcagcgataa

SEQ ID NO: 72742 - DNA, 2028 bp, Pseudomonas sp. GM18
atgctggaaggcaattccacagttatcgtagggcgcaacaacagcggaaagacatcgttcaccgacatttttgatcgcttcaccggggagaccggcgcgcgatttcggctggaagacttctcggtcgcatcgcgcgagcggttctacaatgcaacgacactgagaaaacagggggcaaaaccagaggatgtactagctgcactcccgacgctctctcttacgctcaccttccgctatgacggcgcgatcccgaatttagggcctctttcacctttcgtcattgacctggacgtagactccactgcagccattgcgcgtgtcgagtaccgaccgaccttggcaacgctccacacgctgctcgacataccttccgcgccagaaggtgtcgaaccaagaacgcatttttttaggtcgttgcgcgacactttgcccaaggcatacagcatccatgtttgtgccattgatcccaccgacgacaccaatcgacgtaattttgagggcaccgccgcaatggcggctctgctgcagtgcaatttcgttcgcgcacaaagaactctcgatcatgcaaagcatggcgatgccgatgtcattggcaaattgctcagcgcgctattcaagactgctgcagcaccaactgctgcggccgcagaccaggaactcgcggcgaagctgaaggcgtccgtcgaagacatagaacgcaatgttcaaggcgacttcgatgagatgttgaagaagctgctgccggccatggaagtgctgggctttccgagcctcaacgataccgagcttcggcctgagacctcattgaacgtggaggccctgctttcggaccacacaaaggtggtctacaccggcacagacggggtacatctgccggagggctacaacggcctcggaactcgcaatctgatctacatgctgttgcagctcgagagctaccataaggcctaccgtgccaaggcgactcgcccggccacccacctaatcttcatcgaagagcctgaggctcatttgcatccgcagatgcaagaagtcttcatcagccaattgaatgctgccatcggaaaattgtcggccagctaccccaaagagtccgcgtggaacgttcagtttgtcatcacgacgcattctccacatgtcgcaaacgctgcatcgtttgaggcggtacggtatttcctcaatgagtcgccaaaccaggcgagcacccgacagactaaggtcaaagatttcaagaagggcatgagcgccatctctcccgaagaccaggacttcctgcaccagtacatgacgttgaccaagtgtgacctgtactttgcagacaaggccattatggtcgagggaacaacggagcggctgctgatgccccgtctgtgtgaattggttgataggtcgctcgacgacaaacacaagctggccagacagtatgtgacatgtgtcgaggtcggaggagcttacgcgcacatcttctatccgctgctcgacttcctcgaactcaagaccttggtcgtcaccgacttggattcaaccaaaccggtggaaaagcaaaacaaaaaaggaaatacgattacgtcgtgggagaagtgcccggtagctgaaggccagcggacgtcgaacgcagccatcaaagaatggttccgccccgaagactccaaagatcgggacggctggcaaatcacgcctgccgaacttattggcaaaaccgccgaagaaaagcagagcggataccgtcgcattgcctatcagattgcggagaagcctggcacgaacatgtgcgctcgaagctatgaagacgcgctcgtcctagcaaacccggatcgatttgaatggccaaaggaagaggacgaggccactgaggcgtgggagatcgcgaaggggctcgcgaaagcggatacagccttgcggtttgccatccgcgagaaggaatgggcggtacctcgctatatccaggaaggccttgcatggctttccgaaccccctcctcaacccgcacagaatctggaagcgccagccaaggaggaggcagcatga

SEQ ID NO: 72743 - DNA, 1734 bp, Pseudomonas sp. GM18
atgactgagcctgccgagaatcccgcacttatcgctgcgcaagaggcccagagaaggatcgatgaggcccttgatgcaggtcgcagctttcgtcttgaagccggcgcaggcgcgggtaaaacgtactccctggtcgctgcgctgaagcgactgattgcagagcgtggcccggcgttggttcaagctgggcaaaaggttgcctgcatcacctacaccgaggttgcccgtaacgagattgcccaggagattgaggatcatccggccattcttgtcgatactatccacggcttctcatgggcgttcctacgccagtttcagaagtcactgcgtgacctcgtgggcgaaatgggcgaccggcacgagaagatcgaggaaggcggaggagtaggctcaaagcctgtggattacgactttggattcttcggtgtcgacacggacagaatcacactgagtcacgacgacattccggagatgatggccaagcttctgggcaaggagaagtttagacgcatcttgagccagcaatttccagtgatcttcatagacgagtatcaagatacccatcgccaattcatggaggcgatcaccgagcatttcttgatgcccaataccggcccgatcgtaggtctttttggggatcattggcagacgatctatcgcagcgagtacgaactcgccgaatatccgatcgaagagattggcaaaggctccaactttcggtcagtgcccgcagtcgtagatgtacttaacaagctgcgcccagatctgccccaggccgttcgcgcccccgaggcaaagggcgaggcgaggttttttcacgccaacgcctataagggtcaacggaccagcgacagccactccaaggaagatctgccagctgacctggcgcggagcactcgggaagccttgatgcaacggctgcaagccgagggctgggatctgagcaagacgaaggtactcatgctcacccacaacgtcttagctgctgagcagggctaccccaacattgccgaagtgttcaggggccgtaccgaacagttcacaaagaaggaagacccggcgatcaagttctttgcagaagtcgttgaacccatgtgcgaggcctacggtgcatctcgatacggcagtatgttcagggcgttcggctccggccccgcgatcacgaagcatgatgacaaggcctgctggcgccgcgacatggacacccttcagaaactgcgtacagaaggaacgatcggacagctcatcgaccacctgaagacaacgagacgcccatcgccaccggagcgcctgctgcggcgtgacgaagagcttatcgcactagatggcgcccctatacccgaagatgcctccgcacttcagcggtacagcaagctgcgggatattcgttacggagaagtcatcgaggtagtcaagttcattgagaagcagaccccctttgccacgcagcatagcgtcaagggtgctgagtttgataacgtccttgtagtgcttggaggtggctggaatcactacaactggccacagctactagaacttattgagacaaatgcgctgaacgcaaagaacacgaagggcttctatcgtgctcgtaatctcttttatgtatccatctcccggcccatgacgcggcttgccgtgctcgccacgcaaaccatgccggatacagctctcgcaacggtgaatcacctttttgggagcgatagcgtcgaggaacttgctatcgtgacgtga

SEQ ID NO: 72744 - DNA, 1893 bp, Pseudomonas sp. GM24; identical to SEQ ID NO: 72740

SEQ ID NO: 72745 - DNA, 1758 bp, Pseudomonas sp. GM24; identical to SEQ ID NO: 72741

SEQ ID NO: 72746 - DNA, 2298 bp, Pseudomonas sp. GM48
atgcgtatccagcacctggagctcgcgaatttccgcaagctcaaatccgtcagaatcgacttggcagccgagaccactctcttggtcggtgccaacaacagcggcaaatcatcagcaatgctggctctgcgcaaattcctggttaagcccacgacgttccggctgcaggatctgaccctttgccatatcgccaagctcgacgcgatcggccaggagtgggaacaggccgatgacggtttcgtaattccggaaaacaacgcttgggcagagtggctgccaacgctggacgtatggatacaagcagcccagggtgaactccaccacatccgcgacctgattccgaatttctcctggtcaggcggcatggtaggcatgcgatttcggctggagcctgatgatcttccaaccctctactccgactatcgaaaagagcgagcacgggtggctacgctcttggaggaaattcagaatcaggctgcggatggccaggtgcgtccagccttgcaattatggccacagaacctgcatgactacctcaaccggcgcttggtcaaggcgttcaaagtgcgttggtaccgcctcgatccggataaactttcaccacctaacgcagaaaccaggactgccaatcttcagccgctgaccgacacagcagtaccgttggagcggaatcctctgctgaacctgatcagagttcacgagatcaatgcgcagcgcggtttcggggacagcgccgatgaggggcaagacgaaagcaaacctggaagcggcaggaagctttctgaacagttgcgcacttactatcgtcgccaccttgatcccggcgatagcccggacgtccgcgacctggaggcccttagggcaattgaggcggctcaaagcgccttcgacagtaggcttacggttagctttgcgccagcactcagagaagtcgctggcctcggctacccgaacaacagcgatccgagcatcaaagtggcaactcgtctcgcgccaacagatgggttagatcatgaggccgctgtactgtttgagttggattctgttgcgggggcgccaggtgaaccacgtctgagcctccctgagacatccaatgggctgggctaccaaaacctcatttccatgattttccggttgatggcgtttcgtgatgactggctgaggaagtctcgcacccctgaggagcgcagtgcggtcaacgttgagccaatccatcttgttctggtcgaagagcccgaggcgcatctgcacgttcaggttcagcaggccttcatcaagcatgcgtaccacgtgctgtgcaacgacccattgcttgaggagttcccgaacctgagaacccagctggttgtcagctcccattcaagccatgtagcgcatgaaatcgagtacgagcacctgcgttattttcggcgactcccatccgggatggcgaatatccccatcccggtttccaccgtctcaaacctcagcaccgtgttcggccaacgtgggaagaccaaggagttcgtcacgcgttacctccgagcgcaccatgcggatcttttcttcgctgacgcggtaatcctggtcgaaggggcggcggagcgaatgatcctcccccatttcctgcgccagcatttcaagtttctcgaccagtgctacatcactatcctcgacatcggaggaagtcatgcccatcgcctgaggccgctaattgacgccctcggtatcgccaccctagtaatcacagacctggacgcgggaaaagccaaggcggcccagcccgttgcccggggagctgatcaaattacgaacaaccctaccgtccgccattggatgcgagtgacgggacttggtcacgatgtggacacattgttagacctccctgccgagcaaaaggtggaggagatcgacgcgctctattcgatcagaatcgcctaccaaacccctgtcagcatccgtcttccaaaatccggagcacaagccgaggctttgcccaatacgtttgaggacagcttggtattgagcaacgtcgagcgttttaccggtaagccacgtcgtgggttgatgcgtgcgttcagcgaggccatccagaccgccgacacggctcaagaattgggagcagcgttgttcgagaagctgcgcacaggcgacaaggcagaatttgcgctggagatcctgggcgatccagaattcggtcaactcgtggtgcccagctacatccacgaaggtctgacctggctgcaatcgaagcttgagctcaaacgcaaagaccttctggtggttccgcccgcaatcgtcgaggtgacagaagaatga

SEQ ID NO: 72747 - DNA, 1875 bp, Pseudomonas sp. GM48
atgagtccggcagcgcctgagcgcgacgaccatgtccgtgatgcagacgacgtgatccgagattgcctggatctggatcgcccccagagtttcttcctgtacgccggcgccgggtcaggaaaaacccattccttggtttccgctgtcagggagctaaaatcgcgcgcgcaaaggagactgaccttcgaagggcgccaggtggcgatcatcacctacaccaacgcagcatgtgaggagattgctcgccgtctggagcatgatcccctggtagtcgtttcaaccatccacgcattttcatggcgaatgatccagggattcaatgacgacatccgcgactggcttcgcaccaggctcgctgaaagtatcgaggatctgaatgacaaactcgcaaaagcccgggatgccaacaacaaaactgctcgcgccaatcgtgcatctcttgagagcaaaacgcgccgactggctgcgttggatgacgttgtaagtttcacctacagtccgaccggcgaaaaccgggggcgtcaagcgctaaatcacgctgaggtcattcagatggcggctgcgtttatccaacgcccgcctttgttagacgtgatggccgatcagtacccagtacttttgatcgatgaaagccaggatacctatggccctcttatggacgcgttcctgaccgctcaatcgctgatcccacaacggttttgccttggtcttttgggcgacaccatgcagcggatttacaatgatgggaaagagcacttggagcaggcaatacccgccgactgggccatccccgaaaagcctgtaaacagaagatgcccaacaagggtagtcgagcttatcaacgtcatccgcagcgccgccgatgatcatcaacagactccaaagcctggtgcgattcgaggggcggtgcgcatgttctgtactcggcaagctgcaggtggcggcttcgaactggagagccagatcgctcaacgcatggcgcaaattacgggcgatgaacagtgggcagcaggatcgtctgagcgcaagacactgatccttgagcacaaaatggccggtaggcgcctcggattcgagggtatcttcaccccgctttacacagttgagcacctgcgcactagcttgctggatggcacgctaccgatactcaagctgttctttgacggtgtcatgccgatcctggaagctgccaacaacagcgagttcgcgctcatggaagctgtacggttgagatcacctctcctcgacagtgaatacatgaaagcggcccctgatcaactggcgctgctccagcaagtaggcgccggttgccgaaccttgtgcgggttggtcgcagacaatgatccctctttggccgatgttgtgttggcgctagcggaaactgggctgctcgaaatacccgatcgactccgagcggccttggcacagggtgtgacagacgaggagccgcccgagacagttgatcgtgaagcacttgaagtgcacgcctatcgggtgctcctgggtcgcccttattcggaaatgaccgcatttgctgggtatgcacaagggctgtcacccttcgatacccaccaaggagtcaaaggcttggagtttccaagggtaatggtgattctcaacgatgaagaggccggagggttcctcttcagctacgaaaaactgttgggggttaaggctccctcggaaagtgatatcaaaaaccagcgcgcaggcaaggatgacgcgctgtctcgaactcgccgtctgctgtacgtgacctgcagtcgggcagaggaaagcctggcgattgtggtttacacagcacaaccggaaaccgccagagagcgggtagtcgacgctggttggctcgcggcagacgaggtggaaatcatatga

SEQ ID NO: 72748 - DNA, 1956 bp, Pseudomonas sp. GM79
ttggtactcaagcagatgcgcgtgtgtggttttcaatcgttcggcgcaaagccggttactatcgatttccgaaaactaaccttcctgattgggcctaacggctccggcaaaactgcaacgttgcaggcgctctgccgccttttttcaatcgaccccaatcaacggcggctgcgaaaatctgatttcttcgtcgcacatgatgaggaggagaggccggacagtgagagaacgttgtggatcgaggcagatttttatttccccgaaattgccgatgagacgaaagaacacccgaccatcccatgcaactttgggcacatgcggctggacaacatccatggcgtaccgcgcgtgcggtaccgtttggacgcctcgctagggttggacgatgagatcgagcaaaccttgcgctatgtctctgaggtcgacgaggatgggaacccagtcgcaacatctccggtaccacgcgatgagcggaaccaaattcaggtgcactacctacctgcgcggcgtgatccggcagagcacatcgcctacggaaccaatgcgcttcttggccggctgttgcgggcggtaaactgggcagagcaacgcgaaaaaatcagccagctttccgcagacatttccgagagcctcagtacgaatcaatcagtcatcaaccttggagacggaatcgctaaggtctggggcaagctgcataaaggcaaatttttcaaagaccccagcctaaccttcgtgacccatgagatcgaggcgctgctaaggcatctctcggtgtctttcacaccaggtcatggtgagcagcaggttgatttctctcgcctcagtgacgggcagaagtcgatgctgtatttgaccttggtactcacttcccaggcaatcggtagggcggtgctgaagggggatgatgactcgttcgacatggacaagctcaagcctgccgtattcacgttgatagcgcttgaagaacctgagaacagtctctctcctcattacctgggtcggatcgtatcgtccttgaaggctctggtgctagctaaggggaactcagatgctcaggcaatgatcgccacgcatgccccatcgatgctgcgtcgcgttgagcctgaacagattcggtatctccggctcgacgattcgcgctgcacggtcgtgactaagatttcgatgcccccaaaggctggtgaggcctacaaatttgtcagagaagcagtacaagcattccccgagatctatttttctaggctggtcgtgctcggcgagggtgatagcgaagagattgtgctgccgcgtttactggccgcagaggggctcatggtagatgaggccgctgtgtgcatcgcgccgcttgggggacgccatgtgaaccatttctggcgccttttgagcaggctcgaaattccatacgtgaccctgttggatctcgatgtagcaaggcacggtggagggtgggggcggatccactatgttgcgacccagctaaattatcaccgtcctaaccagggatacatgcccgacgaccagctcgaaaaactcccaagctggaataatcctaaatataaacttctaaaagttgaaaaagatcgtggcttcaggagctatatcgctgagctggaaccatttgaagttttcttctccagcccaatggacttggatttcgccatgctgcgcgctttcccaaaggccttcgggatcgaggccaaacaccttgtgacaccgaaggtcggccaggtcagatcggtgctgggtgacagcttttatgacgagaagcagtacaccgtgtcagagcgtagttattttgctgcgtatcacaaattgttcaaggtggagagcaagccgaaatcgcacatcgaagccctctccaagctcactgatgatgatctaagggaggcgatgccgccgtcgctcaagagactggtcaagcatataatcaaggtggccaaggagcttcacgagtga

SEQ ID NO: 72749 - DNA, 1668 bp, Pseudomonas sp. GM79
gtgatcaaggtcgaagcctggaaaccatccgatggaatcgtgcttgaaccaaacgcagagattgcagcgaaggagcaaaagcgctgcgtggccttgactgcgggccctggttctgggaagtcagagttgctcgctcaacgtgccgacttcttgctgacgacaggcgtgtgccgttatccaaaccgtattctggccattgccttcaaagtcgacgccagtaacaacctgaaggagcgcgtccggcgtcgatgcggcgcggcgtatgcaggtcggttcgatagctacacattccacggattggcgaaaaggattgttgagcgcttcaggccagtgctatctggcgacgatgctttgaaccccggtttcaaagttgtcgccaagggcaaggctcatcctgttcagacggagttcaaggagctcatcccgcttgccattaagattctggatgcctacccggcggctgttaacgcagtacgccagacctacagcgatgtcttcctggacgaattccaagactgcacagatgagcaatacgagcttgttacgaggctatttaaaggatcaggtcgtcgtgtaactgccgtgggagacgtgaagcaaaaaatcatggggtgggccggcgccttggatggggtattcgccgaattcgtcgatgactttgaagccttgcacctcaacatctatcgaaacttccgttcgctgccgcacttgctgaaactccagaacgagatcatcaaggttctagatccagactcagaaatgccggctcaattactcgccggtgagggtggcgaggtgcacgtgttgtcctatgccgattgtgaggaggaggctagcgatttagcagagcgcatcgcccactgggtcaacgtggaaggcatcgatcctgccaagatcgccatactcacgcgcatccagccggaggcttactgtatgcgactgacggctgagctagacgattgggggattagctatcgaaacgaaaacaaggcccaagacatttcgactgagcccatcgcccaggtcatcgtggattacctattgtgcatctacgggctaagagagcctaaagcttggactcgtctcacccgtcgcatcattccggtagaagacgatgcagaggggaagctgaagtccaattggagccgctacatcaaagaggcgcgcaagtctgcttcagccgatttggcgaccaaaacgttcacccaacgatggacgcttttggaggaattcctcgcgatggttgggccgaccctgttggctgggctgtcccatgattacgaatccagagaaacccttcgcgaccttatcgcggaggttaagaaatatattgatgaagccttggagagagagcctgatcttctgaaagcattggcacagctgtctgatgaccagtcgatccgcatcctaaccgtgcacaagagcaaagggctggagtttgatacggtggttttgctaggtgtcgaagaccaagcctacttcggcaaggatcatcacgaggttcagtgcacttttttcgttggcgtatcgcgcgcggaaagacgactcattgtgacaacggctcatcgcagagaaaaccttgggcaggttaactattggaaatcatcacgcactgcccaggaagagttcttggggtacgtaaacctttggaagacctactctaactaa

SEQ ID NO: 72750 - DNA, 1785 bp, Pseudomonas sp. GM80
ttgcgtatcagtcgagtagtcatccaaaacctccgctctctccaaagtgtcgatgtgttgctgaccgatgcgacaacgctagtaatcggggagaacaacactggaaaatcggcattcattcacgctctgcggctgtgtttggacgtaggcctttcctccagttacagggcgctcttgaaagatgatatccattcctcaatcatccaatcgttccccttccaggtctttgtaggcatagagttctcaggattcgaggggaatgaaaacgaagaggctcttcttcacggaacgcagatcgggccggatcgggcgagaattttttaccgtttccgtcccaagaaaaaatttcgtgagcttcattccattggacatctgactaacgcactcacattggaagatttcggttgggagctgtttggaggaggaaattcggctgtagacctgacagcgattagttggaatgtcgaaaacgcagatttcggagcaacccctgtgggtctccaataccttcagtcttacctcgtggtcttcttaccagcactacgagacgtcgaagccgaattacagcagaaccgaagatccttgcttactcgtctgattgaatcatgcggaatatcagatgcggaacaacaagcactcataaacgctgtgatggcagccaatgctcaaatcgaagcatctccaactatccaagccgtcgctgaagctatcgataattccctaaaaagcatcacaggccctgcattcagcctcgatgtcgacctaggtctttcctctccaacgttccaagcgatcgtccgtaatctgatcgttctactttcgagcagtacattttctcagtttgagccacgcagaaacgggcttggactgaacaacatcctctacatagcgatattgatcgaacacttccgaaaacgagcagcgggaggaaagtcgtctggcgagcttattctcattgaagagccagaagcccatctccatccgcaaatgcaagcaaccttggttgaagccttgcgtgagttgccttttcaggtaatagcgacgacacacagcacacaagtgacctcaaaagcgcccctctcctcactggtgatgttcacgcacaagccaggattgccgccttacgtcggtactgtcagatccattccggcactgacaccatacgatcagctcgatctagaacggtacctcgactcaaccaaatcaaacttactgttcgcccggcgcgttatgctcgtggaaggagccgcagagttgctgttgttgccaccactcatcaaacaagtgctgaagatagatttagaacgtgagggtataacgcttgtcgccattcacggagtgcatttcggcgctttcgcgcggctgttctcagtcggcggtctcccgaagcgttgcgcaattgtcgctgatgctgatttagtgccggagcttctattcccgggagacgacccagttataaatatccacctctctgctctacatggtccctacgtccattcctttgcaggcgcaaccacattcgaacgcgagatcacccttcccggaaatttagagatgctcgccgaaacgattcgagatcttggcgcacctcaggctttgggagcgatcgaaggccaaattctggttggtggaccgattccagatgcactgaaagcgcaaatccttcgaacagcgaaaagatttggaaaggcgagatttgcgcagaccgctgcccgccatgctcacctagctggtgagttgcctgcatacgttattcgagcagtagaatggttacgtgaaatatga

SEQ ID NO: 72751 - DNA, 1761 bp, Pseudomonas sp. GM80
atgagccacctcacagtagaacaattcgctgccatcaaacatcctggaaatcttcttctgactgcttgccctgggagcgggaagaccagaacgttgatcgcaaagctggtcaccgaggtggaggacgttcgcgactctccacgggcgttgtgttgcatcacatataccaactcagccgttcaggaaatcgagcgtagggcccgagagcagttgttggctggcgacgatcgttttttcagtatttcaacgatccattcattttgtctaaacgaaattgttcgcccatacggctggttgatgcctggattcaagggcacggcgaaaattttaacccgcgagaatgaagattttgaatcgatttgccgttatgcagttgcccaggcagggggtgccggcgttacgcgcgaggattatgacgcctttgaaagtatcggagtcgacgcagacggccagctgatagggatggctgcggagaatcgcaccgtaaaagcggcagcaccgcatttttgggcgaggtgtactgagctgggttacacggatttcggcagtattatctatgtggcgtaccagctactacgagataaaccacagattgcaaaatctctaggcgctcgatacaagtggtttttagttgacgaattccaagatacgacatcgctgcaaatagaaattttaaaactactccatgcttctgggcgttcgtctttcttctgcgtgggggatattgctcaatcaatcttcgcgtttgcgggtgcccgtcccgaactcgtccagccattcggggagcatattggggcagagacacgcttgtcgctttctgagaatttccgctctagccaacgcatcgtttcccacgcagagaagctttttcctcgttttccacccatggtggcatcaggacctaataaagatttcgcgttgatgcctgatttggttcgaggcggcagtgttttcgacgcaataacgaaagtgtttttaccgcgcgctgctgcggcaggaatcgccataggtgactgcactgtactagcgaaggactggaactccctctataaccttggacgcctattaagggctgcgcatatcccgatcgttggaccaggagctaggccataccgacgttcgcggctcttcgctcacattgctgaacagctctgttttgcgttgacaagcacctccggtaaaggctctcgtcagctagagcgcgcactgtttcatacggtgcaggatctcacaggatacgggacagatgtattttcccatggcggccgagtggtacttataagattgctgcgggaagcttaccgtctttctcaggtatcaaatggcgcaattgcatggcttgatcaaatgtcgattcgcaccggcgaaatactccgagattcggagtttgtaagcgatcagcaggcaaagatgctttatgcgtcagtacaggaaatgaaggccgacatgcaaaagcagaacgccgatctgagcgctttaactatcgacgatttggggatattcgctgattcaagcaacgcattacacctatccacgattcactacgctaagggacgggagtacgaggccgtagcgataatcggaatgaagaaagggacgtttcctcactttaaagcgactgacatcgaggcagaaaaacgtcagttttatgtaggtgtgacgagagcgaagaaatttctgatgtacgtgtgtgagacggataggtttaacaacccaccaagcccgttcctagggtcgatgggtgtacaaatgttaccttaa

SEQ ID NO: 72752 - DNA, 2139 bp, Pseudomonas sp. GM102
atgaaagtagtaaggatcgaagttaataattttcgcttgctgaagaggttctctcttgaccttgagagcaatctttctctggtgttgggtaaaaataatagcggaaagacttcgctgctctctgcattagagaagtttataaattcttctgaaaagcataaaatagtttttgacgatttcaacgtcgatttaaaagcagccttaattaaattggtgagcggggctgacccgataggtccagagaatgcctatatccccttgggtataacgttgaagttatatattgagtacgatggtatcgataatttgtcgccagtaagccagttaataatgagcttggatcctgatgataatcatatagtgcttgggtttgagtatttggttagctatccgcagttaacggcgatgcggaatgattacaatgatgtaaaagaaaaatatgacaacgattcgagtttgtttcttaaggaaaatcagcatatttactttgatcaagtcaggaagaaaagtttttcctatagtgatccggatgtgttcacagacttgactaaagaaaatattagtttggctgatgttatttcatttagatctatcggtgcgaagcggagtgttacgaataaagataatgataaaacactctcttctcagactgcaatcatatacaaaaagacatctgagaaccaagagcagcaagaggctgtcgagggttttaagaagcaactgcgttcgacggataaggaactgagcgaaatatatcaggatatgttttctggattattggggaaagttgcaaagtttggcggatctagattgtccgagacgcatattaagattgcatccaccctgcagcatcgagaactgttggatggaaatacaactgtgatgtatacccacgatacccatgatcttccagagcactttaatgggcttggctatatgaatctaatcagcatgatttttgaaatagaaatgctgatgacttcttttcggagatctagtaaagaaaatcctgctgcgattaatttactttttattgaggagccggaagcgcatacacatcctcagatgcaatatacttttataaagaatataaagtccctgttgaaagaaagcagggtgagagaagatggagtggagattcatcttcaaacgattatcagcactcactcatctcatatagtggcagagtgtgatttcgacgatatcaagtatttgaggaagtcacctcttgctaacagtgtggacgcaaaaaatcttaaggcgctcaagtcggagtattcgtccgatgatgtgaatgacaatgcccaggctgaactacactacaaattccttaagcaatatcttacgttgaaccgagccgagctattttttgctgataaagcaatccttattgagggtgatactgagaagattcttctaccagcaatgatgagaaagtttgaccaagaaattcctgatgctggcgctatacctctactttcacagaatatttcaattgtggaggtaggagcacatgctcaaatctttgaaaagtttatccattttattggtattaaagctttaattttgactgatatagatagcgggattaaagaattgctttttgaaaaggatggagttactccccagctatacaaaaaaggcactcagaaaatagagactataaaatgtcgtcctgatgacccggcggcagaccatacagctaatggatcgttaatattttatcacggcaaggtcagagaggatttgggctactttacctcccttaatattgaaggtaaggctttatctaaagtcggaggcgaatggaaggtcgatgtcgatggctgtatttttctagcatatcagactaaagacgatggctatcatggaagaagcttcgaagatgcattcttttcgctaaacaaagcactacttggaactgactctgaaaaatttccatctctaacgccaaagtggttcaacaaatatataaatggcgagtgcgatgcatttgagtttgcagagaaggcagttggcaaaaagccttcgttagcgattgaaatcctgcttaatagtatacctgataaaaaatctgacttttccaattggaagactcctcactatatccaagagggcctggaatggttgcgcaaatga

SEQ ID NO: 72753 - DNA, 1926 bp, Pseudomonas sp. GM102
atggttgcgcaaatgaagaacttagaggaggttagtgacgaggcgaaaaagattcttgatactatcagtgagggtaagagttttttactgagtggcggtgctggaagtggtaaaacttactctttggtagaggttataacgaatctggttaccctcaagcctttggcacgcgtagcgtgtattacctacaccaacgccgcggtgcgggagattgagggcagagccagccatccaaatctgcacgtttctacgatccatgactttctctggggagtaatcaaacattttcaagtagaactaaaggaggttttgttagcgctgattaatgatgacgaaatatcagggtttaaagttttagatggcaacggcgaaccagaaaaattagatactattgagggggatgttaggtataaggagtacgtaaaatttagggatggggtaatttcacatgatgaagttattgtacttgctaacgagatgtttaaaagatacgacaaactgtgccggatactgaaagattgttatccatatatcatggtggatgagtatcaagatactcaggcggaagttgtagatatacttcttgcgcagttgactagagttggtgatccaaatgttattggtttttttggcgatgcaatgcaggcaatttatgatgaaggcattggtgatttagatgcttacaaaggggagggggttgggcaggttagagaaataaagaaagaagaaaatagaagaaatccaaaaaatgtaatcgatttggcaaacaaacttaggaatgatgggcttttccaagttccttctaaagatttaaatgctcccaatatgaccaatgaaggtggtgtaaaagatggtcatatacaatttctatattcatccaatgatgacgttaatattgtaaaagaatatttgggttgggagttttccgagtcatcaggcgctaaggaactcaatctcactcataaccttatcgctgccaaagcagggtttagtgagttgatgaggatttatgatggcgataagattttagagtatgtccgtaggatcaaaagttatattaagaaaaaggagcctgcttttaactccgagggaaaaacgttcggagaagtattggccgagttgaagtataaaaagactggtaaagccttaaaagacgttgatcccacagacggcatggcgatatatattgcagaacaccaagctatatatgatcgagcgctggatttcccatatggtgagctggcttctttatatgttgacaaagaccagcttatagacgatcagaaatctgatcgaagtgagctggggcgtggcggtggtaatagggatgacctgataaaacatttatttaaaatacaaaaaaatgtccagctttacttggatggaagttttaatgagtttcttcgcgtaactgaacatgcggtcacatctaagagtgataaagttagactgaaggagaggattgtcaatttatctaaaatcgatgataaaacagtacagcaagttatcgatgaggcaaatgtaagtggccttgttagggttgacgatcgccttcaatcatttatggagtcgaaacgttatatttataaccaagtggccgcgctcccattctctcaatttcagaaattatttaaatatcttgaaggatttacaccattctctactcagcataaaaccaaaggtcgagaatttcctgatgttctggttgttctgaacaatgggcggtggaactcctataactttgattatttgtttactgatcgtatggataaagaaagtgtggtgaataggacgcgtaaaattctctacgtatgctgtacccgtgcaaaatcaaatttggctttattttatcactcgccatctgacgcagttgttgaaaaagcgaaggactggttcggccatgaaaacgtaaaagatctagattag

SEQ ID NO: 72754 - DNA, 2427 bp, Phyllobacterium sp. YR531
atgctggaggtgtcctatagaagggcggggggaagtcgagtgcatatcgaatttttggagatcgccaatttcaggaagcttttgtgcacgcgggtcgatctttcgagtacgactaccctgttcgtcggcgcgaacaatagtggcaagacctcagcgatgctcgcccttcggcgtttcctgtcgccccgccggtgcccattcgagatgcacgatttcaccctgtgtcattggcccacaatcgttgcgttgggggaaagctggatagctgcgcgcaacgctgaggaggtcgtcgacctcgtcgttgatccatggatcagcgcgttgccaacgctggacctatggctgcatgtcgagacaggagagatgcatcacgtgcgcgatcttatcccgacactggactgggaaggcggaaggttgggtgtccggctgcgctacgagccgaaggagctcgcactcctgtataaggagttcatgggcgccgtcagcgacgcagagacgatgagggcggcggcaatcgccgccactgcagcggagaaccctgaagctgatccgccggctataccgcctaagctgacgatctggccggaaaatctcgtcgattttctcagcaagcgtttgtcgacgcacttcaccatacgggcctactcgttggatcctggtcagctcgttactcccgccaagtcgctggcgcggccgcaggtcctatcgggcggttcgcggccgatcgacggcgacccgttgggcggcctgattcgcgtccacgacatccccgcgcagcggggattcggtgaagagcagcaagctgttgaagacgacaatgcccccgcggcggcgacgggcagccgactgtcagaccagctaagaagctattatgccaaacacctcgatcccacgaagggccccgatccgaaggatcttggcgcgttacaagcgatcgaagccgcgcaagacgccttcgacaagcggctgaccgagagcttcaaggccgcgttcacagaggtcgagggtatgggataccctggcgtgaccgacccgcgccctcgtgtctccacacgcttgaaggcgatcgacggtctcaaccacaacgcggcgatcagcttcgaggtggacgtgatcgccggcgacggtgcgatgacaccggtgttgcgattgcccgaggcgaataacggtctcggctatcaaaacctgatctcgatgatattccgtttgatgagctttcgcgacgcttggatgcgggtggggaaggcttcgaccggtgcgacggtcaccacgacagagccgctccatttggtgctcgtcgaagagccggaggcgcatcttcacgctcaggtgcagcaggtcttcatcaagaaagcttatgcggtgttgcgcgcccatgacgatctcggcgaaaacaagaagctacgcacccaactcgtggtcagtacccactccagccatgtcgcgcatgagacgtcgttctcgtgcctgcgctatttccggcgactgccggcgggcatggcggcaaacgtacctgtctcgacagtgatcaacctgtcggaggtcttcggtcctggaagcgaaaccgagcgtttcgtcacccgctatctcagagctcaacacgctgatctatttttcgccgatgcggcgatcttggtcgaaggaccggcagagcggatgctcgtacctaacttcatccgagcgcactatgacgagctcaaccagtgctacatcaccttgcttgagatcggaggaagccacgcgcaccgtctcaagcccttgattgatcacctcggtttgctgaccctcatcatcactgacctggatacgctggatggaacgggtggcgcctctgtccaacccgcgaaaggcgctggtcaaaaaaccaataatgcgacgctgaagacatgggtgccaaagctcgacgacgtcgatgagctgatgcgagctgatggcgggacgaagacgctgtatgaagacgacgacccgctctttgccgtgcgggccgcgtatcagaccccgttgggcgtgacgtccccgggttttgtggggccggaggtcgcatatccgtatacgtttgaggacgcgttggcgttcgagaacctcaccctcttttccgaactggatgggaccggcctggtccgcaagtttcgcgatgcgatcgtggatagtggcggggcggccgcgatcggcgagaagatgtacctcgctctcaagaacggcaagaaggccgagtttgcgcttgacgtgatggaggttgagaacttcgacaccatcgtcgtgccgcgctacatcgccgagggactcgagtggctactcgcgcagctcaagaaaaagcaggttgagattctgcccctggttaaggaggagccgcccccggaggaagtcgaggttaacccgccggtcgcagaggatgtcggcgccgaaatcgaaggggtcgacgcatga

SEQ ID NO: 72755 - DNA, 1908 bp, Phyllobacterium sp. YR531
atgagcgcggttgacgacaaatttgattccgaagccgacgaaacgatcctcgcctgcttgaacattgagaagccaaggagcttctttctctacgccggcgccggatcaggcaagacccggtcgctcgttgaggcgatccggacggtgtgtaaggagcagggcaggcggttgtcgctatctggtcagaagatcggggtgattacctacaccaacgccgcctgcgacgagatcaagcaacggctcgagttcgatcctcgcgtagaggtgtcgaccattcacgcgttcgcgtggtctctgattgccggctacgacggtgatattcgggggtggctgtcgacccggctccttgcggatatagccgagctggaggaagcacaggcgaagggtcgggcaaacagcaaagccgcgtcggaccgcgctcgctcgatagaaagcaagcggcgtcgccgcgagaacctcgccgaaattacgcgattcgtttacagccccacgggcgacaaccgcacgcgggactctctgagccacgcagaggtcatcgccatgaccgccgattttctcagcgcaaagcctggtttgcgccggctgctagtgacccgtttcccaatcctgctgatcgacgagagccaggatacaagccggaggctcatggacgcgctgctcagtgtcgaggcgggataccacgaggccttttgcctggggcttttcggcgacacaatgcagcgcatctacgccgacggtaaggagcgtttagcggaggcgatcccgcaggcctgggccaggccgcggaagcggatgaaccatcgttgccccacgcgggtcatcacgctcatcaataaaattagacgggatgaggatggcgaggaacaggagccacgcagcgatgctggagagggcgttgttcggctgttcgtcgtctcgcaggcgatagccgacaagagtgcggccgaggctaccgtcgctgcacgaatggcggagctcacgggcgatccgagttgggcggacggagccgaagcggtcaagacgctggcgctggagcacctgatgtccgcgcgccggtttggcttcgaacaattcttcgagcctctctacgcggtcgagcgcatccgcacgagcttcctgcaagggacgggcgcgggcatcggacttttcacccgcgagatattgccgctggtcgcggccctgcgcgcgggcgatcgatttgccgtcgccgcagtcgttcggcgcacgtctccgctcctcgatcgtaaagcgcttgaagctgccggcgagaagcaggtcgacattctcagcaaggtcaaggctgcctgtgatggcctgctggccctggtgaacaaggatgagaagccgactgcgcgctcggttttgcgctatgtcgccgaaactaacctcttcacgattcccgaggtgctggttccgttttccgccgccgatgctgtcgtcgcggacggcgagattgacgcagacggcgatgccggcgaccaggaagaggaagtcgatgtcaaaagcgagttgggcggttggcggttggcacttgaggcgcccttcgaccagatcgagcgatatgatcgctacgttcgtggcgtctcgcagttcgacacgcaccagggggtaaaagggctggaatttccaagggtaatggttgtcgttagcgacgatgaagcccgcggtttcatgttcgcctatgacaagcttttcgagacgaaggcgaagagtaagaccgatcttgagaatgaagcggccgggaaggagacgaccatcgatcggacgcgacgactattttatgtgacctgcagccgagccgagcaaagccttgccgttgtttactatactgctgatccgacgctggcgcgcgacgcgatgattcggcaggagtggtttgagcctggcgagatagaactaatcgcctga

SEQ ID NO: 72756 - DNA, 1908 bp, Polaromonas sp. CF318
atgaatttgacatcgatagctattaaggattttcgctgcattcaaagcttacgtctgccaatcagaggtaacgccgtaatcattggggaaaacaacgcgggtaaaagtgcggtattggatgcggtaaaaattgcgctgggacgcaggtgggggaaatcaggaaacactggatttaacgagtatgactttcgcacgactttgccaggagcagattcaaagcaggaggtcatagaggtcacattgggattcgcggaaaaggtcgctcacgagtggcctgagaacattaccgggtcgcttctcgatattactcaaacagacccaaaaactgccttaaatgccattgagatgcgagtccggtgtaaatttgctgaggttactaaatcggtggagccagagtggcaatttttaaacagcgttggcgatccttatgcgggaaagggtgcccgtaaccaaaatctttcgagtttttttgattatgtgccttgcttctcgatgggagctatgagagatgcatctgtagagtttggcggtcgctctcgtttttggggctccctgcttaaatcgatagatattgataaagcaaaatccgatgatctggaaggaaagtttgctgccctaaacaccgaattgttagcagctgatcctaagcttgaaagtattaagaatacgctccgctctataagtaacgttattgcaattggtgcggctggaaatgtggacgttagagcagtcccaataaatctttgggacatcattagtcgctcagaactaatagtgcaaggtaaggctgcggacccctggcttcctataggacgtcacgggaatggagttcaaagcttagccgtcatgtttttatttcgagcctacattgaaaatatgttggaagagacatatacggctgacagcacacccattctcacgctcgaagaaccagaagctcatctgcaccctcaggcttgtcgggcgctttgggagtcagtcgtgacgcttcccgggcagaaaattattacgactcactctccttattttgttcagaatgttccgctgaaggacttgattattttgcggcgaggggccgaagggcctaaaggttatcgaattgagcagattttctccaccaaattaagtaatgctgccggccttaatgctgttgttactaaatatccggcgctcctttcgtacgatgagatacaaggggttctgacctgccaaggagtattggaggaggcgacgtttagagagttacttatgtgcttcgtggaccctcagaacgcaactgaaaatcacgccgccctacggaagctgaaggatgaaagcattaattttgtgggtgacgatgaaattggtcgcctagaaagttgggcaaagcgtattcggggagaaattttctttgcgcgaaaatggattttgtgtgaggggcaatccgagtacgccatcttgggcgctattggtgagaaactgggagtgccgttggatgcatatggaatttccgttatcgactatcagaataatggttctagcggtgcttttgcgacgcttgcaagagcattcggatttgagtgggcgatgatctgtgatggcgaccagggaggggatgatcatattgctcagttattaagtaaacggtttttgcctcagcagatttctgatcgggtggtgcagcttccgaagggacaagatctggagcagtatttgatcggaagcacatttcgcccgcttatggttgctgctattcatgagttggacggtagcgtgcctgatacagacgccgatttgttggcatttgctgcggaccacaaagaagagactgctgtgcgcttggcacgaaacattcgattgtccgggtcggacattactattcctcccaagttcaccgaactattcaaaaatctgggagaaatagcatga

SEQ ID NO: 72757 - DNA, 1923 bp, Polaromonas sp. CF318
atgaccgaagccgagaaacggctgggggaccttttggcttcgctaacccctgttcagcgtcacgcggctgggtggggcgatggggccttcttgttgctggctggtccaggctcaggaaaaacacgggttcttacagccaggatatccaaactcctggtcgagtctccacaaagtcgctggagaattctcgctttgacttttacgaatcgtgctgctgacgagatgcgcagccggatactggaaataattcctgacgcggaggacaggctattcataggtacatttcattcgttcgcctgtgaagtcttgcgacaaagtggatcactaattgggctcaaaaccgattttaaaatctactcgtcaatgtctgacaggttactgatgctcaatcgcgcattgtctgttgctgacgtgaatccagaaatcccgcgagagaaaattctccctatgcttgatcgtcttcgcgatcttttggtctctcctgatgaatctgaaagatttttttctagtgagctgcaaggtattgccatttctcaagcctataaggcatacgatgattttctgacgacagaaaatgcagtggatttcccggcccttatctataaggcgcatgctctctttaaagtttttccaacagttgctcgaaagtattcctcaaattacaaatacttgtgtttagatgaatttcaagacgcaaatgaagggcaatacaaacttcttcgcgccttcgcctcgactgactacaaaaatgtttttgccgttgcggatgatgatcaaatcatctatcaatggaatggcgcaagtcatcagcgtcttgagcaatttcaatcggatttcgacccagagcgttttcagatgccgacaaactttcggtgtcctgcttcggtggttcagttggccaacaatctggtaacccataacagattacgtgcacctggtaaaagtccattagaggttggacgtacagatacagcagtagcggaggaggttcgcgtactgtcttttgcaactgataccgatgaagccagagaaattgctcgagatatcgcttcgcggcaccgtgcgcatttaggttctgtggcgctgattgcaaggaccaaagcgctcttggaaaaagcgcgagaagccttgcatgacgagggcattcccgctcagatagcccaacgtcgcgatagctttgcaagccttccttacgcgtggcttcaaggcgcccttaacctggctaaccgtagatcggatcaacgagcctttcaagtctttgcggaggctagcaataagctcttgtccctagatattgatcttgactcagcatcggcccaggcgtcggcgacccatggtgatctacttcgtagttgggcgacagaagcagcccaaagtacacagctaaccctcccaggtcgggcaattgttgaagccatcaactcgcaacttgcagagcgtctggattaccggaagttcattcgaataatagtcagccattttcaagagcaaaaggaggtttttgagcgagagtatcctttgttcgatgaggatcgtagagcttggactgagctttcgaaggaaattgcgtcgtcttccggtgcaggtgcggggcttgattctttcttgcaagagcttgaaatgcgctctaaagagcctccattgatgaatggagtactaccacttttgacgatacatggctcaaaaggaaacgagtttgatcacgtatacatcgtcggcttagctgaagacatcctgccttcatttcaaagcaagaataaaggtaacgctagtccggaaatggaggaggagcgacggaattgctttgttgcaattactcgatgcatgaaatccttaaccctgagctatgccgggagatatagggggtatgccaaaagcccctctagatttttaacggagatggaagtcgtttcaacgagctga

SEQ ID NO: 72758 - DNA, 1965 bp, Marinobacter sp. BSs20148
atgtatatcagtagaattaaaattcagaatttcaggcttcttaaagataccaccctcaatttaaaagaagatctttccctactcattggtaaaaacaatacaggaaaaacctcaattctggttcttctcgaacactttttcgaaaataaaaaatttcattatgaagacttttcgatctcattaagaaaagacataaatgccctaacggatgatactgatattgatagattgtctatccgattattcttggatattcaatatgatgaggatgacgatttaagcacattgtctgatttcatattagaccttgatccagagataaaggtagcaaagatactcttcgaatgttgtattgataaaaaatcaattttgaagaaaatatcggaagtaaaaaccgatgataaattaaaattcattcaaaagaatttatcaaaatacctgattacgaaaatatatgcctacaatgacaatgactatacgggaagtgaatatatattcaaattcaggcacaagctaattgagaaggatctaaaaaacgtaaaccgcttgattggttttgaagttattcatgctcgccgcaatgtagctagctcagaagatcgaaagaaagcgcctttgtccgcactgactacttcatattttaatagtaagcatgactccgagactcctgatgaaaatgtttcttccatcaatactttactctcggatatggatgagaagctagaagctaaatataaaccaatttttgagaatttcctaaagaatgctaaagattttcttgagatagaaaacctaaatgttaggtcagatattcaatcaaaagctctatttgataattcatcagttgtgacatatggcggtgtggatgatgttcttcctgagcatttaaacggattggggtatatgaacatactgcatcttttgcttgaggtagaacgaaggaaggacaagtttgagaaaagtggttcaagtttaaatttgctatttattgaagaacctgaagcgcatacacatccgcaaatgcaatatgtttttgctaaaaacataaaatcgatcctttctgatgttaaatgcttacaaacattaatcacctcgcattctccgcatatcgtatcccattcaaatttcaaggatataagatatttaaaagctgtagacggcgttgttgaaattaagaatttttattctgatctggaaaaagaatacgcttctgaaccaaagcaatttagattccttgagcaatatttaaacatacaatctgcggaactgttttttgcaaacaaagttatttttatcgaaggcactactgaaaaaatgttgctgccactattcatccaacaacttgataaaaaattgattttggagaatgctgaatgcttgccacttatatctcagaatatttcaattttagaggtcggtgcgaatgcaaaagcattcggaaaatttcttaattttcttggggtcaaaacactcatcataacggacatagatactaccaggaagttgggatcgtcgtattcggcctgctcagttaatgacggtgaatatacgagcaattattcactgagacattatttggattctccatcagagtattcagacaaagactggcctaaatggtttaaaaaattaaaagaatcaaatttaacatgtgcttttcctgacattagggtctcttatcagacagaggagaatggttatcatgggcgaagctttgaagatgcatttatccatgtaaacttgactaaattgaaagattctataaaagaatccgaagacaaaatatgggggctaaagaatacaagtaaatttaatagtgaatcaaatatttatgagctaacaaaagaagtcttagataaaaagtcagattttgcggcatctttgctctttcaatccctatcagaaggtgtggtttggaatatgcccgcttatattgaggaaggtttgaaatggatagcaaagtag

SEQ ID NO: 72759 - DNA, 2055 bp, Marinobacter sp. BSs20148
atggatagcaaagtagatccttttggtaaaattaaagactgcatatctaacaacaaaaattttgttcttcagggcggtgcaggaagtggtaagacggagtttttaaaaagaactcttgaatacctatcaacaacatacccaagtaagaaaatcgcatgtatcactcacacaaatttggctgttgatgagattaagtcgcgggttggtgaaggatacacaattagtacaattcactctttcttgaacgacactataaaatattacaagaaaaatcttcacgcttgcatttatgatttgtttaaacttgattcaatagaacgcggatctctaggcgattacgaagacgatgaaaaggaaatgaaggctggggagcacaaaaagtacaaaaaaatatacgaaaagtatgcctcctccctctattcggttaagggagaaagagctgaaaaagtgacaggcaagagagattatgacaaagatcctgaaggctacaactctcagttaaatggcatgataacagcgcttaactctgaaattaaaaagaagattgatgacaaagaatgtgatggtgttcggtataacgatacacgctttaatagttttcaggatctcacctttggtcatgatgggctgctcgacatctcatctattgttttttcaaaatatcccactatcgccaagatattacaggataaatttgattgtattttcattgatgagtaccaagatactaacgaaaaaatcgttgatatattcttgaataaattgccctttcagaaacggatcttgattggtttttttggtgattctatgcaatcaatatacagtgatggcattggaaatgttgggcactacgttaagggcaaagttctcgaaaaaattgataaagaagataattaccgttgttcacaacaagtagtagattttattaactcacttcgagatgactccttagaacagaaggttgccttaaagaggcttgaagatggtacttacgaagcattggataaaagacaaggcaccgttgaaatatattattcttttgctccagaaaagccaaaggggaggctttcgccagaagaaaatcaagaatacaaagcagctcacatcaaggctgttgatgagctagtatctagggcattaaatggggataatagttataggttgctgaaactaacgaataaatccatcgcttcagatgctggatttgaaaatttatatgaaatcttcaatgcacgattcactgataacaaggaagcaattgaaaataacttgtcatcgctacaattgatagagttatgtgaactttgcattgctttctcgccgagtgaattctctgatctttcgcctaattataatctggtaatctctcagcttaaaaagcaaaaattcgaaatcagatctattggcgataaggcgagagttaaatacatgtttgacacgattctttcatctgatttaagtcttcacgaagccattcagaaggcgatagaaataaagcttctcaaggcatctgaaaaatatcttggttacttggaaagaagatcttcttttttagatggtgttttgaaagatcctgactacatcaagtttaaaggtttgtatcaagatggaaagaataccttagctcgaattcgcgatgatcttccgagcttaaatcagtacgaatttgatgaactggataaaaaagtcaaaaaagaaatattctttcatgatctgttctctaagaaaataccatttcaagaggttttgaattattacaactattctaatgaatttacccaatacataacaatgcataaaactaaaggttccggcatcgaaaatgttttagttgttcttgatgagtatttttggcacaacgaatataactttagaagtatatattcagacggttttgacgctacaaaaaaatggaaaaatcagaagttattctatgttgcgtgttcgagggctataaaaaatctaaaagtggttcggctactctctgatgctgacgaggaaaaggatttcacttctatgttccaagatcctatctacattgcattgaactcatag

SEQ ID NO: 72760 - DNA, 1992 bp, Ralstonia solanacearum PSI07
atggtccgcgcctcatacaagctcaacgagtcggacttccatcgagggcttggttcgtggcgcggtcactggatagtcatcagcgttgagttcgaggatgtcagcccagatgaggcaattcaggcgctcttcatacacggcacgggggttgggctggccggtggagtggtggcacgagcaacgtacaacctgatattccgcccaaacaagcagatcagaatgaatctggcagcgctcgccgactttgacatcgccgggatgcgcgcgattcttgatcaagtaacgatcgacgactacgaaacactatttacggggcggagtgttgccgattttgcagatccggtggtctatcggcgcatcgtaggtgactttgacaatgctgtatttagcaatgaggtcgaatttccggagctaggggctcgcattccggggactctatcagtcaccaaggaggtgtcattcaccttcattcaggcgcttcgtgatgtcgtatccgaattccatagcaaccgaaccaacccacttctcactctgctgaagagcaagagcgggcagattgaccctgcgcagtttcagccaatcgtagaacgcgcgcagcaactaaacagagaaattgagaatctgaacgacgtgcggactgttcgctccgatattgaggagacgatctatggagcggccggacagacgtactctccttctttgctggcaatcaagtctgatcttcccgatgaagcagatttgttgttccagtcactcaagctcttcgtcggtgagttcgatggggaccatgagggcagcatccaggagctgagccttgggggcgccaacctaattttcttgacgttgaagctcctcgagttcaagtaccagcacgatcgtcaggcgattgcgaactttctgcttatcgaggagccagaggcgcatctgcacacgcacgttcaaaagacgctgttcgatcgaatcggatacaccggggcacaaattatctattcgacgcactcgacgcacatctccgaggtgagcaacatcgagagcgtcaacatcttggggcgtaaccgagttacttgtgaggcgtttcagccatctgcagggcttgccaccgaccaactgggcaacgttcagcgttatctcgatgctgttcgcagcaacctgctcttcgcaaagagcgtgctcctagtggaaggcgacgctgaagagatcctcattccgttgatggtcaagcagctcctaggcgtgagtctagacgagcttgggatcagcctggtcaatatcggtagtaccggcttcgacaacgtttctgtgctgttccacgaagccagaatccgccgccgttgctcgatcatcacggacctggatgcggcatttatgaacccgcaccccgtacctggcgacgatcctgagacgttacagctgaagagcaaactactccgagcccaaacgtccggagcagctcgcaaagtcgtactcgatgcgcaggccgccggtaccgcatggcttcggcccttctatgccgctaatacgttcgaagttgacttcgtggcatgcggcaatgcggagaaggtggtcgcatcagtcaacgaagtctatacgcagcccgcaacgcgcgctcagtccgtagctgagttgaactcgggcgatcccgctcagtttggaaggcgagtactcaccatggccaactatgaaggcaagggttggttcgccattcttctgggcaagcagatagatcacaggatcgtcattccgccctacatccggcgggcgattatcttcgcgcatggaatgttctcgaccgaactgatcttcagcatactgaagcacagagtgactatgaacaatccgggtggagccgccacaccgccagcgctacgacactattgggagcgcctgcttgactatcgcgcaggcctcattgacttcaacactgtcagagcagaggcagccattggtctccccgacgatccaatccttgcatttctgggagacctggcgtga

SEQ ID NO: 72761 - DNA, 1803 bp, Ralstonia solanacearum PSI07
gtgacgttcgcatggactcggacggagctgaacgatgagcagtcgcaggttgtacgcgaagagaacagcgtgttcctggtggcgtgcccgggcagtggaaagaccagaacacttacttataagatcgcctatgagctgtcgcgcctgcagagcaagcgacagttcatcgtcgcactcacctacacaaatcgggcggccgacgaaattcatgagcgtatcgaagagctaggcgtcgacacgtcgcagttgtggacaggaacgatccactctttctgcctggaatggattctgaagccctacgccatctacgagccggcgttagcacgtggctttcgaatcatggacagccatgagcaagagaagctactagaagaactgtgcagagcgcagagaggaatcacctactgggactgtgaatactatttcactgaccaaggctacgttctagggtgcacggatcaaaataaacacgagcgtcttcatgccgtctttgcgcagtacttccgctacctcgcggacaacaggcaaattgattttgagcagattctcttctacgcgtcgcgcctgattcagggacaacctcaaatcgcgaaagtcctagctagtatcttttcgtggatactgattgacgaataccaagacacgaagaggattcagtactcgatcgttgcagccatcacgagagctggagctgagcgaacaaaattgtttgtggttggtgatcctaatcaagcgatctttggctcgcttggcggtttcgcgatgccgcttgccgagtttcgacagctttctggtattcggctggaagagcgtgcactgactgagaactatcgctccacggatcggcttatcagatatttttcgaacttcacagttcaggcgaccggcattcgtggagccgcgtccgaccgagcgttccctagcaacgtcagctacaacatcactgttgagcgagaccagctagagaccgagcttgtcagactgatcaggctcagcactgcccagggatttgcggccgagcagatctgcatactagcgccgtggtggattttgctggcaggggtgacacgtcgacttgcaggcgccttgccagagtaccagttcgacggtccaggtatggttcctttcagccgtgatcaagagaacttctggtatcggctgtcgcgaatcgcgttgacggaggcgtccccgacacagtatgtgcggcgactgcgttgggcggcagaggtaatcagggacctaggcaacgaaggcatcaacactcccggactgtccgctaaatggcttcttcgggagagcaattctatccagttgaatcaacccgatggtctgctgtatctcagggagttcttcgcttcgttgatggagcgtctcgggattgactggcaatcgcatcctttgctcttagagcatcatcaagccttctttgacagttctgccgcaaagattgatcggctacgcagggagggggccgagttcatcgacggcattgacttcttccgcaaagtgtttcagcaccgaagtggcatcactgtcaacacgatccatggtgtcaagggggcggagttcgacgtagtgattgcgtttggtttgttgcaagggatggtcccacatttcagcgaagaagcaggggcagacagaggtactgacagtgctaagaaactgctctacgttgttggctctcgggcgcgcaaacatctccatctgatctccgagcggcaacgtatgaggggtggagggcgaggcccatacgcggcaacgaacgcacttgctgcatgcgtgtttgattacgacgttgtgtaa

SEQ ID NO: 72762 - DNA, 1800 bp, Ralstonia solanacearum PSI07
atgaaactctcacggattcatataagcaacttccgaaacttccatgaagctgacgtcgagttggatggaaacgtcgtcatagtgggcgagaaccgtgtgggaaagagcaacttgctctacgcaatgcggcttatctttgatcccagcttgccagacagcgcgcggcaactggggcagggtgacttctgggacgggctgggcgagtccattgaggacaaaacgatcacggtgttcgtcgaattacaggagtttgaggatgacctagacctattggctcagcttacggacttccggctcgatgacgatccacacactgtgcggctcacctacgagttccgcccaatccctggcctcggacggtttccgcaatccgacgacgactacgagttcctttgctacggtggcgaggctgagacgaagaggttcggacatgaggtgcgacgacgcatcgccatggacctcctgccagcgctacgagatgcagagggtgacctctcaacttggcgtcgctcgcccctacgacctttgcttgagcgtgcgtttgcgagcgtgccggttgaagacctagagggggtgcgtggcgcggttcaggcagcgaccgagcaattgggagatttcccatccgtgcgaggcctggagcaggcgttgcgtggactctttgcgtctatgagtggccccaaacaggatattgaaccaagcttgggctttgggacaaccgacctgacacggcttttccgcaatctgcgactgttgattgatgggggcttacgcacgatcggcgaagccagcctgggctcggccaacgttgccttcttgagcttgaaggcgctggagttgcgccaactgatgagcgagaaccggcgcgaccacacactgctggcgatcgaagagccagaggctcatttgcacccacacttgcagcgctcagtgtatcgccacctgttcgaagggcttgcggatgaggagggagaccagccgctgtctctgctgttgaccacccactcgccgcacatcgcgagcgttgcgccgctgcgctctctggtgctgctgcgtgacaccgaagatgatggctctgttgcgacctcggcggcctcgatcgcttttaccgacgatgaggaggaggatctagaacgctacctggatgtgacgcgagctgagatgttgttcgcgagaggaatcatcctggtcgaaggggatgccgagaaattcctgttgccggtattcgctgccgcgatggggcatgacctcgatcacctcggtatcaccgtatgctctgtggcggggacgaacttcacgccttatgcaaagctcctgacggcgctggacatcccgttctcgatcgtgaccgattgggatccacgtccgaagggaatcgcgcttggtttcaaccggtcctggaagctagtagagacgatggaacgtgtgcgaactggtgaggttcccggcgagcttattcaggaactcaaggatctaggcgattctgatgatttctgcgagcgttgtgaacagcatggcgtgttcctgaacatgtacacacttgaagtggacttgtttaacgatgcggacttcacaatgtctattatcgagacgttgcgcgaaacacggtggagcgaagagcgaaagggctggatcgatggctgggaggctgatccgaaaaagcttgacgtggacaactatctgaagctgatcgaagtcgtcggcaagggccggtttgcgcagcgtctcgcttctcgtgtcgacggcgtcgcgccaccggcctacattgcgggtgccattacctacgtggtcgagcgtgtctga

SEQ ID NO: 72763 - DNA, 1638 bp, Ralstonia solanacearum PSI07
atgctcgcagaggatgtgcatgaaccgcgtggcgtggcttgcatcacgtacaacaacgagtgcgcgcgggaactggaggaccggttggcagcgctgggcgtggagcctagtgtgcgcgtgttcgttgggacagtgcattcattttcgctcacacagatcattctgccctacgctaaggtggcggggttgggactacccgaagacttcggcgtggctaccagagctgatcggcaggcggcgctgaccgaggcgttggctcacaccgtggacgaacccggcaatttccaggactgggacttccggctgggtaactaccgtcgctcaatccttaatcgcgatagttcggaatggcgtgagaccgatccggagctggccggcctcgtagaggcttacgaaaccggattgcgtcagcgaggcttgatcgactttgacgacatgcccttgttggccgtgcgcgccctgcgcgctaacccatggctgcaacgcgcactgcttgctaagtaccaagttctggttgtcgacgaataccaggacctcggcgtagcgctgcatcgcatggtgatgggcttgtgctttagcacgggcatgcgcttgttcgcggtgggcgatgtcgaccagtcgatctacggtttcaacggggcgcgccccgatttgctgcgtcggctttctgagcgtgaggacgtagagacggttcgcctgcgactaaattaccgcagcggcaaccgaatcgtcacggcgtcgcgtgttgccttgggcgaagagcgtgattacgaggcagccgatgctacggcgcaaggcatggtgttcattcacccgatgggaggtacttatgagcagcaggcggctcgccttatcggggaattgctccctcaagcaatcgcccgcaatccggggctcggctatcgcgatgtagccgtgctgtacccggcggcctggctcggcgatgcagtggccagtgcggcccaggctgcaggcatcccgtatgtgcgtacagatgtcaacgctctgtactcgcgctccagccgcctcttgcaatggttagagatgtgcagccaatggtgttgtggtggctggagaatgggcagaccacggtttacacgcatcgtgaaggaggggcgacggctgtttgcggcggcactacacagcgacgaacggattaccgacttccatcggcggctcgttgcagctctatgggacagtcgggatgcgagcctgaatctgcaccgatggcttgaggggttgcgagtccaggtgattgaaccgttcgccgccgaatgcatcacgctgcacgatgagatggagatgctagcctcgttctcggtgcgcattgcgcagggaggcgaccatgcggacatggctttgggagaactggccggggatggcgaatttctcgatcgcctgactttgtcgacgctgcacagcgcaaaaggcagggagttcggcgtagtgttcatgttcgccatggacagcggtcgactaccgcgaaacggcgtagggagggggcaaatcgcggaggcccgccggttattctatgtcgggttcacgcgtgcgaaggccgaggttcacctcatccacactgcgagacgctcgtctccgtttgtggacgagatcgcgcaacatctgacggacgagcgatga

SEQ ID NO: 72764 - DNA, 2067 bp, Sphingobium sp. SYK-6; identical to SEQ ID NO: 72652

SEQ ID NO: 72765 - DNA, 1773 bp, Sphingobium sp. SYK-6
atggctgacgaagagaccgccgccgacgcggccggccgccttgcacttgagcgtgtctatgcgtgcttcgatgccggacaaagcttccggctcgaggcaggcgcgggcgcaggcaagacatattccctagaaaaggcgctgcgccgcctgatcgaacttcgcggtacggaacttgtgcgtaagcgccaacagattggttgcatcacgttcacgaacgtggcgaaggatgagattatcgcgcgcgttcaggcccacccggcggttcggccggagaccattcacggattttgttggtcagtattgcaggactttcagccccagctccgcgcgatcgtgcctgacttgccgggatggggagaacgtctcgccgatgccggggtgggggggctaggcgcgaggaaggtcaattacgacctcggctatccccgggtgacgccagacgaggtgtcattgaagcacgaagacgtgctgacgctgatgacggagctgctggcacggcccaagtttcgcttagtgctagcgaagcgctatcccgtgctgctgattgacgaatatcaggacaccgatgcgggcttcgtagaggctctaaagcagcatttcctaggtacgggtacggggcctatcattggcctgttcggcgaccattggcagaagatctacggtgagggatgcggtgcggtcgagcacgcagcactcgaggtgatcgacaaaaacgccaatttccgatccgccgaacccatcgtcgcggtgctcaatcgcatgcgacccgatctcgaacagatccccagcgacccggatgcgccgggtgaggctcgaatctttcacacgaatgcatggccgggccagcgccgaacgggccagggcggtggtcactggactggcgacacgagccccgaggcggcacgcgcctatctcgatcacctgaagcagcgattgtcggatgagggctgggactttgccgtcgaacgcaccaagatcctgatgctcagccacagcgtgctggcgaaggaacagggctatccgaccatccagagcatttatggccagttcaacgatgcctggctcaagaaagaagacccccacatcaaatttctggccgaccagctcgagccagcatgcgcggcctttcaggcgaagcgctatggcgagatgtttgagagcctaggcgccggcaggccgtgcatccgtcggcatcacgacaaggtcgcatggacgcagtctctcgaacagcttatccaattgcgagcgaccggcacgatcggcgccgtcatcgacctcatcaaaggccaggctcacatgcatctgcccgaggcggtgctggaccgcgagcaacgcttggccgacgccggacccgaaccggtcgaaggcgagtctcggaggatcgcccagctgcgaaggctacgggacgtcgcctacaccgagctgatggcggtggatgcgttcatcgatggtcacacgcccttcgccaccaagcacggcgtgaagggtgcggagttcgagaacgtgctcgtcatcgtcggccgtggctggaacaagtataatttcgcgcagatgctggaacggctcgacccaggccccccggcagacaaggtcgaatccttcgagagcaatcgcaacctgttctacgtcgcgtgctccagaccgaagcgccgattggcgctgttgttcacccagattctaagcgagctcgcgatggcgaaggtgacagctttgttcggcgaggccaatgtgatcccgcttccagcagatcccgcgggcggggccgcgccatga

SEQ ID NO: 72766 - DNA, 2127 bp, Pantoea ananatis LMG 5342
atgtatcttaaaagtatcgaaattaataactttagaaagttcggcagcaaagataatctaataggctttgtaaaagctaattcaggagacaataaaaagtcgccagttgcttcatcaaccactctaatagtgggtaaaaataacgcgggtaaaaccactattactaaagcattagaatttattgttgatgatggagataaattagtaggttcatattttaattttgattacctaaatgatttattgaataagtatattgaagatgattatagtaaaacaccagagttaagctttattttagatgttattcttgataacggcgatgaagatttaactacaaactttggaaacttcattactattaaagatagtaaggaaaataaagaaatacagtcagctaaggttaaaatagtttatgaggttaaagataaagatctttttaaagataatttaaaagagggactcgattttctcgttctaaaaaaaagagatagagtttataaattcaaatttttagtggatttaatatcagaaacccagttcagacgtgtagtgaaaggcctaaacggaacagtagagagaaacattaggctaaaagatataattgatctcaaggttatatctgcttccaacaatattcatgataaaagattactggcaaaatcttttaataaaataattagatatatgtatgaggttaatggtaaaagtctgcgaagtattaatagtctagttgaaaagaataatattagtctgactactcaaattaggaaaacacatcagaaaggaatcgaatctgttcttgaaaaaattatctctgaaaatgcattggctttttctttgagagctgatcttacatttgaaaagttaatgactgaccttgttacttatgaatatatagacggagatcatcttgtaccagaaggccagttcggattaggatacactaatctaatcaatattcttagcgaaattattgatttttcatataagtgcaagtatatgaaaaaacaaagtaaagttcaggttttgtgtattgaagaacctgagttattcatgcatcctcaaatgcaggtcaatttcattcgccatattgaagaggcactatctgctatattaaatttttccaaaagagatgttgcaaagctaaaaagccagatagtaattactacacattcgtcacacatattaaatagcgtaattcaagaaagttgctcattagatgaaattaattatacatatccagaaaatgggcaaagcaaaaacatcataattaaagattctgatatttctaaaggtgagagtgatagagattattttcaatttataaaaaaacatataaagcatcaagttcctgaattgtttttttctgatgctataatattggttgaaggtattacggaagaaagagtcattaattttttcatcgaacgggacgttcagctcagaagaaaaaaaatttccgtgtttagaattgatggcgctcacggtagtgtttatataaaattattaagtactttaaaaataccctcccttattattactgatattgacttcaaacgatccaaaaagagtttatttaaagaggttgaaacaaaagatagtggtaaaattaaaatccctctttatccgcaaatcgaagtgattgatgaaactaccctcacaactaataaaacacttacttctattcatggaagttctaatgttaataaattcggtaattttttcttgcaaaataatgtaagagtttcatatcagatagaacctatagagttttattctgaaggaacgctggtaaataaattttttgcaaccagttttgaagaagcattaattttagagaactttgaaaaccttatttttaagggtgtattaactgaagtgattccctccgtgatggatgagctacttgtaggcgaaaatccagatttaagtattattttcaaaaattcattcatgttacaaaaaagtttatctgaaagtaaaagtaagttctgtaactctattatattttcgctggttaattcagtagataatcttgatagtcatataaaacttccaaagtatattaaggatggaattgaatggctatcacaatataaattctctgatgaggtagaattatga

SEQ ID NO: 72767 - DNA, 2058 bp, Pantoea ananatis LMG 5342
atgatcttcgaagaatgtcaagatattattttagaggaaaaaaatgtttttaatgatttattacagcatgtcagagaaaaaaaatctttttactttttgtccggtgccggtagcggtaaaacacatgcattaattaatttgatcaaatgtcttaagggagatgagggggagaatttatcagcttcgggacaaaggattttatgtattacttatactaacaatgccagagatgaaatagttagaaggttaggtgagagtgagttgatttatgtatctacgatacatcagttcttgtgggacatgattgaacaccacatgaatgctcttttagaaattcatgcctcacatttaaattatttaatagatatgcttgatagtaaattaagttgccctgataattataagccagcatacaaagcttatagaggattatgtgaaagtgaaattcaagaagttaaaggttttattttgcaagaggatgaaaaatattatagattgattgacctggatgctaaatctttttggataaaattgaaggagattattggggatgagttagggagtaaactcgatactaataaatctgatattgttgatatattctcttatttgagaaagataaataattataagagctgtctaaaaaaaatccacgaaggttgtgagggttttgacaccataaagtatagtataaaaaattcagaatgtctttataagaacagaatcggtcatgacacacttttactttatgcctataaattgatgagtggttacccttactttgctaacatcgttatagataaattcccatatatatttatagatgaatatcaagatactcatgataacgttgttgctttttttcaactaactcttgaacgtttggaatcaagtaattctcaatgtttaataggattatttggtgatccatcccaagaaatttacaacttaggtgctcgcacctctgttttgaccttcaatgaaatttataaaaacatcaatagaagatcacatgatcaaattattgattgcataaataatattagaggaagacatcagccgataaggcaagtttccattttcagaaataaaaatattggtagtgttaaatgttatatttatccgatatcaaaatgtaataaagaaaatattgaagaaataatttcttcttaccaaaatagatggagtgtatctttatctaaccaaatggcatgtcttgtgtcaaaaaatgagatgcttgctgaaatttgtaacttctcagacttgtattcaaaagtaagagatttgtttattgcagaaaataaaatcaactataataaagtaaataatgagtttattgtgaatagtattgataaatttggttcttttgcatcgattttgtatgagtattgtaatccaccttacatgttaaaattaaaaagtgatgccccaataattgaattgtttccaaagctttacttgcaagagtgtacggttaaagatgttgggattgcggtgtctaagttgaacgcgttgagttataccaccttgggtgagtatttttacaaactaaattggttgttcaaaaccaccagaaataaaagagtaaaatctttaattgaatctctttttccagttaaattcgatagtgatgaagcctggaaagagcaaatagttaaagattgtggtttgagaaaagttaaattcgatgatgcagtatttcaaaaattattagaagttgattttgatgaagtcactcattggatgaattacatcaattctaacaaaatcgatagtccagtaaatgttatgacatgtcactcatctaagggacttgagtttgaaaatgtaatagtgttcctaaacgataaaatgaaaaaaaaacaaacatacttttccagtcttataaattcggatttgaatgtagaattgtctcctgacttagaagaggttagaaggcttttatatgtgtcaacgtcaagagctgttaaaaatttgagagttgtgcttttttctgataacaaaattgaaaaagataatattcaaaaaatatttaatgactgtgtttttaatagttag

SEQ ID NO: 72768 - DNA, 1698 bp, Blastococcus saxobsidens DD2
gtgagactgagccgaatcacagtcaagaacttccggaacctggtcgacgtcgacgtgccgctgagcaggcacaccgtcatcgtcggagagaaccgctcgggcaagagcaacctgctgcacgcgatgcggctcgttctggacaacactctctctggggaccagcgacggctgcgcccggaggacttctgggacggactcacggccgcctccggcgacccaacgagcaccggcgagaagatcgaggtgtccctggaggtcaccgatttcgacgacgaggcccctgtagtcgcggccctcagcgacgccctcgtgacgggcgacccgctcaccgcccgactcacttataggtgggagcctgaccccctcatcgacgacgacgtcgtctaccgagcccggttctacggcgggggagacgacgaccgacccatctcctcctcggacgtccgcgagcgtctcatcactgtgttcatgcatgcgctacgggacgtcgagagtgacgtccggagctggcgccgttcgccgcttcgcgcgctgttggagggtgcttcccgcgacgccgcccctgccgacctcgatgcggtccgcgacgcgatggaggacgcgaacgcctccctgaaccgtctcgggccgttggtcacgctgagcaaaagcatctccgacagcactcgggccgccgtcggctcgaaccaaggcctggagacggccctggcggcggcgccgccggatccgcgacggctgattcgtgcgatgcagctattcgttgacggtgacgcgcaacggcaactcaccagcaccagcctcggagcactgaacgtcctgtacttctcgctgctggagctgcggctcaaacaacggctcgaaagtgccgaggtcgcgcacgtgctactcgccatcgaagagccggaggcgcacctgcatcctcaccttcagaggctgttgttcaagcacctgcagcaggacgacgcgagccggtcgacggtcgtcaccacccactcgccgcacatcgccagcgctacctcggcacgcaacctcgtcatgctccgcaccactgacagcggcacggtcgcccgcgctgcagccgacgccgcacttacggaggtggagtgggacgacatcgaccggtacctagacgccacccggtcggagcttgtcttcgctcgccgggtactgctcgtcgaaggcgttgccgagcagctcatggtcccgtcgctgacacaaactgtcgacattgacctggaccagcttggcatttcggtgtgcgccatcgggggtacccacttcggcgcctacgtcaagctgtgtatggctctcggcatcccgtgggccgtgctgaccgacggcgaccccaccaatcgcgttaccggcgctcgccgcaagcagctgctggagcagaacgccggcgcggacccggacgccgtcttcgtcggtgccaccacgttcgagcacgacatcatcgcgaaatccgactccaaccgctccgcgatcgtcgaggtcttgaccgagctcctcggtgacgatctcgaagagcattccgacactctggaaggctggcgggacgataccccggacgtgaaggacttcctcgcggtaatttcgaccgttggcggcaaagggcggttcgcacagcgactggcgagcacaaggcttgatccgccggcgcatctcgccgaagccctcgagtacctgctggagcagtag

SEQ ID NO: 72769 - DNA, 1758 bp, Blastococcus saxobsidens DD2
atgaccagcctgcggcaggcgatctccgagctgcagacaaacccagagcagtgggaggcgtttcagcacgacgggcactgcgtcgtcctcgccccgcccggtagcggcaagacgaagctgctcaccacgaaggctgtctggctggcaaacaacgcaatcgcgccgggccggggcctggcctgcatcacgctgacgaacccggccgcggccgaactccggacccgagtccggcgcctcggccaaccggtgggacgcacggtcaacatcgggacggtccactcgttcgcctggtcgaacgtcatccggccatttgccaacgccgctggtttccccgaatggtcgcggtacaccctcgcgccgcggcaggaggccaacgctgccatgcgggaggcgatccgccgagtgttcgagccgaacgaggacacccgctacgtgaactcgacgatcatgcgcaaccgaaagctgtgcctgaccgagcaggaatggaagacggccggcccgaacatccgcgaggccgccctcgaatacgaccggctgctgcgggagaaggactacgtcgacttcgacactgtcgtcgccatggcggtccacctcgtcgaggagtacccgttcgttcgcacagtgctccacgcccgtttcccgtacctgatggtcgacgagtaccaggacctcgccccggggttgcaccgcatcgtcacgtcgctgtcgctcgacgagggcaactcaacgctcttcgccgttggcgaccccgatcaggccatctacgggtggaccggtacccgcccggagctactcgtggagctcgccgacctcgaggccgtccaccgggtcgacctccgcatcaactatcgatgcggggcggtcatcgcggaagcgggccgacgcatcctcggcgcccacggagctgaggccgtgacgatgcgcggcggcgggtcagtcagtgcgcgatgcgagcctgcaggactgaccgcacaagctgcctacatcgccgggagaatctttgagctgcagtcggagggcgtctcgctgcacgagatcgctgtgctcgctcccaccaacggcgactgcgacgaactcgtggctgtccttcgaagtcgcgacatcccggtttcctggcgagcagacgcctattcgccgagcccattgacgatgacgctcgaggcattcgccgcgtgggtgtctcatggccgcgaggacagcggctaccgactcggcgacctcctcgaccagtggcagcagctcggcgactggtcagcactgcgggccggtgccgatagggtcgtcgccgcgctgctcgccgcggcggcggacacgcgtgctggcgagttcgtcgagacgatcgtgacggtgctggactctgcgggcgcccgggccgaacttcgctcggacgacgcgaacgaactcgagcgcatgcgtgacgctctgagtccagccggcgggatggccgactacacggtccgcgacctgggaggtctacgcctgcgaggtggacgagtggaagtgttgacgatgtcctcgagcaaggggctggagttcgaccacgtcttcatcgcagcgttggaagagggcaagctcccgttcttcgcgtccgtacgcgggtctgccgagtggaccgaggaccgccgcaagttctacgtgtcgttcacccgcgcccgggattcggtcgaagttctctactccggctggtacgacaccccacggggccggcggcacaacggcccgagcgtgttcctccgcgaatccggcttggtcggctag

SEQ ID NO: 72770 - DNA, 1818 bp, Rubrivivax gelatinosus IL144
gtgaagatcgttcagatcaaggtcgcgaactttcgagggattgcggagggtactgtccacttcgacggccacagcgtgctcgtcggagacaacaacgctggcaagtccacgctgcttgaggcgatcgacctcgtgttgggcccggagcgactctcacgccgtcccgtcgtcgacgagcacgacttctacgccggccaatacctaaccgctgacggccaggcgatcccactgtcggtcgaagtcatcgttgcggaccttaacgatgagcagctccggcactttcgtgaacacatcgaatggtgggatacgaacgcgaaggtgctgctagccggcccgcccgtcgaaggaactgatgctgcaggtgttgggcctgcgctgcgcgtgttctttcgcggcgcgtacgacgctgaagaagacgacttccttggcaacacgttcttcgccctgcccgccccaattggcgccggcgagtacccgacgtttcgcgcctccgacaagcgcaagtgcggatttctctacctgcgaacggtacgtaccggctcgcgcgcactcagtctggaacgggggtcgctgcttgacgtaatcctgcgccttcaagagtcgcgtctgaagatgtgggaggaactgctagtgtctctgcgcaccctaccggtcgccgagaaacccgaactcggcgtcaccacgttactggccgcggtgcaggcctcgatcaagaagttcgttccgtctgactgggccgaggatccgcacatgcgcgtctcggatctcacccgcgagaccctgcgtcgcacgcttacagtattcatgggtaccggcgtgaagcgccctgacggcagcagctacgccgctccgtaccagcatcagggcaccggcactatcaacacactggtgcttgcgctgttgtccatcattgccgaactcaagcagaacgtcatcttcgccatggaggagccagagacggcgctgcctccgcatactcagaagcgcatcgtcaacagcgtgcgcgagaagtccgcacaggccctctttacgtcgcactctccattcgtgctcgaggagttcgaacccgctcagatcaaagtgctgaagcgcgtgagtggcgtgctgacctccgtccctgccagcctgccgcccacgattaagccgaagacctacaaggcggagttccgggcgcgcttctgcgaggctctgctcgccaagtacgtcctcatcgtcgagggccgcacggagtacgacgcgctgccgaccgccgcgcgcagactcagccagaccgatccccagtatttcaagtcgctcgaggcgctcggcgtggcgatcatcgacgccaagtcggactcccaagtcgcgccgctaggcaacttctttagggggctgggcaagaccgtctttgctgtgttcgacaagcaggacgagacacagcttgcccttatccgtgccgctgtcgactacccgtacgaatcgcatatgaagggattcgagtcgctggtgttgcagggtactagcgagaacgcgatccggcgctacgcgctgggcgtggttgccgacggcgactggccgcagcacttgatccccgtcacaccgagggcagactccgatagtgcttcgatagccaacgcgctgtcgcagtacttcgcctggggcaagggcagcggccaagcggccgacttgctggcgtcctgcgcgggctggcaggagatgcctgaatacatctcaagctgcctgcacggagtcttccgggtcgtggagcctctgccgcctgcaccgcctccgtctccggctccgccgcctgcgcccccagcagaagccgcagcggcctga

SEQ ID NO: 72771 - DNA, 1710 bp, Rubrivivax gelatinosus IL144
atggtctggagtccgcagaagctcgccttcctgggctgccccggacatgcattggccctagctggcccgggcgccggcaagactcacgtggcgctcgtcaaagcccagcagcaggttgcccacggagcgttgaacccaggccaaaaggtgctgttcctgagctttgcaaggccaacggtcgcgcgaatcctcgagaaggcggccgagctcatctcgccggaaaaactcaagcgcctcgagatcaacacgtaccacgggttcgcatggagcatcctgcgcagccacggctatctgttgaacaccgcgaggtccatcacccttctgccgccgccggaggccgcggcccactttgcggacgtggacgcaagcgtccgcgagcaggagatgcttcgtctattcgagcaggaggggcggctgcacttcgacctgttcgcgcggctggtcgcgcagctcttccagcgcagcgcccggttggcgggcatctactgcgacgcctatcccatggtcatcctggacgagttccaggacacaaacgccgacgaatgggcgatgatccgtcagctgggtcggcatagccgcctaatcgcgctcggagaccccgaccagcggatctacgagttccgcggtgccgatccccgccgcctgggtgagttcgtcgaggcgttccaaccggggagcttcgatttctcgggcgagaaccaccgcagcaacggaacggacatagccgccttcggcaacgacctgttgaccgatcggaaccgcggcagacggtacacgcacgtgaagatcgtgcgctatggcttccgcaggaaccagagcccgcactttcgggcgaaggcggaggttctcgccgcgctgcggcgtctgcgcgaccagccaaacacatcggtgtccgtcctcgtgccgtcgaaggcgttcatgctgcagttctcgcagtacctgtcgtctgacctggatggcctgcctgcacttcggcatgacgttgcgatggacgcggagtcgccgtctctggcggcgaacgtcatcgcagtgttgctggaaggcggcgacatcgcggcgctggcgtcacgcctagtcgccacgctgcacacccacatccgtggccgtggtggaaacaaggctccggcgcaggtggagatggacctcgctggcgccatcggcgcatatatgtcgactggaaagatccgaggcaagaacaggaagctcgtcgtcatggagtgccagaggattgcggcggaacgcgcggatctctgcctctcagggaaccccgaggaagattggtccgccgtgcgcgcgctgatcgccgcttcggccgcgccccaagtggcccgcgtggccgaggacgctcgctttctccgcctgctgcacaggggctctgcgctgcgcacagcgcttagcgagatgtggaggacgcagggtgactatctcggtgcagaggaggcgcttcgcgacgccctgctccaggagcatttcgtcgtcgcgcagaaggagtggcgcgggctgcacctgatgaccatccacaaggccaaggggaaggagtttgacgaggtcgtgatctatgagggcacctactccgggcggatcgtggctgcgaacgccgacgcaaggcgcatcgcgcagtcgcggctggcgctgcgcgtcgcggtcacgcgggccatccggcgcacgacgatcgtgacgccccagagagacgggtgccagtttctttag

SEQ ID NO: 72772 - DNA, 1713 bp, Arcobacter butzleri ED-1
atgttaattgaaaaagttatagttaaaggttttagaaattttgaagaagctacagtaaattttaataataattcattgattattggtgcaaatgatgttggtaaaacaaattttatttattgtctaagagtattattagataaatctttgtcagaaagagatattgaacctcaagaaacagattttcatattaaaaatgatggaacacaatcagaacaattttctattgaaatacattttaataaaataacagaagatgctgttttatctattctaaaaggatctgtaagcgatgataataaaacaatatttaaattttgtgctacaaaaagtgatttagaatataaattttatgttggttcatcaattaatgagttggaagaggtaactagccgattttatttaaagtatattaacttgaaatatgtgaaatctagaagagatttacaaaaatttattgaaatagagaaaaaagatttacttaaattttctaaaaaagattgcactactgaagaatctattcaggataataaacaaacaaatagaatctcgaaaagattacatctaattaataagcgtatagcagatttaaattatataaaagcttcaactcaatcagttaatactgaattagaaaagttatcttataactttgatggatatactgttcatttagatacgggtgcaatagaagtaaaacaatttattgacaaattgcagttagttgcttcaaattctggttctaaaatgctattaggtggagatggacgaaataatcaaattttgattgctctatggaaagctaaaagtgagagagaatttgattctaaccatgaagtagtattctattgtgttgaagaacctgaagcacatcttcatcctcatcaacaaagaaaattagccgactatttaaatagtgaattaaatggtcaaactattattactagtcattcaccacaaattactgctagatattcaccttcgtcaataattcatttattaaataaaaatggtagaagttatgctgcaaaaaatggctgttctaattgtattaatgattcttgggataatttaggttatagaatgagtatattacccgcagaagcattttttgctaaatgtgtatttttagttgaaggaccatctgaaatgctattttatacagttcttgcagaaaaattatctatcgatttagatttttataatatatcaatattagcagtagacggaatagcttttaaagtatatacaacaattcttgatgcaatggaaatagattgggtaatgcgtacagataatgatgtttcaaaagtacaaaataaagagcttaaaaatttggcaggtattaatagatgtttagacttagcaaatatgcaaaaattagagcatcgtgatatttcaacaagtcaagattctgtaattttggatgggacttggaaaagagttagtgcccaagtaaatccaaaaggaatttttttatctaaaaaagatttagaaaatgatttatctttagagcttccagatagtttgaaatcattttctaataaaacgaatttagaagatgctgttgagtacttacaaaaagaaaaagctataagaatgagaaagtttttagcttcgtattctaataacttaatttcaataaataatggagaattagtaaagccattatttaagtgtaaagaaattgttgaaagttcacgaaatgcctag

SEQ ID NO: 72773 - DNA, 1659 bp, Arcobacter butzleri ED-1
atgcctagagattatgagttaacagaagaacagttaaacgctattaactctaatgaaaacatggtaattactgcttgcccaggaagtggaaaaactacggtaatagtagaaaaaattagaaaagagttgaatgaacttccttcttatcaaggagtaataggaattacttttactcaaaaatcagcaaaagaattaaaggaaagatgtaaaaaagattcctttgatattaaatctacttttttaggaactatagatcacttttgtttacaagaaattatatatccttttatcagtaggctttatggaataagagatagtatcttagaatgtaaaagttatagagatattgaccatatatttaaagtaggattacccgatttaaatgaaaacgaagtagttttaaggactagtgattatagtgcattagaggaaatatttataaatcattataataatggatttattttacttgaagctgtggggattattgcaaataatcttattggaaattctagttcatgcaaaagatatttaaaagctcggtataaaacgttatatattgatgaataccaagattcttctgaggtacaacataaattatttttaaatatttatgagttaggattgaaagctgttgccgtaggagatattaatcaatctatatatgcttggagaggaagtaatccacaatatatacaagaattaatatctaaaagtgatgtatttgagcaccacatagtaaatataaatcataggtgtcatatttcaatttcaaattatgcaaatagattacttgatgaaaattgcaaaataatagattgtgatgatttgagagtttatcagtttcaaatgattggaacacaagttaatgtagctaatgagttaaatacatttattccacagattatggatgttcatagaatagaaaattattcaaatgttgcaatattagtaaaaaacaataaaagcctagaatatttaaaggaaaatattacccttccttataaagtttatgatgatgatattttgcttcttataaatacttcaatatcaaaattactatatgaacttttagtatacagactgaatgaaaatatattgattaatgatgttcttgaatccttaatagggtatgattttagtaataaatctacattgaaaaaagatagagaaaaaatacgagaaattagaatttgtttagatgtaagtttaaaaactaaactaattagtttagtttctcaattattgaatgaaactccaacggatagagaaatagaaattctagatgagattttagcatctgaagaattattaaataaatataatttccaagaagataatgaactacaaattatgacattacataagtcaaaaggattagagtttgaaatagttattcatttggatttgtatgaatttatacttccttttcagcaaataatagatgatgactggaataatccaatatatccaaatttagaacaagacctaaatttgcattatgttggaataactagagctaaaagtgcatgttatttaatttatagcaatagaagattaaaccgtagtaatcagaatagacaaggaaagccatcctattttttatataaaaatggattaaacggtttatttaataatttaaatctcttacaaggataa

SEQ ID NO: 72774 - DNA, 2073 bp, Escherichia coli LF82; identical to SEQ ID NO: 72136

SEQ ID NO: 72775 - DNA, 1734 bp, Escherichia coli LF82; identical to SEQ ID NO: 72137

SEQ ID NO: 72776 - DNA, 1866 bp, Halobacillus halophilus DSM 2266
ttgataagttctttagtaaggttatttggccaaaaaaattcagaaagaacccttattaaaagtgactttcatataccacataacatatcaccagatgatatagaggaaatcaatctatttatcgaagttagaattgagtttcctgaattagttgcagaagatgagtctaaaactgacagtgtgccaccctttttcagacaaatgatagttgataggcctggtggcataccttatatgaggattcgtttagagggaaagtggatacaaggtctaacaccagaaggggatatagaacaggatatatattatattactgtaccagaaggtcaaccggaggaagaggcacaacagccgatccctgtacatcaaagaaatgctattcaattaatatatgtaccagctatgagagatccaatgactcagttaaagaatgcgtcgggtactatactatggaggatactacgaaatattgaatggcctgatacaattaatgaggaaattaaagagaaaatgggtcctgttatggagctgtttagtgaaatacctgacgtgaagagtgttaaagaaacgcttaataaagaatggaatagttaccacaaggatcctagatatagtcatactgatttaatgtttagtagtactgatttgacttcaattcttaaaaaggtagaagtacacttttctccaaatgaggatggaaattcatcaacaatagacagaatgggggatggtttaaggtctttgttctatcttacattagtttcttccttattggaaattgaacagaatatggaaagtgatgtaaaaccagcattaaacattttagcagtagaagagccggaaaatcatgtatctcctcatttacttggtagagtggtaagcaatttatctaacatatcaaataaagagaattcccaagtagttatttcttcacatagcgcttcaattataaagaaaattgatcctgaacagattagacatatgcagatagagaatcataattcaattgttaaaggtattacattacctgataagcaaagtgaatcttttacttatataaaagaagcagtgaaagcatacccggacctttatttctctaaattagtagttttaggtgaaggggatagcgaagaaattgtaatgcctaagctgttaagcgcatatgatatatatcctgatgaaactagtatttctattgttccattaggaggcaggcatgtgaaccatttatggaagttactcaatcagttgtcaatccctcacatcacattattagatttagatagagaaaggtatggagggggatggggtagaataaaatatgcattaaagcagttgattgaaaatggacatgaccctgagcggttacttagtgtaataagaaatggggacccgtacacatacacggttgaacagctagaggagttccatgagagaagtaatgaagaggttgagaatatggagtgttggattagtatattagaatccaagaatgtatttttttcaaatccattagacttagatttttctatgcttaaatcgttcgagcagcaatataaaagcacaatgacctatgggccaagaattcctgacgaaacaaccgatgaatatactgagaaaaaggaatcatcaattcaggccacccttaagagtgagaaagctaagggtgtaacatatacagaagaagagaaaaaattgatgatatggtataattcactgtttttaggtagaggaaaaccaagtactcatattgctgcattgagcaacttaggaaaagatgaatatttagaaaaagcaccttctgagctgaaaagcttagctgaacgagtcaatgagttattggttgaaaatagaggaagcatatga

SEQ ID NO: 72777 - DNA, 1911 bp, Halobacillus halophilus DSM 2266
atgagttttattgttccagaaaattggaagccggcaaacaacatggtacttgaagaggcagcttatcagtcagttaaacatgaggggaatttatcagtggccgctggtcctggagcaggaaaaactgaactattagcccaaaaagcaggtttcttattggaaacaggcatctgtaagccgccccacaaaatattggctattagttttaaagttgacgcagcaaaaaatttagaagatagggtaatcaatcgttatggtaaaagcttagctaaaagatttgaatctagaacttttgattcgttcgctaaaagtttagtggaccagtttttattttcattaccaacagattatcgtccaagtagtgactatgatcttatattaagaccacaagatctaacaaatataataaaggaaaacctaacagaatctaatccgtattttccaaattggtattacgaatttacgccatcagtatttcaaaagaaattggtagaggaactaccaaaagaagtacaagaagatgacctatattcttggttagtgcatcgatcttgggacctattaataaaaggaaagtctaatttaaatagttcccttacattcccaatgatatcattgcttgctgattgtttattaaataataatccgatgcttatcagagctattagagcaacatacactcatgtgtttttagatgaatttcaagatacaacaaaattacagtataccttgctcaaaactttatttgaaggttcccgaaattatattactgcggttggtgatgaaaaacagaggataatgggttgggcaggtgcccttccggatgcttttggtacttttaaaactgattttacttcaaaagaaaaaaggttagtgaaaaatttcagatcagccccaaaattagtacaaatacaaaacgtgttatcccaaaaccttagtcccaacaatgtaaatgttgaagtgtcaggggaatgggatagcatggatggattctgtgaaatttggaattacgaaaatcacattaaggaagcaacatcagtagcaagggcaataaataattggataaatatagacaatttagaaccaagagatttttgtattattgtaaagcaacaagaacatatttattgcaagcaactaatgttatcactcgaagaattaaatattagctctaggttagaaaaggaatttcaagaccttctttcagaagaatgcgtagagttaatgataaactttttaaaattgtcattaccaggttctaaaccaaaggtatggttggatactattgacttcatatccactgttagaggaggagaagaaaaaagcaattatgatgctttatataaccttgaacaaagaacgtcagaatttgtagatcgtttgtctggggaattagaaagaattaaaatacaaaataaccttgaagaggatatacattcacttttacaaaatataatctcttttgtagggtcaaataggctaaaagcatacttccctaagtatagaaagtcaaggtacttagatgaaatagtaaaagataccgcaaataaactttggcaatccctaagcaaacaacgggattgggaacttgcaatcagagactttctgggtgattttagtgttccaattatgacaatccataaaagtaaaggattagagtataatactgtaatcttccttgggcttgaggacggtgccttctggagctttgggtcccaaactgagtccgataagaaagctttttttgttgctttatcaagagctaaggaaagagtaatttttacttttagtaaagcaagagaagtgctccattatagggaattaaagtacttaccacagggccatcaaaatatttcacaattatatgatttgttaagtgaggcaggtgttccgacagtaaattttgattaa

SEQ ID NO: 72778 - DNA, 1905 bp, Pseudomonas aeruginosa NCGM2.S1
atgaagcttcaaacgattcgtctatcgaatttccagtcttttggagtacagcctactgagctcgggctggatgatattacatacctgattggccccaacggctcaggtaagacagctgcgctccaagcgctttgccgcctgtttgctttcgatccatccttgcgccgcatcctgcgatcagactttcacgtccccttcgatgaggagatcgtgccggaagagcgccagctctggatagaggccgatttcctcttcccggagctggcggaagatgaagacaacagcaccgttgctcctcactttggccacatgcggcttgatgaggcggatggaattccgcgtgttcgttttcgcctcagtgccaccatgggcccggatggtgacatagaagagaccttggtttatgtcttggacatcaatgcggatggttcgccgctcaacacagcgcaagtgccccgttctgagcgcaaccatatccatgtccactacctgccagcccgccgtgacccagctgatcacattgcctacggcgccaatgcgttgctcgggcgcatgctgcgtgcggtgaactgggatgcagagcgtgatgttatcaagggtctcactgaccaaatcagcgacagtctggcggccaacccatcggtagatgcattcagcacaagcttgaaagcggcttgggatactttgcacaaaggcagtttctttaccgacccgaaaatcaccttcgtggcctctgaggtcgaagccttgttgaggcatatgtcggtttccttttcgcccgggcacgatgagcagttggttgacttctcacgtctgagtgatggccagaaatccatgctctacctgtccctcgtgctctcgtcacaggccattggtcgcgccgtactggctgaagaggacaaatcattcgatgtcgacaagttgcggccaccagtttttaccttggtggcagtcgaagaaccggagaacagcctttcgccccattacctcgggagaatcgttaattctctgaacttgatgacaggtaatggcgacgcgcaagcgctgattgctactcacgcgccgtcgatgctgcggcgcgttgctcccgaacggatccggtatctgcgtctgaccgaggggcgaacatcgcgcgttacccatatccagttgcccgataccgcggacgaagcacacaagtttgtgcgtgaggctgtgcaagcctttccggaagtctatttctcccgccttgtggttctgggggagggcgatagcgaagaaatcgtgcttcctcgactccttcaggccaaaggtgctcctgttgacgagtcggcagtctcgatagcgccgctgggcgggcgtcacgttaatcacttctggcgattactgtctgccctgaaaattccttacctgacgctgcttgatctggatgtcgcgcgccatcaggccggctggggtcgaatcaaatacgtgaatgatcaattgggtaaatatcggctagatcagcagcttcccaaggattatggcatcccaaagtgggactcgaccgagaatatggttcgggacttcgacaactatcttgaggcgcttgaggatagagatgtgtacttctcgtaccccatggacctcgatttcgcaatgctactcgcctacccggacgcctacggcgtagtgagagaaaagcccgatgagtcaacgatcaaggctgtccttgggaaaagtcaccacgatgcaagtcaatacagcgaggacgaacagaagttgttcggcacatatcaccgcagcttcaagcttggcagcaaaccggcagcgcatattgatgcgctcgccaagctcagtgatgagggcctgctcgcgaacatgcccgaatctctcggacgcttggccgatgccgtgatcgccaaactcgcggagttgcccgagtga

SEQ ID NO: 72779 - DNA, 1677 bp, Pseudomonas aeruginosa NCGM2.S1; identical to SEQ ID NO: 71997

SEQ ID NO: 72780 - DNA, 2049 bp, Gluconobacter frateurii NBRC 101659
atgcatattgagcagattaaaattgaaaatttccgattattgcaggaatgctgcattgatatgcgagaaaaaacgactttgctcgtaggaaagaacaatacgggcaagacatcattcgccgtattgctcgaaaaatttctcgaacgaccggacacgttttcattcaccgatttcccactaagtctgcgcgaagccattttcaaaataaacgctgagacgaacatcgaagaactcgcgataagaatggttcttagaatttcctataccgaggcagatgatctcggaattctatccgagtttatgctggacctcgatccagaaaggcggcacacgagcatcctcctcgagtgcaccattgataagaaaaagcttcttcgtgttcttcccgcagacgaaaaagaacgcaagaagttcatcgaaaataacctctcaggaaaatttctcgacgtaaaagtttatgcatttgacgattacggacatgtcggtgaacaagcgtactacatgtctcaccgtaatcagcttgaggagaaggagcgcaccagccttcgtgccctcctaaatttccaagtcattcacgcccgtcgcaacgttgcaagctcagaggatgccgggcgcggttcaaagccgctttctgccatatcaaccaagttcttccgtaagcgagatattgaggcagatgctgatgaattgagcgaagaggacgccagcgcagataagccgggtgctgggagcatagaaaagcttagatcaattttagctgatatcgacacgcgactgggcgagcagtatgcagaggttttcggtagttttctaaaaaattcgcgcgattttctagacctcggcgacttgaaagtggtctccaacatccagtcgcagtctcttatcgagagttcatcgcaggtcatctatggcgacacagataactttcttccagagcactatagcggtcttggctatctgaatatcctgtatctgctcctgcaaatcgaactttgccgcgacgacttttcaaggcggaatgcgccgttgaaccttctgttgattgaggaacccgaggctcacacgcatccgcagatgcaatatgtgtttgcagacaaaatccatggccttgtatcagccatacctagcctacaggctctcgtaactacgcattcctctcatatcgtatcgaaatctgacttcgaggacattcgttatttatcgagattgtctgccacaggaccggtctctatcaagaatttccacaccgatctcagcaaggaatacgataagcttggtgcagacggaaaagcgcttttcaagtttttgaagcagtatcttaccataaattcggcagagctgttttttgccaataaggcaattttcatcgagggtacaactgaacgcattctcctaccattgtttattgagaggcacgataaagagaacgacgaggcggccgagacaggtggcctgtcttctcagaacatctcggtgctggaggttggtgcgaacgcgcgagcgttcgcaccattccttaagttcatcggtgtccgtactctaatcattacagatatcgacacgaccaaacccatacccaatgaaaagaccggtaaaccgagctatcaagcgcataaagtcgaaggctccacgcacacttcgaatgagactctcaaacacttcctttcggcaccggccattgacaacgtcgaggattaccaaaaatggcacaagcgtctgctgagtggcgaagttgcatccaatgacgggcaaatcaagcttgcctaccaaatggaagagaacgactatcacgcaagaagcttcgaagacgccttcatcgcaaagaactttgagaaaataaaaaataaaaaagatgacttggaaggactcaaaaacgtccaggacatcgagagttttgatgggagcgattattacgctctcaccgaaagaattctaagtaagaaatctgatttcgcgggatcgcttctatatgtagcgttggttgaaggcgaaacctgggaaactcccgaatatataatggatggtctgaaatggattcacagaaattga

SEQ ID NO: 72781 - DNA, 2085 bp, Gluconobacter frateurii NBRC 101659
atggattcacagaaattgaatccggtagatcggattgcgaaactcgttctcgatggtgagaattttatccttcagggcggcgcgggaagcggcaaaaccgagagcctgaaaagagttgtccaaaaagtgctctctgtcgatcagaagctcaaaattgcatgcataacgcatacgaataaagctgccgacgagatggccgagcgtatttcggctgatattaaagtctcaaccatccactcgtttctgggcggaataatctcgccatacaagcgaaacattcagtatgtttttccaactttgttcgagctctccttttttattggcttgggggatgaacactatggcggagacgaaaagcttagaaagtctgaggaacatgggcgttataagaaggcctacgagaaattggagatccgccgccaaacagttcttggcgaattaactccgaaggtaaccgggaagcgggattacgataaggccccggaggcgtgtattgcgcagatgaaccaattgatcggtgagctgaaccaagaaatacgcgccaaactgtcatctcgaaaagccgatgaattcttttacaatgaaacgaaatttgacaacttcaatgaaccatcattcgggcatgacggcttgatcgctattgcctgcaagatgttcgacgagttcccggtattaggcaaaattgtttcggaccggtatgattgtatcttcattgatgagtatcaggatacgaacgcggatgttattcgcgttttgctccgctgcctacccaagccatcaagaacaatcattggcttgtttggagattccgagcaagcaatttactcagacggcatagggaatgctcgagagcacattgatgcgaaggaagtcgttcttgtggagaaggacgacaattaccgttgctcccagcaggtcataaccttcgctaatcaatttcgcacagacggattgaagcaagaggtagctctaaaaacgctcgatgacggaacgattgaaacccctgagagccgcgagggcggcgtaactctgctgtatgatttcgctccagataaagtagacacgggcgatagactacaagatcggaaaactaattccgcgttggttcgtgaagcgctcgatgatctagttggaagggtaagccaagactttccgggctacgtccagttaaaactcacgaacaaatcgattgccaacgatgtgggtttcggacagctctatcagatatttgacgatcggtactcggagcctagagaccgaatgcgcaaaacgctcgatagattgcaatttgatgaaatagtcagtttgacgagattgcatcagagcctgcctggggacaggcgctcatacaatcgcttgatcaccgctcttcgaaagcgcggattttcgatttcctcggtctctgacaaaaccaagctggacgagatgctacgtgcattcacagctagggacctttccgttcacaaggcgttggaatttgcagcgaaagttgggttgatcagaatttcagaaagccacgcagctttcttaatgctccgtgacaagctgttggtacgtcttaagggtgatcccgtattcgaggcttttgaagcgctacatagcagtggctaccgaactaaaccgcagatgctcaaggaaattaacactacgccgaaagagaacctggattccgatttaattgagaccgaatacgacgaccgagtcaacgaactcaagcaaaagacattcttcaccgcattgttttcagacgaacttcgctttgatgaagtattgtcgttctatgactatgaggaaaatgatggcggtttcgccacgatgcataagacgaaagggactgggatagagaacgttctgctcgtaatagacgagtacggatggacgacggaatacgattttgtgaattgttttatggatgaggccccatctacgaaaagggatattgcgtcgcgaaagcttctatacgtggccgcctcccggacgaaaaagaacttggtgtgcgtcagattaatgaatgatcaggcagagatggaccgtatatccccatattttccagatgccattcaagtgaagtcaggattgagttag

SEQ ID NO: 72782 - DNA, 1878 bp, Burkholderia multivorans CF2
gtgaaacttgcccgcctgcgcttgtgcaacttccgatcgttcggttcagatttcgcggagattgaactggacgacatgacatttctgctcggtcccaacgggacaggcaagactgttgttctccaggcgcttgcctgcatgttcagcctagatccaagtcaacgcaaggtcagtcgatccgatttccatattcccgtggatgaagctcccgagaacgcgccggacgagcggaaactttggatcgaggcggactttgagttcccggaattagatgaggatgatgctggagagcatgagctgcctgctgttccgggcaacttcgcccacatgcaattgttagctgaagatgggcccgttcaagtgcgctttcgtctcgaagcaacgattgaccaggacggagacattgaggaaagcttcacgtacgtgaccaaagtcggtgaagatggaagcccgctcgaagaaagccgggtctcaaagcaggatcggaatgcaattcaggtgcactaccttccagcccggcgcgatcctgcagaccatatctcctactctgccaatgcgcttctcgggcgcgctctgcgatcggcagactggagtaccgagcgggagcagatcagcgtattgacgggacaaatcagcgagtcgttgaccggaaacgctgcaatcggaggcatcgcgcaagcgctgacaagtcaatggagcgatctgcacaagggtgcatactacgccagcccatccgtctcgttcgcgcgcaacgaaatcgagaacctcctccggcatctaaccgttcgtttctcgccggggcacggcgaatcgattgttgacttctccagactcagcgacgggcagcaatctcttctctacgtgtctctcgtgcttgcgatgcatagcatcggcagcaaggttctaagcggcgagcttggaaccgctttcgatatcgacaagctgcggcccgccgtattcaccttgattgcaattgaggaacccgagaacagcctatcgccccactaccttgggcgcgtcgtcagggcactgacagcattcgccggggatcagaatgctcaggcactcgtggcgacgcattcgcctgcgctcctgcggcgtgtgcccccggaatcagtacgatacttgcgccttgacgagaaccggaaaacgatcgtcaaacgcatagagcttcccgaagacgagtcggctcaaaagtttgtccgcgaaggcgtgcaggcttttcctgagctctacttttcccgtctggtcgtgctcggcgagggggacagcgaagagatcgtcctgcctcggttactggcagcccgtggcatcctcgtcgatgacgcgtccgtctccgtcgtgcctctaggcggtcggcacgtcaatcatttctggcgtctgctacatggactgggaattccacacgtcaccctgctggacctagatctggcacggtatcaaggcggatgggggcgcatccggtatgcagcgaatcaactcctgaaatacgcagatgtctcaggcaacgatctgacgcaggaggagatcgacggcatccccaaatggaatgacgaccaaggcatccttattgacgacgacgggtggatcgaacggctggagaacttcggggtcttcttctcagcaccgcttgatctcgacttcctgatgatgacgacgtacccggatgcgtacctcatcgaagccggtgatctggagaagccggatgaggagacgatcaagtccgtacttgggaaaaagcatgatgtactgggcggtcaatactcggaggaggagcagagctacttcgacgcgtaccacgcaaaattcaagctcggcagcaagcccacttggcacattcgagcgatgtcgagcatggatgaccaagggaaacgctga

SEQ ID NO: 72783 - DNA, 1662 bp, Burkholderia multivorans CF2
atgatccgcgttgatagatggtcgccgtcggacggcctctcgcttgaaccgaacgcacttacggcggcgaaggagatcggtcgaagtctagccctgacagccggacccggcgcaggaaaaaccgaaatgcttgcgcagcgcgcagacttccttctccgcacggcaacctgtcggtacccgaaacgtatcttggcgatatcattcaaggtcgatgcaagccaaaacttgaaggcacgagtaagaaagcgttgcgggccggaattggcggcacggctcgacagccacacgtttcacgcgttcgcaaagcgaattatcgaccgattcagacccgtcctgacgggaagagatgctctcgattcagactattctatcggccccgtgagagtccaaagacgggccatcacgttcggcgatatggtcccgcttgctgtcacgatagtggaatcaagccaggttgcgcgcaacgcaatcaggcagacatacagtcatgtgtttctcgacgagtttcaggattgtaccgaggtgcaatacagattgatcaaggcatgcttccatggtactcaagcgaaactgacagctgtcggcgataccaagcagcgcatcatgggctgggccggtgcgcttgagggcatatttcatacctacgcgcatgactttgccgcacggccgctcaacctttatcagaactttcgctcaaagccgaggctccgtcgcatgcagaacgcgatggtgcgtgtaatggaccccccggcagcactcaacgacgaggacattgcaggggaagaaggagagattgagatccttcgctttgacgacgatgatcgcgaggcaatctacttggctgacacgtgtagagactggatcgacgaggagggcattgccccctccgaaatagccgtgctcgtcagtaagcaacagaatctgtattgtcaaaaattgcgtactgcgctggaagctcgtggagttccctttcgcgaggaagattccacacaagacctggcgtccgatcctgtggcctgcctgatcatcgacttcctgctcgttgcgagcgggagccgtcaacctgcaccatatggcagactgctcgatcttgtggtgttcaaccatggttttgatgaggaacgcgagtaccaagcgcgttcaagatgggatcgctttgttgctgatgtcagtcaaagaattgcggatggacgaacgaatcttgcggaagaagaccagcttgccggcatcgtcgacgaactcattcgtgtcgtcgggcgcgacgcagtggttgcactatcgcccgattacgcccacggagaccgattgcaacaacagattgaggcagccatcagccgggcgcaccatctgctcagggacagcgacaacgtagcaacggcgcttgcgtcgttctctggtgaccgggctgtgagaatcatgtctattcacaagagcaagggcctagaattcgacactgtggtcgtgctaggcgtcgagcgtgagacgttctggggcgacgaggtggcggagcgctcggcctacttcgtcggtatctcgagggcgaaacgccgactgtttctgactgtttgcgagcgaagggagtgccccgatggggcgagaaactggaggaccggtaggaccgaacacgacgagtttgttggatacgccgaaccctatctgtag

SEQ ID NO: 72784 - DNA, 1671 bp, Acinetobacter baumannii Canada BC-5; identical to SEQ ID NO: 71826

SEQ ID NO: 72785 - DNA, 1782 bp, Acinetobacter baumannii Canada BC-5; identical to SEQ ID NO: 71827

SEQ ID NO: 72786 - DNA, 2310 bp, Stenotrophomonas maltophilia Ab55555
atgccagacgcaggtccagtcattccggtctccggaggcatcacacttcgatttctagaattgtgccagttccgccgcctcggcaaggttcaactggacgtcaacaagaagaccactattctggtcggagcgaacaacagcgggaagacctcggtactcaccgctctccgtcacttccttgcagaaagttcgtcctttggctcttttgacatcagcctctcgcaatggccaacactgcgagctcttggaaaagtatgggaagccctaccggaagaccccttaaccgtgccaggtgacgaggagcagtggaagcagcagcttcaagctcttctctcgaccatgccaacgctggacctttggttcgatgccgaggcgggcatgtaccactacgtcgcaccgttcctttccaagttcagctggaagggtggtgcagtgggtatccggcttcgcttggaaccagcgtcaaccgttgaagagctaaagcaacttgcctggatataccgcacggcgcgcgggcccgtgaaggaaatgggtgctgactcgttggcttggcccatagaccttttggacttttggctccgtgaaccttcgaaactcggccaggttcgtgcatataaactcgatgcagagaacaacccaataaccggcttcaagacctacgccagccaggcgcttgctgaaaatgccagccgcattgatcggaagcatctgtccaaggtcatccgagtcgactttgttgccgctcagcgtgggctgggcagtgaagaggctgagtcacggtcggcatccgggccgcatcgagttggcatgttctccaaccaactcctcaagtttgcccgtcagcacttgaacgtcgccagtacagggcatggtcaccgcgcggacctcgtcaaagcggtggcagaggcgcaaagagaccttgacaagaagattcacgaggccattgccgattcggttgaggaggtgaagcagctaggctatccgggtctgcatgatccccaggaaattcgttttcgcacgcgcatccagacggctgacctgctagaccatggaactgcggtgcagtacagcatgcagaaggagtcgcttgaagaactccttcctgaacactccatcggactcggctaccagaacctccagtccctcagttatcagttggtgtcattcaaagctgctaggctaaagcccgacaaaggatctcctgcgcccgttcaccttgtgatgattgaagagcctgaggcgcaccttcatgtccaagtgcagcgtatctttcccgacaaggcacacaagctcataagcccgacgggagcagacgcctcagcgctcaagagccagttgctgatcagcacccactcgagccatctcgcgcacgctgaggactttgaccgcctccggtatgtacgccgcgttgcaaagagcgcggcaagcccaatgccaaccactgaagtagtcaatctcgggcaggtctttggtgatgacaagaagacacgtcagttcgcagagcgatacttccgtgtccaacacaccgacctgctattcgccaatgcggccatcttcgtggaaggcgttgctgagcgcatgctcatccctcttttcatggagcgagatttcaaggagctgaacagtcgatatgtgtccttccttgatatcggagggagtcatgcccaccgactcaagccactcgtcgagaagctgcggatccctactgtcatcatcaccgacgtcgacccttgcgaggaacaggacggcaagcccaagaagaacggcgagccaaccaagaggctggtcgcggtcgcaaacaccggtcaagctggtctccattgcggcaatccgacgctccgtgggtggcacccaaggcttcagatgctcgatgatttgaagaatccgaccgacgctcagttggtatggggtgaggccgcagcgggcctcgtgcgattcgcttggcagctgccagttgctgaagctaacggcagctggcccagctcctttgaagattccctcgttcttacaaacatgccttggttcaaggcgctcatggaaggcaaagccgatgatgatggcgttgagattgagccaccgactggcgcgcttggatctgtggcaagagccgcggccgaagctggaagcgttgcagagatggtcaaggcactccatacggtaatgcatggctcgctacgaaagggcgagtttgctgcaagcatcttcgagcggctttcttctgatgaaccagttgtctgcccgaagtacatcgccgatgctctggcttggctgcaggcgcagcttgagcccagcaaggaaccgatgacatga

SEQ ID NO: 72787 - DNA, 1974 bp, Stenotrophomonas maltophilia Ab55555
atgagcgcgctagccgtccctggcaacaacgagcgtgatgacggggttgtcgatgaaatctgcggctatctcactgaggagccgcctcgcagctacttcctctttgccggcgcggggtccggaaagacgcgcacattggtcgaggtgctgcgtcgaatgaccggcgttgtggagcatgaaaaaggggggcgactcgcccgacgactgaagatctatggccgttcgatacgcgtggtcacatacacaaagaacgctgtcgcggtcatcaaaggtcgccttggagacaacgacttggtggatgtctccacaattcacgcgttctgttgggaactcattagcggattcaacgacgacatccgagaagccctcgtcgccatcaagcaggctcagctggaaaaggaaactgcagaggcggttgccaagcctagagggatcactgcagcgaagcagcgggacttggatgagataaaggcggacatcgaggcatttcggctgacggatgtgttcatctacaacccggaccgcgagacgcatggtgccggcgcgctcgcccacaaacatgtgctggacgcgacggcgtggctgctgcagcacaagtctacgctgcagaccattctgaaggaccgccaccccatcattcttatcgatgagtctcaagacaccatgaagggtatcttggacgccttgatgagcttcgcggagccaaggggtttcggcctcactctgggactgcttggcgaccatcggcagcgcatatacacggatggtcactcggatcttccgagtctagtcccagtgagctgggcgacgccagagctgaaaatgaatcatcgcagtcaacgtcgaatcgtcacgctcatcaacagaatatgggaggcagagatcgatggcagaacgcagcctgccaacggcgtcgagcagcatccgcgaactgaaaaggccggcggagtggtccgactctttgttggcgacacatcgctctcgccggaggagaaggttgcaagcgagcggtggtgcgcagaccagatgcggcaagccagcggttccgatgcttggagccaaggtcactatcagctgctcgctctagagcacaagcttgtcgcaactcgcggcgggttcctcgacgcgtacagtgcaatggttctgatcgacccaaattcggccgcgcctacgggaagcggcgagaacaaggggcctactgctgtgcaggtgcttttgaatgagcttgcgcagttggaggcctgtgttggccccgatggtgccatagacgagcttatggccaccgaagtccttcgctgcttcggtcgtctcgataacatgccagaacaagcggccgagcgtgctaggcgttccgacgagatgcttcgagccatttccgcctttgctactgcctgtcagaatcctggcgccactgttgaacaagttctcacgccgatactgggcgcgaatctgttcgaggtcgatcatcgacttctagatgcattttccgacaagtctcctgctccacctgctccggccagaggagaggaggagtccaagaaggaccgcatacgtcgggggtggtgtgcgctgttcgacagtccttggagtcagttgcagaagtatcgcacctacctcgctggaaattctgtgcttgccacccaccaggtggtcaaaggctcggagtttgctcacgttatggttgtgatggacgataagctggctggtggcaaccaaatttcatacgacaagatttttggaggggtccagctcagtaaatcggactgggacaatgttgggaaaggaaaggaaacgaccatcgatcgtaccttgcgcctcctatatgtcacctgcagtcgtgctaaggagtcgttggccctcgtcctatggtcctccgccccttcagtcgcgctgaacagagtcactgcgagcgattggttctcggagggtgagtttctagcgattccgtggcccatcacaaagtcgcattcgtga

SEQ ID NO: 72788 - DNA, 2241 bp, Streptococcus agalactiae LMG 14838
atgtatttaaaaagtttatcaataaaaaattatagaaaatatggcgaagaagttcagactattaactttgcccatagtaaatggtcagaaatgtcaggtgctgaagatgaatcggaaaagataaatagaacagaagagtatatatcaaaaagttcatcattaattgtagggaaaaataattctggtaaaagtacaattgttaaattattaaatacactacaaaataccaagtcaggtagtagaaatattttcaagtatacagattttaatctaaaaatgttatcagattggtatcgttttaatattgataataaatctaaagaagatatagaaagtattgataaatctgactttcctaaactagagtttcagttgatattaggaattgatgatgaaaatgatttgatttcaagtttcgaagatatattaattttaggtggtatagaaacagttggaactcatgaaaatcaagaggttgcagaagtaactatcgatgttaaatatgaagttgctgatgttcagtctttcttagaagaacttgttaaaattaaaagtagccctcgagagaagattgaacaatatgatcaaggatatcaaaaagaacttcgataccggaaatttttaagtttatttagtagtaattactttgtattaaatttttatcctataagaagagatgaaccagccaaagaattttctctatcttcattactaaaagtagcgacaattgaggcaaatacggtaaaaaatgacaagacattttcacaagcttataataaaatagtttcaacttatataaaaaataatgatattgtggaaattgatagtttagttggtgatattaattatcaagtaaaggacatggttgataccaatataaaggatattcttcaaagtgcagtatctagcatcgagtcaactaagaatttaaaaatgaatttacatccagatgtaactttagagaagatttttgcaaatagcattatttatgagtaccaagagggaaataataacatacctgaaagccagtttggtatgggatatacaaatttgatggttattattgcaaagattgttgactatattgagttatatagtgagaaggatattaatggttcagtaaacattctctgcattgaagaaccagaatcatttatgcaccctcagatgcaggaattatttataaagaatatttcaaaagcaatagctaccttactaggtaaaaaacagcaactagatacatttcaaattatcataacgactcactcaacacatattttaaatagcaagattcaatcaggaaatactcttaacaatattagttatctaggtcaagtaggtgtaaataatataataaaaaatgtaagtgatgataaaattgcatctggtagagatattgataaaaaagcttatgaatatatcaaaaaatatttaagactagagatcacagatattttctttgctgatgcggttgttttagttgagggagtttctgaagaaacttatcttagatacgaaattgataggcattccattttgaaaaatcatcatgttaaagtttataggattgatggtgcatatgcacaccagtttattagtttgttagatttgttaggagtcagaactgttatttttacagatttagatttaaaaagatcggaatctgaaaagaaagttgatataaaggataatgctgaacctgatgttattccatctaatattcctgatttagaagaaaaatatggaggtgtagcaagttctttgactaccaatggaactatacagtattttgtaaaaaaattgttgaatgatgacaaagccaaatacgataaaataaatagtaagataattgaaatactgactgataaagaagaattggttgttgagtataataatatttccatgtattctcaaggtaaaataaataaatattatgctactagctttgaggaagcgattgttttaacgaatgcaggaaacgaagatgaaaataaatacaagaaatccttgattaaagcactacaatatgtccatcctaatatgaggtattttggtgatattgatgaaacatcagaaatagccgataaatcttatatgtatcaagttaaattatctgatgggaaatcaaaattttctactgggattgtatatttatcgataaccgataaagagtttagtctcaagcgacctcaatatgttgaatcaggtttgaatttactttgtggttattttgaggagtaa

SEQ ID NO: 72789 - DNA, 2019 bp, Streptococcus agalactiae LMG 14838
atgacatatacaattagtacagagaataaacaattagagttagacattcagaaagatattaatgagtgtttagataactttgagagcttttgttttgatgccggtgctggtgcagggaaaacctatgcattacaaaagtcaattgaacatattttgaagacggagggagaaaatttaaaattacgaaatcaaaaaatcttatgtatcacttacactaatgctgctaaagatgagattcttagtcggattggtaaaaattctgcaatactggcctctacaatccatgaatttctatgggggtttatttctattcagcaagagttactgactatagaacatgagaaaaaaattaaagaggaacttaacggaattgaacaaaagataattgataatcctctttttggcagtgttaatctggttgatttccataatgcgattagtgatgaagaatttctgaaagtattctatagtacaccaattagtcctgcaggagattttaaatctatgattaaagggtacagtgaatactttagcccctatctaagtaatgttaataagtttagcagtttagttaagaatgttgataagaagtacaaacttgaagaaacattgaaagaaattaagaataagaaatctaaaaaaatcatctataatcctattcgaaaccgtgataaacttgaaaattatgtcattagccatgatacgttattgctttactgtaggaatatcattacgagtcagaatttattaaagagattgttttcagatagatatccatatgtcttagttgatgagtatcaggatacggatgaaaaagttgtcgatataatagatagtattagaaaatttacaatttgtaaaaaaaactttgtggtaggtttttttggtgatactctacaaaatatttatagttccggagtgggaaaacttccaaataaagaagaatataagagtataactaaaatttttaatcgtagatcgtcgaaccaaattgtagagttgattgaaaagattagaaatgataattttggtcaacaatctatatatactgattttgataacggatcctataatttttatatagctgatgacgattttgacttagatatttttttacaggaaaaaaacttagttagtaatactgcttgccttttaatgaagaatgatgatattgctagggtacgcggattcgatgtattattagcaattataaaaaaatttcctagatttggtggcaataactttgataatgtgaataatgaatttttgcagaaaaatttgcagcatatgggatggtttttaagagagattcttactttcatagactttattcaaaagtcatcagattataactcaactgttaaggaaattgttcagtttataggaccgtctaaatcaacaataacattcggagagatgaaacagtttattagtagtttgagaggaattaacttgtcaacattgacaattgatgaatgtattaataaaattgctaatatccaagaacgaatatcaggtgaagatattttaagaaaaatattctcgatagatgatattactgaaaatattttattgaacattaaaaatcgtgcctatgattatttttactatttgcaggattcggaggagtattccgaaagagaaatgatagttattgataatttttttaggttagatgttactcaatttatcaagtggtataaatatatttttgatgacttaaaaaatgaggaaattagttattatacattgcatggttcaaagggattagaatttgataatgtagttgttgtattacaagataactttgctgggaagagaaattattgtaaatatttttttgaaaattataataatttaactgattctgatttacaatttcaagaagttcgcaatcttctttatgtagcatgttcaagagcaaaaataaaactttgtgtaatctacatttctgatacactggaagatgcgttaaagaatattgaaagtatttttggtgagattcaatatttagcataa

SEQ ID NO: 72790 - DNA, 2070 bp, Streptococcus agalactiae LMG 14838
atgaagttaacaaaagtaattattaataattttagatcattcggtgaaagtcaaattattgaattaaacaatcaaacggtactgattgggaataatagttcgggaaaaacaactgtattacaagcattgagtaagctgttttcggacaaacaaaatgatagaataattcggaaaagtgattttcatttaccaaagggattaagacctggagaaaatagtaggaccctttttatagaaactatttttgagtttgatgaactggatggaactgcttacagtccagccattccatcatttttcgaacactttacagtttctcaaggtgatgcaaaaccttttctacgaatcagattagaatcttcctgggaagatgatggaacagttgaaggaagtattgatactcaaatttattatatttcatctcccgaagatattattaaagatgaagataagcaccgtgctcctagaaaggatttggataaaattagggtactctatgtacccgcttcaagaacgcctgagaaggagttgggaaatgcttcaggtagtatgttaagtaggctggtaaatagtataaattggaccgacgatgagataaaagaaattacaaacaaaattgatgagttgaataatacttttttatctgaaagcggagcattaacccaaatcaaccaagaaatccagaaatcgtggaaactatatcatgaagacaaccgtttttctcaggcagagttgactattaattcttctgagatggtgggagcccttagacaaattgctttaaaattttcaccgacaaccacagaagaagcgtttacagtttcagatttaggagatgggctgagatctattttttatttttcacttgttgattcaatacttgatattgagttagaaattaccaaagaccgtgaagaaaatcctgataatccaagatttaagttgattccaccagtactaactatcttagcaatagaagaaccagaaactcatattgctccacatcacattggaaaactgataaaaaggtttaagcaattaggcaataatgacaactctcaagtaattttaacgtcacattctccagctattgtaaaaagaattgacccagaagatttgaggtatttaagaatagaaaataatgacagagttcttcaaaccattgtttctgatatacagctacctcaagctatagatgcatcttataaatatattaagggagcaattcaagcttatcctgaactatattttgcgaagttagtagttctaggtgaaggcgacagtgaggaactgctattaccaaagttttttgatttacttgggaaagaggtagatagctctcagatttcaattgtccctttagggggcagacatgtcaactatttttggaaattattgaatgctctcagaattccttatattaccttgttggattttgataatgagagatacggaggcggttggggaaggataaaatatatttctcaacatctgtatgagctgaacacagagtttcaagaatggttcaatactcagggacttgattttaatgaaattggggcacgagagtgtgaatcgatggaagataaacgtctgattaattggtttaataagctcgaagaatttaatgtctatttttcgtcgcctcttgatattgatttcttgatgctacaacattataaggaacattatctggatatgttatcttcgaaagaaggaccagtcgtttcatatgctgattcaggtgggaataataaaaaagtaaaattaactgatttggattgtattgataaattgcagttagaaggtctcgaaaaacgtatagaagaagcaaagatagctactttaaaggataagagtggaccgggggatagttttactagggaagagaaagaattaatgatttggtatcaatatttctttttaggtagaggaaagccaacaactcatatgcaatttttatcatctattagtgatgatgaattaacaagaaatctaccccctgtatttgaaaaaatagttaaccgtgctgaagaattacttggagatattgaacatggtaaagagtga

SEQ ID NO: 72791 - DNA, 1818 bp, Streptococcus agalactiae LMG 14838
atggtaaagagtgaggagtggtttcctaaaggagatataattttagaagagactgcattaggagccgtcaaagatgtgactaactgtttagtcattgctggaccaggtgcggggaaaactgaattactagctcaaaagttagactatctattctctacaaataaatgcgtttctccgaaaaaaattctagcattaagtttcaaaacggatgctgcatcaaatttgaaagaaagagttaagaaacgttatggtgatgaatatgcttctcgttttacctcattaacctattcggcttttgaaaagagaattttagaccaatttagagatgttctacctgaggatatacgaccatcaagagattatttgattgaagattgggatactataaaagaactactctctatgaatggaattaatgttaatggatggagaatgtcagatataagaaattttgtcgaaaatattatacttaatgacgggaatactcacaaattaaaaaaggatttactaaaaggaacacaagataataagccggtcctcttgtataggcaaataacaaagttgagtactcaaataatagctactaacgaatacatccgtaaagcacttcaaatgacatacgattttgtatttctagatgaatttcaggatactacatatgcccagtataatttattaaaaacttgttttttaggttcgtcttgtaaattaacagcagttggagataataagcaagccattatgagatgggcaggtgcaaagcctgatatttttccagactatattcgagactttaattcaaatgaatatcaatttttgatgaatcaccgctctgtacctaaacttgtagaatttcaaaaagaggttcatcagatattaaatagtaatcacagttctattcagacaaataattatccagaatttcaagagggtgaaataacattatttgaatttgaaaatgaaagtttagaagctgagttaattgcaaatgatatagaatcaaaaattcaaggaggtatacgaccatcagaaatttgtatcctagcaaaacagaaggttgatgattatagttcaaaattgataactacattaagcagtaaagggattaaagcaagaattgaaaatgaatatcaagagcttttaaaagaccttacttgtaacctattattagatttaatatcatgcagtcaaggaaaacgagatcctttaatttgggaaaatattagtaatttttatggaaatatcaatggaatagatgagtttactgatgaattaattttagcaaaatcctataaggagattgacaatatagttagtgatattacttacctaatttcaaattttattcccaatgaagaaagtatgctaaatttaattgagtgtattattgaaaaaatagatgaaaaaagaattatttccaacttttcaacatacaatggaaaaagtgacctatatatcattgtcaagaacttttcaaagttattgtacaaagaatattctcaaacacaaggtgaatggctagatatagtatctagtttcaagggtgaaaactcaattccaattatgactatccataagagtaaaggattagaatatgaggcagtctattttctaggcttggaggattctgcattctggaattttaataatcaacctgaagaagataagagtgccttctttgtcgcactttcaagagcaaaaagtgacctaatctttacatactgtagattgagaaataataggtcgcaaaacaaaagaaatattaatgaaatatattcattactgattcaatctagtttagttgatgttgttaattaa

SEQ ID NO: 72792 - DNA, 1755 bp, Streptococcus agalactiae GB00984
atggaatttaaaaagttagtaattgaaaactttcgtaattttagttctattgaaattgacttatcaaataaaaatgtgatattcgggatgaacgattcgggaaaaacaaatcttttatttgcaataagatatttgttagatagaagtatcagaaataaaggttttattaaatcagattatcataaacatgatattagtaaacctataaaaatacagcttgaaattgatttgtctgatagggaagaggatgatgaagagtcactaaagtcttcacattcacgtttattaatttcaacagttgctggagcaagaaaaaatgcaagtttagatacattcctcatttccttggaggcgatgtatgatgagaaagagttgtttggaaatccggtattaagttggggctctactttagatgatttagtggaagtacctcaatacggtacaaggagtgatattgataagattttccaaatagtctatgtaaatcctgcgatagagttggatgcattttttaagcgaaatagaaaattattgttctcagatgatactaaaactgatgaagatgtagcacttgagaaagagattgagagtagcattattgatttaaatacaaatatttctaatctaagtttaattactagtgttcagtcacaactgacagatgcctataaaagctatcgtaaagaagatttagagataaaaatccaatcagaaatttcaatttcgggttatttggataatcttactccgtatataaattggaatggagacactcaaaattatccaacatctggggatggacgaaaaaaacttttatcatatgctattaatcatctgatttcagaaaaacagtacagtagtaaagtgataatttatctaatagaggaaccagagaatagtctgcacagatcagtacaagtatcactttctaaacagcttttcattcagaatatatacgaatacttcttcttaacaactcattcagcagaagtgctttatgaaatgaataatactcagctcataaagataactaatcaacaggaagcaacaggacattcttcatactacaaggtcccaagtgagttttcaaatttaaagaaaaaattaaatatttcattagcgcagtctatcttctatgatagagttcttttggttgaaggtccgtcagaatactacttattttcttctatttttgaatatattagccctgattttgaagcagaaggaaaatacttgttacaagttaatggtataaattttaaaccttatgcaaagctgtatagagaattaggtatagaattttttgtgaagacagataatgatttaaaggctagcagaggtgataaacatgaattttctccgatagggttcaatcgatgtattgagattcttgatgacaatatcgttgctaaattaaataattatcgtatagatttctcttcaaaggaagaaagaaatcagaatataaaagctaaaaaggaagaactgtatactatggaatattctttagtatctcaattgaattcaaagagactatatatatcagagattgatttagaaaacgatttagctaaggtactgtccgaaagtgagagaaatggaatgaatgtatcagattttgtgaattggttacaaagtagtaagcagtataatatgttggaatatattgagggggaccttactccagaaattgcacacaaaattgtgaaatcagagtattttaaagttttagcggagtttttagactatgagtga

SEQ ID NO: 72793 - DNA, 1542 bp, Streptococcus agalactiae GB00984
atgagtgatattgctacacgagatgaaactatcaaaaaagagttattagagtatcaaggaaacattctaattttagctaacgcaggttcgggaaaaacaacttttttagctgaaaagctaaaaagcgattctaaaaaactagataattatcaaaaactagcagcgataactttcactcggaacgcaactgaagaaataaaacagaaattagttgaaattccagaaaatgttgttgtatctactattgattcatttttagataatgagattattctccctttccttgatcaaaggtataaagttgcaacgtcgttacagtttagttttcagcaaaaatacaagtttaataatttcgacattggactaagtcaaataatgcaaaatggtatttttgctacttatgataatccgaccgctcggcaaggtaagaattttaaatgtgaagttgctttagatatactaaaaaatattgtgtctgcatcagagtatctaaagtataaattcaattcactttatatcgatgagtttcaggattgtgatcaatctatgaatgatttattcatgtatttaaaagatgaactgggaattcgattatttattgtaggagatgataaacaatcaatttatcaatggagaggggcttcgcctagatatattaaaaatttatgggaaaacgaaaatgatttaaaaaaagagaggtttattggtaattttaggagtttacctaaaattgtagatttttcattagctctaactccagaagtaaaaattgattctattaatgaaacaggttctattttatatatagagactaagcaatttgctttaaaagaagatgttatcagatctctggtagataatggtgatataaatttagatgaaaaaaattattttttaattggaaacaatcaacatattgaagaaactgtaacacaattaggtggaatattcccaaatgaatttgattatgtcagaaaaaatccttttatagagtgtaccaatggtcgttttttacaatctttagctcaatattattttcttgaaagtttttctgagtatgatgtgttgaacaatctttttcctgattataatgacgattttaggaaaggattattaaaaaaattgaaaatcttgcgtcaaaatcctgagcgattacttatcgaagatatagcgtcatatctaggtgtacccattacacaatttggtgataaattagaaagtcaaatattacttgaagttttaattgatgtagagaatagaatcttatttgatactagttcattgaaaaataacttattaatgacaacacataattcaaagggactagctgcagatacggtgataatttttgttgaatatttgattgacagatataaaaatacattaaagttcgaggaccattatgttgcaatcactagagcaaaatcaaaaataattcttattgataacaagacaaactatgttagcgaaataaatagattattatgcaacaataatggtaatttttcatttgataatttcatagaaagaaggaatttatga

SEQ ID NO: 72794 - DNA, 2070 bp, Streptococcus agalactiae LMG 14608
atgaaattaacaaaagtaattattaataattttagatcattcggtgatagtcaagttattggatttaacgatcaaactgtactgattggaaataatagttcgggaaaaacaactgtattacaagcattgagtaagctgttttcggataaacaaaatgatagaataattcggaaaagtgattttcatttaccaaagggattaagacctggagaaaatagtaggaccctttttatagaaactatttttgagtttgatgaactggatggaactgcttacagtccagccattccatcatttttcgaacactttacagtttctcaaggtgatgcaaaaccttttctacgaatcagattagaatcttcctgggaagatgatggaacagttgaaggaagtattgatactcaaatctattatatttcatctgccgaagatattattaaagatgaagataagcaccgtgctcatagaaaggatttggataaaattagggtactttatgtacccgcttcaagaacgcctgagaaggagttgggaaatgcttcaggtagtatgctaagtaggttggtaaatagtataaattggaccgacgatgagataaaagaaattacaaacaaaattgatgagttgaataatacctttttatctgaaagcggagcattaacccaaatcaaccaagaaatccagaaatcgtggaaactatatcatgaagacaaccgtttttctcaagcagagttgactattaattcttctgagatggcgggagcccttagacaaattgctttaaaattttcaccgacaaccacagaggaagcgtttacagtttcagatttaggagatgggctgagatctattttttatttttcacttgttgattcgatacttgatattgagttaaaaattattaaagaccgtgaagaaaatcctgataatccaagatttaaattgataccaccaatactaaccatcttagcaatagaagagccggaaaatcatattgcaccacatcatattggtaaactggtgaaacgatttaaacagttgagtaataatgacaactctcaagtagttttaacttcacactctccagctattgtaaaaagaattgagccagaagatttgagatatttaagaattgaaaataatgatagagtgcttcaaactattgtttctggtatacagctacctcaagccattgatgaatcttataaatacattaagggagcaattcaagcttatccggaactatattttgcgaagttagtagtactaggtgaaggtgacagtgaggaactgttattaccaaagttttttgatttacttggaaaagagattgatagctctcagatttcaattgtccctctagggggcagacatgttaactatttttggaaattattgaattcactcaaaattccttacattaccttattggattttgataatgaaagatacgggggtggctggggaagaataaaatatatttctcaacatctgtatgagctgaacacagagtttcaagaatggttcaatactcagggacttgattttaatgaaattggggcacgagagtgtgaatcgatggaagataaacgtctgattaattggttttataagctcgaagaatttaatgtctatttttcgtcgcctcttgatattgatttcttgatgctacaacattataaggaacattatctggatatgttatcttcgaaagaaggaccagtcgtttcatatgctgattcaggtgggaatagtaaaaaagtaaaattaactgatttggattgtattgataaattgcagttagaagggctcgaaaaacgtatagaagaagcaaagatagctactttaaaggataagagtggaccgggggatagttttactagtaaagagaaagaattaatgatttggtatcaatatttctttttaggtagaggaaagccaacaactcatatgcaatttttatcatctattagtgatgatgaattaaagagaaacctacctcatgtgtttgaaaaaatggttagacgtgcggaagaattacttggagatattgactatggtgaagagtga

SEQ ID NO: 72795 - DNA, 1815 bp, Streptococcus agalactiae LMG 14608
atggtgaagagtgacgattggtttcctaaaggagtcattaaattagaggatgctgctttagaagtagttaaagatgttactaactgtttagtcattgctggaccaggtgctggaaaaactgaattactggctcaaaagttagactatcttttttctacaaataaatgtatttctccaaaaaagattttagctttaagttttaaaacagatgctgctgcaaatttgaaagatagagttaaaaaacgttatggtgatgaatatgcttctcgatttacgtctctaacttattcggcatttgaaaagaagattttagaccaatttagaaatgttcttcctgaggagataagaccatcgaaggactatttgattgaggaaatggaagtcataaaagaggttcttgatagaaatggattaagtactactggaatgtggaagaatagcattaaggaaattgcagaaagaattgccttgagtgagaatgattccactataaaaaatgatctgttaaagggtactcagagtaataagccggtccttttgtataggcaaataacaaagttgagtactcaaataatagctactaacgaatacatccgtgaagcacttcaaatgacatacgattttgtatttctagatgaatttcaggatactacatatgcccagtataatttattaaaaacttgttttttaggttcgtcttgtaaattaacagcagttggagataataagcaagccattatgagatgggcaggtgcaaagcctgatatttttccagactatattcgagactttaattcaaatgaatatcaattgtcgatgaatcaccgctctgtacctaaacttgtagaatttcaaaaagaggttcatcagatattaaatagtaatcacagttctattcagacaaataattacccagaatttcaagagggtgaaataacattatttgaatttgaaaatgaaagtatagaagctgagtcaattgcagatgatatcaaatcaaaaattcaaggaggtatacgaccatcagaaatttgtatcctagcaaaacagaagatttatgattatagttcaaaattgatagctatattaagtagcaaaggaattaaagcaagaattgaaaatgaatatcaagagctcttaaaagaccctacttgtaacctattgttagatttaatatcatgtagtcaaggaaaacgggatcctttaatttgggaaaatattagtcatttctatggaaatatcaatggaatcgatgagtttactgatgaattatctttggcaaaatcatataaggagattgatgatgtgattagtgatatcgcttccctaatttcaaattttattcccgataaagacagcatgctaaatttaattgagtatattattgaaaatataggtgatgaaagaattatttcaaacttttcaatatacaatgggaaaagtgacctaactaccattgtcaagaacttttcaaaattattatatatagagtactcccagtcacctggtttatggatagaaatagtatctaatttcaagggggagaactcaattccaatcatgactattcataagagtaaaggattagaatatgaggcagtttactttctaggcttggaggattctgcgttctggaatttcaataatcaaccagaagaagataaaagtgcgttcttcgttgcactttcacgagcaaaaagtcacctaattttcacatactgtaaattgagaaataatagggcacaaaacaatagaaatattaatgagatatattcattgctaacccagtctaacctagtaaaggttgttaattaa

SEQ ID NO: 72796 - DNA, 2070 bp, Streptococcus agalactiae LMG 14609; identical to SEQ ID NO: 72790

SEQ ID NO: 72797 - DNA, 1818 bp, Streptococcus agalactiae LMG 14609; identical to SEQ ID NO: 72791

SEQ ID NO: 72798 - DNA, 1755 bp, Streptococcus agalactiae MRI Z1-213; identical to SEQ ID NO: 72440

SEQ ID NO: 72799 - DNA, 1266 bp, Streptococcus agalactiae MRI Z1-213
atgagtgatattgctacacgagatgaaactatcaaaaaagagttattagagtatcaaggaaacattctaattttagctaacgcaggttcgggaaaaacaacttttttagctgaaaagctaaaaagcgattctaaaaaactagataattatcaaaaactagcagcgataactttcactcggaacgcaactgaagaaataaaacagaaattagttgaaattccagaaaatgttgttgtatctactattgattcatttttagataatgagattattctccctttccttgatcaaaggtataaagttgcaacgtcgttacagtttagttttcagcaagaatacaagtttaataatttcgacattggactaagtcaaataatgcaaaatggtatttttgctacttatgataatccgaccgctcggcaaggtaagaattttaaatgtgaagttgctttagatatactaaaaaatattgtgtctgcatcagagtatctaaagtataaattcaattcactttatatcgatgagtttcaggattgtgatcaatctatgaatgatttattcatgtatttaaaagatgaactgggaattcgattatttattgtaggagatgataaacaatcaatttatcaatggagaggggcttcgcctagatatattaaaaatttatgggaaaacgaaaatgatttaaaaaaagagaggtttattggtaattttaggagtttacctaaaattgtagatttttcattagctctaactccagaagtaaaaattgattctattaatgaaacaggttctattttatatatagagactaagcaatttgctttaaaagaagatgttatcagatctctggtagataatggtgatataattttagatgaaaaaaattattttttaattggaaacaatcaacatattgaagaaactgtaacacaattaggtggaatattcccaaatgaatttgattatgtcagaaaaaatccttttatagagtgtaccaatggtcgttttttacaatctttagctcaatattattttcttgaaagtttttctgagtatgatgtgttgaacaatctttttcctgattataatgacgattttaggaaaggattattaaaaaaattgaaaatcttgcgtcaaaatcctgagcgattacttatcgaagatatagcgtcatatctaggtgtacccattacacaatttggtgataaattagaaagtcaaatattacttgaagttttaattgatgtagagaatagaaggtag

SEQ ID NO: 72800 - DNA, 1755 bp, Streptococcus agalactiae MRI Z1-214; identical to SEQ ID NO: 72440

SEQ ID NO: 72801 - DNA, 1266 bp, Streptococcus agalactiae MRI Z1-214; identical to SEQ ID NO: 72799

SEQ ID NO: 72802 - DNA, 1755 bp, Streptococcus agalactiae MRI Z1-216; identical to SEQ ID NO: 72440

SEQ ID NO: 72803 - DNA, 1266 bp, Streptococcus agalactiae MRI Z1-216; identical to SEQ ID NO: 72799

SEQ ID NO: 72804 - DNA, 2241 bp, Streptococcus agalactiae FSL F2-343; identical to SEQ ID NO: 72338

SEQ ID NO: 72805 - DNA, 2019 bp, Streptococcus agalactiae FSL F2-343; identical to SEQ ID NO: 72339

SEQ ID NO: 72806 - DNA, 2190 bp, Streptococcus agalactiae BSU108; identical to SEQ ID NO: 71982

SEQ ID NO: 72807 - DNA, 1794 bp, Streptococcus agalactiae BSU108; identical to SEQ ID NO: 71697

SEQ ID NO: 72808 - DNA, 1758 bp, Bacillus cereus VD200
atgaagcttaaaagtttgaaagttgaaaatttcaggaatttcgaagatgttgaaattaatctaacaaatcaaaatgttatatttggtatgaacgatgttggtaaaactaaccttatgtatgcactcaggtttttattggacagagaaatacgtaaaaatggttttaaagaaacagattactttaaaaatgatactagtaaggtaataactataaccttaggtgttgaaatagcagaccgagatactaatgatgattcgaagcatattattgcgaaagtaggtggagcgagatcggggacaggaagtgaattagatgtttttttctttcaaataaagggtgcttatgatgaaagtgaaaatattggagtaccgaaaatttattggggaaataaacttgatgaattagaagaattggcgcaaagtggtatctttagtcctttagacagcttgtttaaaatagtttatctagatccaacgattgatttagataaaaccttttcaaaaaatagaaaacagttatttgatcaaacaaagttagatgaatctgatatagctatctctaacgaaatcaagagtttagggatgcagctaaatgataagattagtagtatggaagtcattcaatcttttcaaacgactattaccaaggaatataaaaagctgaaaaaggaagatatctctattgaaatgaaatcggagttgtcgattaatagatattttgggaatttgattccttatataaagagagataatgatgaaaatatttatcctacttcgggagatggaagaaaaaaaatcttagcatattctatctttaaccatcttattcaagagcaggaaggtaataaaatcattatctatttaattgaagaacctgagaatagtttacataggtcgatgcaaattgctttatcaaaacaattgtttgaatctgaagtttatacttatttctttttatcaactcattcaccagagttattatacgaaatggataatgcttcacttatacgcatttattctaaaaataaaaccaactgtgaatcgtacatctatcatgtagaggataactataagaacgtaaaaaaagaattaaatagatctctagctaccgcattatttgcagataaagtacttttagtagaagggccatctgaaaaagtattatttgaaaaaattctagaagaagttcatcctacttacgaattagatggggggtatttgttggaagttaatggtataaattttgaaccatatgtaaaagtattaaaaggattaaatataacgcctattgtaaaaacggacaatgatttaaaggctaaaaaaggacaacctaaaaattttgatttaattggtattaataggtgtataaaacttattaatgggacccctaaagaaagtgttgagatagattattttgttattaatgataaaggaaaggaagtagaaaacgttaagttgaaaagggagctaatttttgctgaaaaaaaccggatttttaaggaaaatgcaaaagaaatacaaaacttaaaagagaataatatctttttatccaaaattgatttagaacatgatctttatgatgttattggagagcggttagaggaaattcttgggaaatcaccgattaaataccttcaaaatcataagttattaaatatgattgaattgacacaagaactgaatagcaaagattgcaaagctattattaatcatgagttatttaaggcattaagagagttggtgtcagatgttagttga

SEQ ID NO: 72809 - DNA, 1569 bp, Bacillus cereus VD200
atgttagttgatcaaaagcagcgagatgatattttagaggataatgatagcattgtggtttcagcaagtgctgggtctggaaaaactactataatggtcaaaaagatgggaattgaaatggaaaaaatcaaagaccatagaacgatagcagccgtcacttttactgtgaaagctacaggagagataaaaaagaaggctggaaaccaaattaaaaacccttttgtagttatgacaaatgattcgtttattgagaatgaaattataagaccttttattattgatgcatacggtaaggattacagaaaggattactccgtcgagtatggaagtcgctataaattcgaggactttgcaacgggattagaacagttaaaatcagataacattttaggtagttttgaggacaataaacgtaactttaactttagacttgcttttaatattcttgaaaaatctatagctgcgcaagaatatatgaaatcgaagtatgtaacaatctttattgatgaatatcaggattctgattatgatatgcatcgcttctttatgaaattaaaaaatgatttgaatatcaaactatttattgtgggtgactcaaaacaagccatttacttatggcgaggggcgatgagtaatatctttgatctattgaaagaagaaagtttcaactactatgaacttgtaactaattttcgttgtgataaagaaatagagaattatgctaatctttttcataatccgaaatattttaccgctccaaacaaagtcgtagaaaatgtagtttttaaagagtacaattcttttaatagtttctatgagagaaataattttagtgggtttggagatgtatttaatgccttaattaaagataacgtaatagatcttaataaagaaataactattattgcaaattttaataaggatgcaattaaaataacagatttattgaatgcagcaggatataattttgtatttatccctaaaactcctatcgatgaaggattacctaacggttatttattaaaagaactggcgttatatactaagaattcaacttattctatttatgactttatagaaagaacagatattgatgaaagaaagcaaactagaattgagatcaatactataataagttgtttaaagaaggctgaatatataatacctgaaaagatatcaatagtaataaaaaaattaggggactacttaggaatattatttacagaagaggaagttataaaattctgtgaaagtatgtgtaatagcgactatgatatggcttttcgactaacagaagagaaatataaagtaatgactgtgtttgcttcaaaaggattagaatttgaacaagtactaagttttgctcgatattataaaatatatatagaggaaaatgtacaaaatcattatgtgtgtgtgacaagagcaaaaagtaagtttttgatgtttattgacaatgaagattactatagtcatgtagtagatgtaataaatgcaaatggtataacaggtattgcctacttgactaaaattgaagaaaataaggacaaccttcagcattctaattaa

SEQ ID NO: 72810 - DNA, 2244 bp, Bacillus cereus VD166
atgataagtattgaaaaaattattataaaaaactatcgaaaattttataatgattctattacattagatcggaaaattactgcgatagcaggtgcaaataattctgggaaaacatctctggtagagctaatgtcaaatctttttataaaagagaaaaaagattcaataaaaattgaggatatgagtagtaaatctcgtttagaagatgaaagaatgataacagaaatattaaaagatgcaaatttggattatgaaaaaaaaatagagaaacttcgaaaagtacataaagatcttaataaaataatgattggtttagtaatacaatatgaggatagcgataatatagaaagtttctcaagctatctagcagatgttgatattaacaaaagaaacttttattttaaaattgaatatgaatataaatctattaaagaagaggatattatagaaattttagatcgagggagggattttaaagaggtttattccctattagaatctaaaatttattactgtgatgaaaattttgagaatgaaataaggattaaagagaaagctgagttttttaacttatttaattatcattgtgtttatgctattagaaaattatctgatacatcagatgaaaagcaaaattttcttagtaaacatttgcttaaaacagttcgaaacaatgtgaattggaaagaaaatttgaataccttaatagaaggtatcaataatatattagatcagcaaaatttatcaactaggattgatgcaataacgctaaagcatataaagacaacgttagataatttttcaaaaacgaatggaggtaatactgggaaattaggtgtagatttcaaattagaaaatcgagatatagagaaagtattattagactttatacatatttattttgaacaagatgaaggtataaaaataaaagaacaaaagcagggtctaggttatagtaatttaatatatttattattagaaggtcaaatttttagtgacaaaatagatgaaagaaaaattaatttattaatatttgaagagccagaagcacaccttcatcctcaaatggaaaatatctttatcagatatataagtgcaattaaaaagacaaaggaaatagagcataaggaaaatgatctagaagagaaattaaaggaagaagatgtacaaaaagaattagaagatgtagtaaaagaattagaaaatgtggctaaagaaggtgcagtaaaggaaattgtagaaacagttaatcaagttgcagcgggtgaagtaggagaagttattataaatgcaatgacggaaaatcaggatgttccatttcaaatgttaattacaactcactcaagtgagatgacaaaaacgataggcttgagtaatatacgtgttttaaggtcaaatgggcatacccaatcaaaagtatacgatttaaatgattttatgacgcaacatgcaactgataggaacttttatgagaaattctttcaatttaatatggtggaaatggtatttgcagataaattaattttatttgaaggcgatgctgaaagattgttatttaagtatctcatttcaaatatgctgaaatatgaaaaactttcttcacaatatatatcttatattcaagtagggggagcatatgctcataagtatttggatttaataaactttttagaaatcaaatcattgatttttactgatatagattatgaatacaagaaagaagatgttgaaattaatgcagatgtaattaaagaaagaattatgaagcgagtaagttcaaatgaaacaattaaaacaatggtaagacgatcgaatatttctaaaatattgaaagaaagcaggttgaagaaggggttgtttttgaataataaaaatatttgcttgaagttccaaactgatgtggacggatatgcacgtactttggaagatgcgttactttataaattaatccaatttaaaaataatacagagaaagatatggatgtcctagaaaacaaactttcttataagaagttgaatattgagactgtattttcccacattacaaagaagaatttcaaattatttatagaggagaataaattattattatcaaatactacaaaaaataaaacttctttaagagatagaattgataaattaaaaaataaaactgattttatgtatgcactaatagaatcagggaatataaacgattcgatacctgcatatgttgaggaggggttagattggcttcaggattaa

SEQ ID NO: 72811 - DNA, 1947 bp, Bacillus cereus VD166
ttggcttcaggattaaacctatcccaacagtttactctaattaatgcaccagctggtagtgggaaaactacagcagtatctaatactgttagaaagcttttaagacaatcaaataaaaaagttttatgtattacttacacaaatagggcagctgaacaattaagagagaaaatagatagtgagcgcgttgaaattggaaccatacattcatttattggaaattttatggttcctttttttagaataaaatctgtaatagaatattttgtgcaattttattgtagtgagataaaaaaaattatagagggtaaagacgaaaggtcattaattagattagagaaatatcgtgaaagaaataatttagaaatagattttgttgttacagaggaagttgttcttgagaatatttcttatataaagtatggagaaacacaattttcttcatttctctatggaggactatctcatgacgatttactaaccttttcgagggctgtttttgaaaagtttccaaagttaaatatggcgttagcacaaaaatactcatttgtttttatcgatgagtatcaggatacaagttctgaaattttggatttattttacacagcgtgtttaaataatgaaacaagattggtcctattaggcgatgagatgcaacaaatttataaggagagggttgaagattttcaagaagttattaatcgtaattttattagggaaaataccttgaaaagtaattggcgctctcaggcgaatattgttagtgtgttaaacaatatatattttgattcattatattcacaatatgcggaaaaacctgctggaaacaaagcaaagatacatgtggtgaatgatttgatagatataaatttagagtcagatactttgcaattagttttatataatagtgaattgtttaaagaaattgaagcatttaatttatataaagtttataataaaatttatgcatatcatgataaatatagtgcaaaagaaattttattgaattctaatcgagataatccagatgatttaatcgtccttttgatttttattatagaaattagtgaactttttgatgaacagagatttattcaattgatacaaaaaataggtgaatttaaatttgcaaataaagagatatggagaattaaaaatcattccgacaaagtaaaagtggcagatcaattaaatcgattaagtcaagaagttaagagtaataaaactttaaatgaattattgtgttttctacaagagattgaaataattgattcaacatttttagaaatggttattagccaaatagaaggaaatacagattttagaaatgaattatttgacataaggttaaatgaattttcaaattgttataaacaaataaaaaatcctaccttctcaacacaacatgctgttaaaggagaaggatatgataaagtagctttcaaaatttcagatggtacaaataatataaatgtaagaatgtatgcctttttaaagttgttttctaaggggcagtttgattataaagaattaatgtcaatgaatgaacatgcaaaaaaatatatatcctctttaaatgcgactattgaaaaaaaagcttcaaatttaaatgccaaggactttaaacaatttgaagagccttgtaagaaatgtattttggaaataaaaaagatttttatagaaaataagggattgtttttagaaatctttggccaggattatttatcctttgaagggaaacctaatgttacaaactttaaaaaatgtattaaagctataaataaaattgagggtatattattggcttacaaactattctatgtaggatgttctcgtgcaaaagagcagttagatgtatatgtaactaatatagaaattcagagtttccaaaaagaatttatttctaaaatggagagtgttggatttgaagtaagtattgaagtttaa

SEQ ID NO: 72812 - DNA, 1587 bp, Bacillus cereus VD078
gtgggcaatattgaaaataagaatttaatagatacagatagtataaataagtttgcatttcaatttttaacagctattagagatgttgagcgtgatttatttactggaagtaatacgctgttgaaagaagtaatcgacttttttatagattatgaaataaaaacagatatttccatgacggatgaagagaaaaaaattaaaattagggaaaagaaagaattattttctaaaggtgcccaatctctcattcagtctcttcaagatagaatgagagaaggaaaaaaacatatgcttcaatatgtagaaaacaccggagcagcttttgataagatgcaaccttcttttgaaggaggaattctagatacagaactgtattctgcactgaaacttattgttgaaaatgaaacaggaattaaactaccagcagttaataatgggctaggatataataatttaatatatatttcattgttattagcaaaaatgcaaaaagatgcttcaggagaatatttaggaacgaatgcaaaagtatattcaattctagctatagaagaacccgaggcacatttacatccaaatatgcaatataaatttttgaaatttttaaaacaaaatcgagaaacagaagtaaggcaaatctttataacttcgcattctcccagtattacggcggctgttgatttagatgatattatcgttttgtataaaaataaagaagagacaaaggttgcatatccagggaaggtatttaatgagagtccagatgatataaaatcgaaaaaatatgttaagagatttattgatgtcacaaaggcagatatcttttttgcaagaaatttaatatttgttgaaggactagcagagcagctagttattccagaatttgcaacagctttaggatatgatttaacggatactcacacatctgtaataaacattggggggcggtattttgaacattttttaaaattgtttgatacttctaaaaatcctaatgcaattgaaaagagaatagcatgtataactgatttagatcctgttagaaaagagaaaagtgttaaaggtgccacatgggattcatgctcagtattagcattaaataatgacttagacaaatatgagtataatgcatgttcaaatccttttgttaacacatataaaagtaattctagtaaccacataagaatttttacacaaaaggaaaaagaaagctgtacgtttgaatatgatcttatacttcataatataacttgtgagaaattgattacagattcaacttctaatcaaaatgaaataagaaatttaatgcttgcatataaagaaaacaaatcaattaatgatatgttagcctatatgagaaatggaaaatataaagaaaatatggaaattgatctgcaaaatactccaatggtagatggtgaaaagaaaaaacatattattgctgatagatatttaatgtcaatatctaaaggtgaattagcacaagagcttgcacatgaaatttcaagaatggaaccgtcagataatatgattgtttgtccaatttatataaaagaggcgataaaatggatttgtcaaccgcaataa

SEQ ID NO: 72813 - DNA, 1716 bp, Bacillus cereus VD078
atggatttgtcaaccgcaataaagcttaaaagtagtaataataaaattcagatagacaatcattttaaactatgtgcaggtccaggtgccggaaagacatcgtttttaataaatcatataaacaatatactttctcactctacaaggttatcaaaaacaagaagagttgcctgtattacttatacaaatacaggagtagaaactattcttagtcgcttaaataatatgactaatgagattgaagttagtactattcatagctttctgtataaccatattgtaaaaccttatttatggttactagatgatattatatttcctttagataagttagatggtcatgatgatattaaacccggatacactttattaaagacatataaagaaaagagtaatcaaaattggattacagataatcaaaagctttcaaaagcattaaataaattaacttggtatattaatgaacaagatgtaatggaattaaagtttttaaaaccttatcatggaaaattatcagaaaaagcaagtataaaaaaagattcttatatgttatataaaaagctttgttgggaacaaggattattgagtcatgatgatgttttatattttagttatcttcttataaaacggaataagaaaattagagaaattataagagcaaaatttccttactttttaattgacgaattccaagatacaagtcctttacaagtagctataatcaaattgttagctaaaaaagaaatggtagttggggttattggagacccttgccaatctattttctctttccagggggctaatgtaagttcttttagccaattttacttagagaacatgagtttatatgtattagagaataatcatagaagtactgagcaaatcatctctgtattaaattacgtgagaaaagatgaacattttgttcagcatagtccggataataaattaggaaacaatccaactatattaattgggaatgctcgtacaagttattatcaatttaaacaggactgtactgatgaagaatggtgtgttctagcttatcggaatgaaacaacaaatggtattgaattcggtatagaagatttactagtagacgatattaatgatttattgtataaagatgggaaacgagggaaaatgatttattttttaatacatggaattgaatatgggagacagttaaaattaaaagaggcactcaaatttataaaaaaagcgtataaagatgagaaggggtttttggaaaaagatgcgattaaggttttaaagaatcttctcaatgaatatgaagtttttaattctatgagcattaaggaattatataacacatatatttttaatcattatggcgtgaaaaagcaaattaagtctggtaatattagtgatttttatcaaaatctgaagtatattaacatggctgcactagtaaatatagctgatgatgcaagtcttttcaaaactattcataaatcaaaaggggatgaatttgataatatattattaattattcctgaatctaagcgtcctacgtttcttacttttttattatcaccagatatgaataaggaggaacatagagtatactatgtagctttaagtagggcgaaaaagaatttatatgtaaatattccaaagctaactgaagaggaaatgaaattaataaagaattttgataaaaaagtgcttagtaaggaattagtatttaattaa

SEQ ID NO: 72814 - DNA, 1755 bp, Bacillus cereus VD048
ttgagaatttcacaagtaagggtagaaaactataggaacctaaaaagtgtcaatattaaattaaatagattagttatctttataggtgagaataatagtgggaaaagtaatttactgaaagctattacactaccatttttaaatgatgaaattggtagcttgagtaaaaatctaggttggcaagatattagtaacttagctaaagaaagatactttaaatttatccaagaaaatttagacggcataaaaaatggggaattagagctagagaattttattgaagtacttccagttgtaaaagtagaagttacatttgaaccagaagacgctgatgagtattacgtccataaatggattaattcaatagatggagaaagtccacattacgctattaggtatcagttttatgtagagaatccaaaggatttattaacacatgtttcaaaaatattaagtgacacggatgaaatcgaaaatataaaaatgaatttacttcctattgaaatgtttaaatattctatttgtgttccttctacagaagaacaagtggcatttaatgaactagcaaattttaaatataatgcattggctgcggaaagagatgaattttctaataaaaatactcagctaggctcaaaagctctggttaatcttttacataataaattatccgaagaacaaaaggtccaagtggaacaatcttatgagagtttttttgctaatttaaagcagataagtaatttagacagtgtatttaattggcaggaacagtctgaattagaaaatgcaaaagatttttttgaaaagattacactacttcctaatatgcctagtatgaattctctgttaaataatgtacgactcggatttggagaggaatatttaaatactcaaggattaggatatcgcaacttagtttacctattggtaatgatgaattccttgaagatcaattcagatatagcattgaatatattaacaattgaagaaccagaagcacatttatgtatcagcaacgaacggttactagcaagttttattaactctatcgttagttcaagtaatcaaacgcagttatttatttctacgcatagctcggaatttttaaataagttagagctaaagaatgtaacagttgtatctgagggcagtgcattttcgttagaatcagaaatgaaggaagaacaattaaactatttagctaagaagcccaatttagacttcttgaaattcttattttcacgcagatgtatattagttgaagggccaactgaagaaatgttgattaaatcttatttaagttcacaaactcatctcttgaatgaaatcgaggtaatctctttacataaagggtttacaaatatgttagacatttggttaagagttaatcaaaactcatcttatagaataggtattattagagattttgacgatcagccacgtgctcaacagaatcatgaagtttataataattatgataatatttatgttactacaactactgaatatactttggaaccagagtttgtaaagactgggaaaaacttcgaaaagttgaaaagctattttgtagctaatcataattggtcagatataactacaccagaatctttatctgataaatggagaaaagcaaaaacaaatacgatgctcaaattttgtcaggattttggcaaaggtgatttagaagaaattgagttgccgcaacatattaataaggtgctgaagttcttacaaagtgggataaaggaatga

SEQ ID NO: 72815 - DNA, 1383 bp, Bacillus cereus VD048
atgaaaattgttgtagcgggggctggtgcagggaagacaacgtcaatggctcaggtagtactggacaggcttaaagaagttactaatggaaagattatatatgttattacatataccaatgctgctagaaatcgaataagggaaaaaattattgaattgaatggtagtattccaaagcaattatttatcgaaacattacatgtttttttgttaagggaatttatttttccatttcaccatttattgtacgagaagcaattcacaaaagcatctcaaatagaattgccaggtaaacctatccctaggatgaggaaagttaaggagctagaaactaataaaataattcatgttacaaaagttactgaaacggctaaatggattatttgtaaaaaaactaaagatattaaggatactaaagaaaagaggaaaaaaatattagacattgtatcacggtatctagattctgtgtttattgatgaagcacaagatatagataagcatttaataggaattattgagttgctagatagtaaaggtattaatatgtgtttagtaggggatcccaaacaagatttaaggggtagaaatgcattcaagacactaatagatacaaataagcagcatgtcgaatatatagcagaaaatcatagatgcccaatttcacatgtccagctagccaattcatatatttcagaagaagaggtacagttaccgcagaaagctttatttggtgaattaggttatgtatttgaaagagatactaatattattgatttggtagatattacgaattgggattatgcatatatttataagaaaaatgaaagatttacaacgcatattaatgacaagaataaagccgagcaaaatttaacttatgaactaaaatcaatagtaaagaaattagaaattaatgagcaaattgtagataaatttgtttatgatataaaaaaaatgattttgaagagtttagctgaagaggataattctaaaatattcctaattttagaagaggcgctatctataaaattgattctacaggacaagaagaaattggaagaagtgcttgatatgaatcgagaaactccaacagctaagggagtattggtaaattctatagatagtattaaagggttagagggagataaatgtttgtttatacttactatggatttagcaccatatttatttggtgaaaaaagtactcagaataaaatgttgaattatttatatgttggtttgactcgagctaaacaaaaattagtttttttggttgctaatgaagttgaagatagatatggtagggaaaatgttaatgcttactttaaagaaataatatcagttaatacggaaacaaggacttcaggatctatttttgcgtaa

SEQ ID NO: 72816 - DNA, 1758 bp, Bacillus cereus HuA4-10
atgaagcttaaaagtttgaaagttgaaaatttcaggaatttcgaagatgttgaaattaatctaacaaatcaaaatgttatatttggtatgaacgatgttggtaaaactaaccttatgtatgcactcaggtttttattggacagagaaatacgtaaaaatggttttaaagaaacagattactttaaaaatgatactagtaaggtaatcactataaccttaggtgttgaaatagcagaccgagatactaatgacgattcgaagcatattattgcgaaagttggtggagcaagatcggggacaggaagtgaattagatgtttttttctttcaaataaagggtgcttatgatgaaagtgaaaatattggagtaccgaaaatttattggggaaataaacttgatgaattagaagaattggcgcaaagtggtatctttagtcctttagacagcttgtttaaaatagtttatctagatccgacgattgatttagataaaaccttttcaaaaaatagaaaacagttatttgatcaaacaaagttagatgaatctgatatagctatctctaacgaaatcaagaatttagggatgcagctaaatgataagattagtagtatggaagttattcaatcttttcaaacgactattaccaaggaatataaaaagctgaaaaaggaagatatctctattgaaatgaaatcagagttgtcgattaatggatattttgggaatttgattccttatataaagagagataatgatgaaaatatttatcctacttcgggagatggaagaaaaaaaatcttagcatattctatctttaaccatcttattcaagagcaggaaggtaataaaatcattatctatttaatagaagaacctgagaatagtttacataggtcgatgcaaattgctttatcaaaacaattgtttgaatctgaagtttatacttatttctttttatcaactcattcaccagagttattatacgaaatggataatgcttcacttatacgcatttattctaaaaataaaaccaactgtgaatcgtacatctatcatgtagaggataactataagaacgtaaaaaaagaattaaatagatctctagccaccgcattatttgcagataaagtacttttagtagaagggccatctgaaaaagtattatttgaaaaaattctagaagaagttcatcctacttacgaattagatggggggtatctgttagatgttaatggtataaattttgaaccatatgtaaaagtattaaaaggattaaatataacgcctattgtaaaaacggacaatgatttaaaggctaaaaaaggacaacctaaaaattttgatttaattggcattaataggtgtataaaacttattaatgggacccctaaagaaagtgttgagatagattattttgttattaatgataaaggaaaggaagtagaaaacgttaagttgaaaagggaactaatttttgctgaaaaaaaccggattttcaaggaaaatgcaaaagaaatacaaaacttaaaagagaataatgtctttttatccaaaattgatttagaacatgatctttatgatgtaattggagagcgattagaggagattcttgggaaatcaccgattaaataccttcaaaatcataagttattaaatatgattgaattgacacaggaactgaatagcaaagattgcaaagctattattaatcatgagttatttaaggcattaagagagttggtgtcagatgttagttga

SEQ ID NO: 72817 - DNA, 1569 bp, Bacillus cereus HuA4-10
atgttagttgatcaaaagcagagagatgatattttagaggataatgatagcattgtggtttcagcaagtgctggatctggaaaaactactataatggtcaaaaagatgggaattgaaatggaaaaaatcaaagaccatagaacgatagcagccgtcacttttactgtgaaagctacaggagagataaaaaagaaggctggaaaccaaattaaaaacccttttgtagttatgacaaatgattcgtttattgagaatgaaattataagaccttttattattgatgcatacggtaaggattacagaaaggattactccgtcgagtatggaagtcgctataaattcgaggactttgcaacgggattagaacagttaaaaacagataacattttaggtagttttgaggacaataaacgtaactttaactttagacttgcttttaatatccttgaaaaatctatagctgcgcaagaatatatgaaatcgaagtatgtaacaatctttattgatgaatatcaggattctgattatgatatgcatcgcttctttatgaaattaaaaaatgatttgaatatcaaactatttattgtgggtgactcaaaacaagccatttacttatggcgaggggcgatgagtaatatctttgatctattgaaagaagaaagtttcaactactatgaacttgtaactaattttcgttgtgataaagaaatagagaattatgctaatctttttcataatccgaaatattttaccgctccaaacaaagtcgtagaaaatgtagtttttaaagagtacaattcttttaatagtttctatgagagaagtaattttagtggctttggagatgtatttaatgccttaattaaagataacgtaatagatcttaataaagaaataactattattgcaaattttaataaggatgcaattaaaataacagatttattgaatgcagctggatataattttgtatttatccctaaaactcctatcgatgaaggattacctaacggttatttattaaaagaactggcgttatatactaagaattcaacgtattctatttatgactttatagaaagaacggatattgatgaaagaaagcaaactagaattgagatcaatagtataataagctgtttaaagaaggctgaatatataatacctgaaaagatatcaatagtaataaaaaaattaggggactacttaggaatattatttacagaagaggaagttataaaattctgtgaaagtatgtgtaatagcgactatgatatggcttttcgactaacagaagagaaatataaagtaatgacagtgtttgcttcaaaaggattagaatttgaacaagtactaagtttcgctcgatattataaaatatatagagaggaaaatgtacaaaatcattatgtgtgtgtgacaagagcaaaaagtaagtttttgatgtttattgacaatgaagattactatagtcatgtagtggatataataaatgcaaatggtataaaaggaattgcctacttgactaaaattgaagaaaataaggacaaccttcagcattctaattaa

SEQ ID NO: 72818 - DNA, 1902 bp, Bacillus cereus HuB4-10
gtgtatatttcaaaattgagtgttaagaactataggaattttggtgaaggaaaattttcaattcttctgaaaccctttactgctataatcggagagaataatatcggaaagtcgaatctaattgattgtattggcttggttttgagccaagatattactatgttcaagaaaagatttttagacattgacgatataaattcaattacgaaagaaaactttaaaaaatctattgtggaactattagagatagaaactattgatgaatcaaaaataaagtttccagacgtaagagttgagttgatattagacgatttagacgaggatcaacttgctgttgtaggagattggttttttgaaaagacacttactaaggccaagttaacttattggttcaaacctaggggtggttttaaaagacaagaatgggttgaaagacaagtttctaatttgagggaacttacaagtggggataaggtgaaaaaggaagaattatataaacatgttgagttccctatcgaccaatatgaatatgtaatttatggaggaagcaaccctacaaataaatgtgatccgtactttctaaaaatgttaaaactagaggttctagacgctctgcgtgatgcaaaaaaggaactggttgcaaacggggaatataaattactatatcgtattttaaataaaaattatgaaaatgatttcgttgagatccaaacagtacttggtgaactcaaccaaaaattaagtgaaaacaaaaaattggagtctattaaaaaagaattgactacatatttagataaagtttctttaacaaacccgtcagaattaaatagtattgactttaatttttcttctccagaggttaatgaaatattaaagaaattaagtattgtttacggtgaaaatcctgtttcaatcgaaagaaatgggttaggtaaaaataatttattatttatatcacttgtactctcacatttagcatcacagactgatgataaaactaaattagccttcagagtcataggactagaagaacctgaggcacatttacacccgcatttgcaaacccatctcgcaaagaacttaagcaaggttaatagcgcagggaatgaaaaggatgataagaaagatacacagattattgttacgtctcattcaacaaatattactacttcaattgacttaaataaccttgttatcctttataaggataaagggaaaataaattatcattatatcctagacggcttttcggataaaaaagaagggaaagctcatataaaatatctaaaaaaatatctggatgcaacaaattcttctatgttttatgcaaggagacttatccttgttgagggaatatctgaacaaatattagttccattattttttgaaatacactacaagaaaacattagaaagtataggggctaacattattaatgtcaatggagttgcttttaagcattttctagaaataattaaaaatggatacttcattaagtgtggtgtattgactgataaggatgaagggaagaaaactgaaaaaagggcagaaaaattaaaagagcattataagataaataacaatgtaattgctgttgaaattaacgatgacacatttgagaaagaattaattaagtataacaataagggcaagggtagagcattgttgctaagggtatttaaacaacttcatcctataaagtataatggagttgagaaaaattggacggaactaatagatgtagatagttactttgaaaatatagaaaatgataaatccgattttgcttttgctttacatgaagaactattaaaagataatgaaggctttgctattcctaattatatagtttctatcttcaaatttattatgggggaagaaaatgaagagaaaactacataa

SEQ ID NO: 72819 - DNA, 1578 bp, Bacillus cereus HuB4-10
atgaagagaaaactacataacacattgattattgctgctgctggatcaggaaagaccactgagctaataaagcgaataactagaaaatcaagggaattaccgaatgataagtatttggcagtaataacttatactaattctgccactaatgagattttagaaaggcttcaaaaaaatgtatcagtacaaccaaatatctttgttggaacaatacatagttttcttattaaattcttaataaagccttatggggaagttttaggtttggtaccaaacgaactgattattacagattatgaaattaatgtcaataagtcttcttcaaattcatttattgaaaaaaatatgatagttgatcgactttcgaagaaaggtgttttgacatatgattatatagttactctttcaaagaaaatattagataacaaagatgtgaaaaagcgtttttgtaaccgtattagatatctatttgtagacgaatttcaggactctacaaatacacagtttgaaatctttgatacactaagaaaagggaaaaactctgaagttattctagttggtgacccggaacaacgcattatgaactttaggaataagccacgaaaaggttctacaggtacaagaaaggtccctttgcatccgattgattctttgcaaaagaaaacaacctataccataaataaattaaagagcaactatagatctagtgaaacgattgtgaacttcattaatcaatttcactctagtatccaacaagaatgggcaaataaggagattagttctaagaaccctgtaacgtttattcaatcaactaagttaaaatcgattattactgattttaatggtttatgtataaacaaagattattgtgaattgattcctaaaacaagattttttttagcgcatgaaaataaagtttataacaattatagaaaattcaattgtgacaacaagtctaaagagaatatgtcattgtttacatgtatttatgaatatttatcggctttttataatataaaaaaagattttttacatcaaacactagaaatggaagaaattgaactaagaaagaaatgtctattagtgctttatgagattaattacaatataaacattgatttggaatatttttctgattttatagaaactacttttagtcgtaaaaggctagaaacaggtgagaaagttagttttaaaataaaagaaaaaaccaaaaggttggtagaagaactttcaaatagaatcattcttgaaaacgaagatttgtcaaaagaattaaatgaataccgagattcttttctaacaatccataaatcaaaaggtttacaggctgatgcagcgttagttgtcgctaaaaatgaaaaggaacttttaatgtggtttgaggatgataaagagaaacgacttctcaatcaacaagataagagtagattagggtatgtgggatttagtagacctaaagagtttctatgtattgcatgtcttacgcctataagcgaatcaacattaaaattacttaataaatttaatgtgaatatctattcaccatcagaagaacaagtaccaactacactttaa

SEQ ID NO: 72820 - DNA, 1881 bp, Bacillus cereus HuB4-10
atgtatatatctgatgtgaaaattttgaattacagaagcttttcggagtttaatgtaagcttgaatgaaggcttatctataataattggagaaaataatgtggggaaatccaattttttagaggctttgagtcttatctttaatagtaattactccttacgaaaacgaacattgcaacaagaggatttttggaatggactcaagattcaaggtacttggccagagattacaattgaggcaactttaaatggaatcgaaacagaaaacgagcttgctattacaagtagatggctgacaagaaatccaggagaggcaaaacttacctacaagtataaaccaaaggcaaatatttcggtttcagctcctcttgatgctactcctattagcaaaattcagcttccccttcatgagtacgagtggataatttatggtggagagcgtgaaacattagacacctttgattttaatatgctatccaagtttggagtcgagtatgtaggggctcttagagatgcaaatgctgaattaaaaaagtcctctggtcaattacagagaatcctaaaaaatttcgatcttggggaagaagagcttcataagatttcagggaaaattgatgaacttaatgagcaaattatgcaaggtagagaaattcagaaggtacagagtgatatcaatgaacaccttgggaaaattactgggactatgagacagcgagtgaaaatccaaatgggagaaagtgactatgatgctttattgaaagatttaaaggttctaatcggttcaaatgaagacagagtacattctgttgatatgaatggtcttggttataataatttgctgtatattagccttttacttactcaatatacagccattaaggaaaagcgaaatcaaaatcatgactatgtgtttccacttttaattgttgaggaaccggaagctcatctgcatagtcatttacaaaagttcttagctaattatttctttaatcagaaagttttgggccaggttattatgacaacccattcttcacatgttagttctcatgcagaactggatagtttagtagtgttttataagggaaacaataagacattatctaaacgtattggaacaatttttgatacaaataaaaaagaggaaagtgattataaacggtatttagaaagatggttagatgctaccaaatctgatattttctttggtagaaaggtcttattagtagaaggaattgcagaacgtctattaataccgaaatttttctctatgctacaaaagggacacgcgggagaagataaaacattagaaagtgaaggaatctctattatttcagtagatggtgtagcatttaggccgtttttacagttatttggatcaaagggattagatatgaagtgtgctgttttgactgatagtgatccagaatctgttcctgtaatagacattcatggggatgaagtgattggaagtgacgacaaggttgtaaaagaggtagcttatcctacgaaatttggtgagtttccaatctgttcaagaacagctggtttaattaaagatttcagcacatcctctaatatttatatatctagtaatcttaaaacatttgaatatgatttgatgatggagaataatgcatctttctttcgtgaattgattcaaacatacgatattggaacaaaagcagaaagggaaagagttgttactttggatgggcacgaatttgcaaaagaagcctatgaggttatttcaaaggagaagggtcaattctcccagttcatattagatgaattgaataaagggaaagttcttcatattccagcatatatcaagcaggtatttaattttcttacgaatgaagaggaggtaagaagtgatggttga

SEQ ID NO: 72821 - DNA, 1794 bp, Bacillus cereus HuB4-10
atggttgataatgatgatttccggagaagtatagcatgtgctcctcatactgattcaattactgtacaagctggacctggaagtggtaaaacgacgttattgatagagcggttgaaatatataattgaaaatcgcataaatgctttgtctgggcttgcttgtattacttataccaatgcggctaaagaagaaatcatgatgcgactacaaaatgaaggggtgcagctacctactgaactgtttataggaacgattcattcatttttattggagcatgtgattaaaccctactcacactttaagcataaggaagggataccatataaacttgcttctgtgggctttgctaggggatataaagattatattgcaaatatgttaggacgtccccattatcatattaatgagagtatatttaaagcgttcgagagcctgggccgtgatgaaaaaggaaatccttattgctatagagataagatttctccttcagatgcgttgacatggaagaattttattaaaaatagagggtacatagatcaacaagatgtgatttatctttcttatcttattttaaaaaagtatggtcatattcggaatgcatttagttcccgtttcaaatatattcttgtagatgagtatcaagatgttacttattatcaagagcagttattttctttgctagaacattcttcgttcttttgcgtcggggatacaaatcaatcaatttatagctttacaggagcaaagccagaaatatttcaagcaaagtggaacaatgagagttacagaaactacatgttaaccaacaattttcgtagtacgcaacacattgtccagtttgctaattacaaaacagaaattgagcaaactggagctggtaacaatgctacaagaaagcaaaaagtgatatttataaaagatattaaagaggcttcagaggctattcaattgtttcaaagtatttgtacagatatagaatgtgaggaacaaaagaagccatttatgattctagctagacggaatgattatgtgaaaaatataaatagtcttttaaaaaaacaagaagtggaagcaagcccttttttaaagaaattagcaaaagagcattatcgtcgctttcaaatcttgcaaaatttcatattggctatctcatataaacggagaaatgaatttgacagagctgttgaaagaatgagtgaagccttcagctatttattttttaatgaacatcctaattatattgcattagttgaaattggatatagtatgtttatgtggaagaaattacagatctttacgcttcagtttttagataacctggtattaacagaaacatcggtggaagagctgtttgtagtactgaaaaaatttctgatggaagaatcaaaaaaactgtatggtaaatctatagggaaaaaactaaatatgcttaattacaaatggaagaatcaagttaaagcatcaaagagtaccatgttatcccatctcatagagcaagtagagctgcaagggcacttttctgaaagtgaaggctctgttttaaacattcatgatgcaaaaggtcaagaagcggaatgcgtattggtaatggctgaatacgaatctcagcttaaggagtggcttggaaaaaatggagaaatagaagaagcacgtgtaggttatgtggcgttttctagagctagaaagttattatgtgtatgggctccttccattcaagaaagcaactatatgcatttacaacaacatgttcaatttgtagataagacctatactgctgaaatggaaagtgtttaa

SEQ ID NO: 72822 - DNA, 2061 bp, Bacillus cereus HuB5-5
atgtatttaaaaagtttaaaaatctacaactttagaaaatttggaacaaataacaacaagatagaatttgttgatgctaaaagttttcaagaacaaagaaataaaaaagaagtaaatattgctccaacaacaactttaattgtaggaaagaataactgtggaaaaacaacgattattaaatcgttagataatcttattaataataataaagacgcttttaaagcaaatgattttaattttttatacttaaaaaaactaattgagtattatgaacaagcaattccaaaattagatgatgaattaaaagaaaaaattaaaacaccgtatcttcaatttaatatttgtattggaattgagaataatagtaatgacttagttaccaatatagttcgttttatgaaattagatgatattaataattctgaattaaaaattgttataaaagtagaattggagaacgaagaagttttcattagagatgtgaaaaaactgttagagaaaaatgataattcgagtcttcggtttaatagctttttggaattgataaatgattcggattttaaaataaattattataatacagataatgataaaatagataattttaacataaaaaatttaattgaattgagaccgattaaagcaaataacattgaaagcgaaaaatgcctttcaaaagcttttagtaaaataattgaatatcgctataaaacattattcgaagaggaaagcgataatcttaattcgacaatcataaatattaatcgaacacttaccaaattaattagtgaaaaacatacggttagtataaataagtctttagaagaaattgaatcaaatgaaaaacttcaagtattgctaagggcagatttgacttttcaaaatgtgatgaataatttaatcaaatatgaatacgtcgaacgtaatatgaatatacctgagaatcaatttggtttaggttatacaaatttgatgatgataatagcggatttaattgattatatggaaaaatacccagaaaactcatttaacagtaaggttaatttaatttcaattgaagaacctgaaacatttatgcatccacaaatgcaggagttatttataaaaaatataaatgaagcgattgcttctttattgaaaagtaaaaataaaaacgtaaatagccagttgataattacaacacactcatcacatatactaaatagtaaaatacacagtggtaatacttttaataatataaattacgttactaccaaaaataattatactcatgtagtgaatttgcatgatgatataattatccctaaaagtgaaaaaaaagctcataaaagagagcaggatcttaagttcttaaaaaaacatattaagtataaagtttctgagttgtttttttcagatgctattatttttgttgaaggtgtgactgaagaaacgcttcttaaatattatattgatgataataataagctcaataaatattatatatcggttttcaatattgatggggctcacggaatggtttatcacaatttaattgaaatactacaagtacctgctttgataattacggatttagatatagaaagagatgatgatgaaaagaaaaatttcaagcaaatctctgatttaacgggaaaattcacaactaataaaacaattaaaaagtataatgatgactctaatagtttagaggaattacagcatgagcagcttaaaataaataatatgtatattgcatatcaaggtaaaatcgaagaatattatgcaacaagttttgaagaagcatttatcttaacaaattacaaaaatgaacttttaaatagtgtactaaaaaaaatgaaacctcagatttatgaaaatattatgggtgagggagatgatttcacaaagataaaggaaaattcctataaactccaaaaaaagttatcaaatgataaaagtgattttgcgaatgagctactctataagtttataacggaggatataacaattccttctttgccaaagtatattaagagtggcctttcatggttagctaaaaaattagaaggggaggaataa

SEQ ID NO: 72823 - DNA, 2055 bp, Bacillus cereus HuB5-5
gtgagtttatccaaaataatcccatctaataagaaagaagagcagaaatcaataaatgcaatttttaattctattgataaaagtgaaggtatcatttttaattctggtgctggtgctggaaaaacatacgctcttattgaaagtttgaaatacataataagaaactacgagaagagcttaaaacaacataatcaacaaattatctgtatcacatatacgaatgttgcaactaaagaagtaaaagagagattaggaaacacagatttagtattagtttctacaattcatgaaagaatgtggggactcattaaagattatcaaaaagaattagttgagattcacaaagaaaagttggaagatgaaatctcaagtttaaaacaaaaattagaaaaaggtcagggatacgaaaaatttcaagaattagaagaggacttaaagggaaattttaaaaaaataatgattgagaatagggaactattttttcaaaattatagtgctaaagcagcagaggtaaaaaaatcatttaaaatactcttaaacgattaccctaatatgctgaaaaatgttggaaattttaagagaatagtaaatgcaatttacaaattagatcagtatagtaaatgctatgaaaatataagcttaaataaacagggttataaatctgtagagtacaattcgatttataataacgatcaactttataaaatgagaataagccatgatactttgttagattatggtctgaaaataattaagaaatatgacttgttaaaacaaataatcattgataaatatccatttatttttattgatgagtatcaggatacggatgaaaaagttatattaataatgagttatttagagcaatatgcaaaaaaaattgatcacaaaatttttataggttattttggtgatactgctcaaaatatttatgatgatggagtaggaagtgaaataacaaagattcactcaggattaaaacagatagataaagtgtttaatagaagatctacaaaagaagtcattgaggttataaacaaaattagaaacgatagcatcgaacaaatatcaatttatgatgattgtgaaggcggtagtgtaaagttttataaagggacttcaggtaatgttaaggacttaatagagcggtatatatatgaatggaaaataactacggaaaatcaactacattgtctagttttaactaataagattgttgcagaatatagtggttttaaaaacatatacgaagctttcaaagagacagataaatataaagggagcaattataatcaacttaatacggaactcttaagtaatgatttatctaagcttggtgaaattcctaagttgttatttaatatagttagattacagaataatcttgtggataaaacgacttcagttattgatattacacctaaagaaagcctattcgatgagatgagtatagaagggttaaggaatttaattaaactattaaaacaataccaagggaaaacattaggtgaatatatagaatcgatatcaactgtttattctcaagttaatgatgaaaattataaaaaaataatagattggacttttggttttgaaaatatcacattcgaactatttaaaaatcatcttatagaaaagttatttaataatatattagatgatgatgttgatcgtgcaaccgcaactatacaaaaaatactagaagttgatattgttgagtatggattgtggtataaatttattatggataaacaagaagagaaggttatttatcatacttatcatggtacaaagggacgagagtttgataatgttattattattatggaaaatgcttttggaagaaatcacaattattttaatttcttttttgaaaatttcttgcatccagatgtattagaaggtgaaaagaaactgaacttcgagaaaataaagaatttgttatatgtttcttgctctagagctattaagaatttaagagttttatatattgatgatgttaccgattttgaaagtgaaattaaggaaatgtttggagaagtatatcctttttag

SEQ ID NO: 72824 - DNA, 2037 bp, Bacillus cereus VD045
atgtacgattcaaaatctccgtatatctcaagagtcaaaataacaaattttagaaacttcaaagacattgatgttaatttaaatcataaacaaattatcattggtgaaaacaatgtaggaaaaacaaattttttaagagctttacaaataattttagaccctaaactctctgatgaagaccgttttttattagatacagatttttttgatggattgtcagaaccaatgaaaaatcgtgaacagattgaaatctcaatagaaattcaagggtatgaccataaaaaaacaattttatctaccttagatgcagctacagtttcaacatctccaaaaactcttaggctaacatataggtattttccaaagataaaagaagatggaacacatgactatcaatttattattttccaaggtgaaaatgaagaaatatctttcactcattatcaccggagatttttaaatataaatgttatacatgcaatgcgtgatgttgaatctgaaatgaaacatataagaaagtcccctgttaaccagttattaaaacaatacgatatcagaaaagaagaactagcagaaatagcctctgcacttaagcaaaaaagtgacgaggtgctttcaattgatgagctaacagatttaacaaataaaataagttcaagattttcaagcattatcggtaatcaagttgattcaacagtttctttagagactatagattttaatcctaacagaatcttaaatacattaaaattaatgattggagaaaaaaaacgacatacaggtgatacaagtttaggaattaacaatatcctttatatttctctaatattattaagcttagaggataatactattccatcaattatcaaagaagataaatttcagcaactattaatagaagacagtggtgcaattttaaacgattgctatgaacaaaatcaaaagcaaaattacatattaaaagcagagctatccaaggaaatacaggcagcactttatacttttatggatacttattattcttctaataatggctgtacaatcttggcaattgaagaacccgaatctcatttacaccctgcacttcaaagggttatttataaagatgtaataaataaagatacatctattctaatgacaacccattctcctcatataacgtcggttgcacctatagattctatagtacatttacgccataccagtgagggtactagtgtaaatactaccgcctccttaaaactcgaaacaagagatagaaaggatttagaacgttatatagatattaaaagaggagaaatatattttggtaagggtgtaattttaatagaaggtgttgcagaagaatatttaattccgagttttgcaaacaaaatgggcatgcctttagataaaaaaggaatcatttgttgtaacgttaactcaacaaatttcaagccatacgttaagtttcttgatgctttagatattccttttgtcgttataaccgatggagattactatttaaacgtaaaagagatagaagaagtggaaaaagaaggggaaatcgaagaaatcgaaaaaatagaaagaaagttcggcttgctacacgaggatagccatgacgattttggctttgatggtaatgatagaatgcgagcattgctaattgatttaaataaatttactgatgaacaaattccagagaactatgatgaacaagataccctgttttcttcacttggcttttttgtaggatatcatactatggaaattgatattatgtccaaaattaaagatttaagctatgaaaagaacattataaatacaatcttttgtgaacttacagcgggaggagcacaacagaaaaagaacttccagattgaattagaacaaggaaaatatgtttcttgcttaaaaaaaattgaaagtagccattctgctattggtaaaggaagatttgcacaacatttatctatcgaatgcactgaaaatcatgtaccccgctatatacgtttagcaatagaatcaatttataaaagagtggatgaactctaa

SEQ ID NO: 72825 - DNA, 1827 bp, Bacillus cereus VD045
atggaattatatcaaaagaaaataacgcagataaaagaagacccagaacagctagcagcattcaattccaatattagtacagttgtaaaagctggacctggtagtggtaaaacaactgtattaacactaaaaatacttaagttgctaaacgaaagaatacatgtacccagaggcttaggttgcatcacatatagtaaagaagcagcaaaggaatttactagtagattaaaaaagatgggatatcaaaaaagggcaaatgtaagcttgggcaccgttcatgcattctgcatttctcaaatcattatgccctatgctcatctttttaaagatgatttccctttacctatagacttaattgcagatgatgataaatataagttatttttctctattttaaaggatttcaatattaatacagacaacttaaaatttcaagaaatggaatcagagagaagccattctgtcacgggttttagtaaagtgaaaatagataagaatcacatagcggaaaaagtagcaatcgagtatgaaagacggcttaaacagttaggaaaaacagatttcattgaaattgttaaatattcaaaccagttaatcatcagagaagagtatgtccgtaaatgccttgaagctaaatttccttggattctcatcgatgaatatcaagattttggaaaacctcttcatgaaatggttctatctcttattaatttaactaatattaaaatatttgcagtcggagacccagaccagagcatatacggatttaatggtgcacatccagattatttccttgaactttatgattctactgagctactatctatagacttgaaaacaaactacagaagtaatcaagacataatagatgcttcttctataacattaaatattgatgaccgtgagtataaagcaggtgctagaataaaggaaaaaggtacttttcattttattcaatgtgaaaatgaacttgatgaacaatataaatatgttgtagatactataattcccaattctcaaaaacaaggaatccctttagaagaaatatgtattatagtaaaagataaatatgtggttgaaggtttacgcaaagtaatggaaggaaagggcattccttactacattgcaaaattcgaattttctaagagtgaaattgtattatggttaaaagattgtgcaatctggttagtaaataacctttctggttcctttactagtatttcagatttttggattcaattactagagagccatctgggaatattgtctgaaaacgaaagaataatagaaaagaagaaattgtatgacactttaattatgagtaaaaaatttaatgattcattaaatgactggttaacttttatagtggctcgattaaatttacattgtattttaaaacactctgaaaagttctttgaagaagctcatcttttagaaaaactactacaattcgccactaatggtgaatttaaatcgtacagtattaaacaattttctcagattggtaaacctgaaaatcaagttacaatatcgaccagacatagttctaaaggtttagaattcgaggttatagtaatactaggaatggagcaaaagatatttccagatttcagaaatttaaaagatacagaaaagctcaatgaagagcggagagttttttatgtgtgcattacaagagcaaagcgagaatgttatttattgatgtcaaaatattatacaaaagatacaaagaaagggacaattacttttaaacaatatccatcaatgttctggaaggaattgtatacagcatgtaggaaaaaaaacctttctcatcttactacttaa

SEQ ID NO: 72826 - DNA, 1737 bp, Bacillus cereus VD045
atgaaattcagtaatattacaataaagaacttcaggaattttgaaaaagtaaatataaatttagataataaaaatgtgattttcgggatgaatgatattggaaaaacaaattttttatatgcattgagatttcttttagataaagagataagaaaattcggttttaataaatctgattatcataaacatgacacttctaaaaaaattgaaattattttaacacttgatttgtctaattatgaaaaggatgaagatacaaaaaaacttatttcagtggttaagggtgctagaacatcggcaaatgcagatgttttttatatcgcactagaatctaaatatgatgataaagaattatatgggaacataattttaaaatggggatcggaactagataatttaatagatataccagggagagggaacataaacgcgttagataatgtatttaaggtgatttatataaatccgcttgttgatttagacaaattgttcgcacaaaataaaaaatatatttttgaagagtcacagggtaatgaatcagatgaagggattttaaataatattaaatctttaacagatcaagtaaatcaacaaataggagaaatgacaattattaagggtttccagcaagagataacaagtgaatataggtctttaaaaaaagaagaggtttctattgagctgaagtccgaaatggcaattaaaggatttttctcagatattattccatatataaaaaaagacggtgattctaattactatccaacctcaggggatggtagaagaaaaatgctttcttactctatatataactatctggctaagaaaaaatatgaggataaaattgttatttatttaattgaggaacccgaaattagtctacatagatcaatgcaaattgctttatcaaaacagttatttgaacaatctacatataaatattttttcttatccactcactctcctgaacttctttatgaaatggataatacaagattaataagagtgcattcaactgaaaaggttgtatgttcttcccatatgtataatgtggaagaagcctatggaagtgtcaagaaaaagctaaataaagctttatcatcggctctatttgctgaaagagtacttttaatagaaggtccttcagaaaaaatattatttgaaaaggttttagacgaagtagaaccagaatatgaattaaatggaggtttcttgcttgaagtaggagggacgtactttaatcattatgtgtgtacattaaatgatttaggtataacccatataattaaaacagataatgatttgaaatcaaaaaaaggtaaaaaaggtgtatacgaattactaggattaaatagatgcttaaacttattaggacgtgaaaatctagatgagattactattgacatccctgaagatataaaaggtaagaagaaaaaagagagacttaatgaaagaaaaaaagagatttttaaacaatataaaaatgaggtaggggaattcttaggggaacgaatatatttatcggaaatcgatctggaaaatgatttatattctgcaattggtgaaagcatgaaaagaatttttgaaaacgaagatcccgtgcactatttacagaaaagtaaactatttaacatggtcgagctagtaaataatttaagtactaaagattgttttgatgtttttgagcacgaaaaatttgcatgcctaaaggagttggtgggtagtgatagaggatga

SEQ ID NO: 72827 - DNA, 1485 bp, Bacillus cereus VD045
atgtctagagaacaaataataaaggatgggggtaatattcttgttaccgctggagcaggttcgggtaaaacaacaatattagttagtaaaattgaagctgatttaaaagaaaataaaactcattactcaattgcagctgttacttttacaaataaggcagcaaaagaaatcgagggaagattagggtattcatcaagagggaattttattggcactaacgatggttttgtcgagtctgaaattattaggccgtttattaaagatgcatttggaaatgattatccagacaatttcactgctgaatattttgataaccaatttgcttcatacgataagggattgcaagtgctaaaatatcaaaatatattagggacttatagtaatcctaaaaagaattttaagtttcaattggctttagatattttaaaaaaatcacttgtcgctagacaatatatattttcaaaatacttcaagatatttatagacgagtaccaagattcggataaggatatgcataatttatttatgtatttaaaggatcagcttaaaattaagttatttattgttggtgacccaaaacaatctatttatatctggaggggagcagaacctgaaaattttaatggtcttatagaaaattctacggattttaataaatatcatttaacttccaactttcgatgctgtcaggatattcaaaattactctaatttatttaatgaagaaactagaagcttaattaaagaaaaaaatgaggttcaaaatgtaatcagtatagcagacgatatgccaatttcagatattttattaaaattaacagaagaaaagcaggtattaaacatagaagcggaattagtgattttagtccggagacgtaatcaagccattgaaataatgaaagaactaaatgaagaagggtttaattttatttttattccccaaaccccattagatagggcaactccaaatgcaactcttttaaaagaggtaattaaatatgttaaaaatgatagatattcaatatatgatttagctgctgaaattgtaggtaatctaagttcacgagaaattaaggagatacaaaaaataattaatgaattactagtacctaatattaatcaggtactaattaatcaggtattaattaatttatttgctaaattagaaattactttagatactagagaaattacagcatttacagaagtaatgatgacgaatgaatttgacatagcatttgatacaaatgaatatttacataaaatatttactgtacattctgcaaaaggattagaatttaatcaagtcattattactgcaagtgattacaatgtacactataatagagatactaacgaacattatgttgctacaactagagcaaaagataaattaattgtcattatggataataagaagtactcagattatattgagacgctaatgaaagaacttaaaattaaaaatattattaagtcaatataa

SEQ ID NO: 72828 - DNA, 1755 bp, Bacillus cereus MSX-A12
ttgaaaatttcacaaatacaaataaaaaactatcggaatttaaacgatatcaatattaaagtaaatagattagtaatttttattggtgagaataatagtgggaaaagtaatctccttaaagctattacactaccattttttaatgatgagattggtagtataaacaaaaatttgggatggcaagatattggtaactcagctaaaactaaatactttaattttctccaagaaaatttagatagtataaagaatggagatatatctttagaaagtttcattgaagcacttcctgttataaaagtagaagttaattttgaacctgaagacgctgatgaatattatgtacataagtggattaattcaattgatggtacaagtcctcattacgctatcagttaccaattttgtgtagagaatcctaaagatttattgacacatgtctcaaaaatattaagtgatacagacgaaattgaaaatataaaaatgaatttattaccgattgaaatgtttaaatataccattgtagtgccttttacacaagaacaagtagcatttaatgatttgacgaaattcaaatacaatgctttggctgcagaacgagatgaattctccaataaaaatactcaattaggttcaaaagctttagttaaccttttgcataataaactatccgaagagcaaaaagtaaaagttgaacaatcatatgaaactttttttactaatctaaaagagataagtaacttagaaagtgtcttcaattggcaagaacaatctgaattagaaaatgcaacggatttctttgaaaagattaccttacttcctaatatgcctagtatgaattctttgttaaataatgttagactcggatttggagaagaatatcttaatactcaaggattaggatatcgaaacttggtttatttattagtaatgatgaattctttaaaaaacacctcagatatagctctaaacatattaacgattgaagaaccagaagcacatttatgcattagtaacgaaaggttgcttgcaagttttattaactctatcgttaattcaagtaatcaaacacaattattcgtttctacacatagctcagaatttttaaataaattagagttgaaaaatgtaacagttgtatctgaggggggagcattctcattagaatcagtgctaaaacctgaacagttaaactatctagctaagaaacctaatttagattttttgaaattcttattttcacgaagatgtatattagtggaggggcctactgaagaaatgttaattaaatcatatttaagtttacaaacccgttctttaaacgatattgaagtgatttccctacataaaggatttaaaataatgctagatatttggttaagggttcaccaagattcatctaatcgaataggaattattagggattttgatgatgaaccaaaagctaaagaaagtcatgaagcttataatatccatgacaatatttatgttactacaactactgaatatacattggagcctgagtttgtaaagactggtgaaaactttgaaaaactaaaaaactattttatatcgaatcatggatggtcagatataactacaccggaagctttatctgataaatggagaggtgctaaagcaaatacaatgctcaaattttgtcaagattttggaacaggggatctggaatcgattgaattaccaaaacatatcagtagtgtattaaattttttacaaagtggtgaaaagcaatga

SEQ ID NO: 72829 - DNA, 1380 bp, Bacillus cereus MSX-A12
atgaagattgttgtagcaggtgctggtgcaggaaaaactacttcaatggctcaattagtattggacaagcttgaggaagttaatactggaaaatttatatatgtgattacttatactaacgctgctaggaaccgtatacgagaaaaaattattgaattaaatggttgtattccaaaccagttatttattgaaacaatacatgtttttttattaagagagtttattttcccatttcatcatttgctatacaatcaacaatttataaaagcatctcaaatgaaactaccagataatttaatttttaagagtaggaaaattaaagaactagcagataataaaattgtacacgttgaaaaggttactgaaatagctaaatggattatatgtaagaaaacaaaagatactattcaaattaaagaaaaacgaagaaaactattagatattgtttcgagatacctagattcaatttttattgatgaagcgcaagatatggataaacatttgttagaagttgttcaaatgcttgatagagaaaatattgacttatatttagtaggagatcctaaacaagatttgcgtggtaggaatgcatttaagacactaattgaaaaatataggcaatctgttgaatatctatccgaaaatcatagatgtcctatttcacatgtacaactagcaaattcatatatttctgcggacgagcagcaattacctcagaaagctttatttggtgagcttggctatgtatttgaaagtgatattgaaattaataattttgttaatactataaattgggattatgcatttatttataagaaaaacgacagatttataacccatattaatgatagaaattgggctaaacaaaatttagcttatgaattaaagtctataataaataaatccaatattaatgatcaactagtagataaattaatttatgatatacaaaaaataattttgaaagatctgtcccaattaaataactttaaagtattttcaatgttagaaaaatcattatccataaatttaacgcgacaagataaagggaaattagctgatgctattaatctaaatcgtgaaattccgacaaatgagggaatattggtaaattccatagatagtattaaaggattagaaggaaatgaatgcttatttatactttctaccgatttagcaccgtatctatttggtgaaaatggtaatcaaaataaaatgttaaattatttatatgttgccttgacaagagctaaacaaaaattagtttttatgattactactgaagtagaggagaaatacagtagaaagtgtattaatacttatttccaagagaacctattaattaaagaagaacgaactagagaagttaccctaacttaa

SEQ ID NO: 72830 - DNA, 2079 bp, Bacillus cereus VD014
atgtatatttcaaatatcaatataactaattataaaaacttccgtaccaactctatagattttaataatggtataaacgttattttaggacataataatgctggtaaatcaaatttattacaagcattagcattaatttttaattctaatagtaaaaagcatttatcaattgatgattttaataaaaacataccaatagaagaattaaaagaatatccacctagtattaaaataactgctacattaaagcaagacgactgtgaagacttaatgagtgatgacttagtgactgtaagtaactggctaactaggttagaagaaccttatgaagctaaactgcaatatgaattttatctcccaactaagtttcatgaaaagtatcagagcgtaataaatgaagcggaaaatatatttgaagtatggcaagttattcaagatgaatttctgagactgtatacatataaaatttggggtggagaatctactaatcaaataactgctgatagtgaatcattacaaaaatttgattttcaatttttagatgcaataagagatgttgaacgagatatgttcagcgggaagaatacgctgttaaaaaatgttttagatttcttcatggactataacataaaatctgataaaactttagaaaaggaacaaaaagaagcagaaattaaaatcaaaaagaaaaaattcggagaatccgcaggagatttaatttcactattgaatgagcggatgacagaagggaaaaaacatattttatcatatgcacaagatataggtgcttcgtatgataaatctactccaaatttcgatggaagtataacagatattgaactttattctgctttaaaattaatagttgaatataagacaggtattaagatgcctattattaataatggacttggatacaataatttaatatttatgtcgttattacttgcaaaaatgcaggttgatgcaagtgaagactatttaggtagtaatgctaaggtatatccaatgttagttattgaagaacctgaagcacacttacatcctacaatgcaaagacaattattaaattttcttaaaaaaaatttaaagaacaaaaaagtgagacaaattttcgttactacacattccactcatatagccggtgctgtgaatttggatgaattaatttgtatatataagaataaaagtgaaactttaattggttatccaggaaaaactttcggtgacaataaaaagagtaaaaaatacgttcaaagatttttagatgctactaaatccaatatgctattcgccgaaaaaattattttcgtagagggattggcagaacagttactcatgtatatattcgctgaatatttgaatgtttctctagaagataatcatatagcagtaataaatgcggatggaaaatattttgatcactttttacatttatttaatatttcaaatccaaatgctattagaagaaaaatagcttgtataacagatagagatccagagtggaaaaatttaaaccctagcgataagtctaaaaaaatatcatttaaaaagtgttatccatttgaaatgtatatagaggaaactgggtatgagtataaacgaaatgaagagaaaaatggttatcctgataatattagattctttatgcaggatgaaaactatggtaaaacattggagtacgacttggttcgttttaacccaaaatttaaggggttggttacagagtctactaccaatagaacagagatttttaagttaatggatcaatatagtgagggtaaatcattagatacaatgcttgggagtttgaatacttcagaagaaaacgaacggattagaaaagcattagcagatgaaagattaaaatggacagacgaagataagaaaaaagcattaattgcttcaagatatttaaattcagtgggaaaaggagaaaatgcattagaattagcttatgaactagaggaaaacttattgaaaaaaaatatagctggagaagaagaaagcactaaatttaaagagtttatcgtaccagattatatcaaagaagctatagaatggatgtgtgaagaatga

SEQ ID NO: 72831 - DNA, 1743 bp, Bacillus cereus VD014
atgattcttatttcttctgaagatacaatagatattgagcaacatttcaaagttactgcggggcctggcgccggtaaaacgcactggctgattaatcatattaaaaacacattaaaaaattctaagagattagagaaaactcgaaaaatagcatgcataacatatacaaacatagctgtagaaactattttaaacagactaggaactcaatccgtcagtcaagtagaagtttcaactattcatagcttcttatatagtcatgttgttaaaccatatcttactcatatagcagaactatttgacatagaaattcaaaaaataaagggtcatgatacgatcgaacctaaacataataaagttcaattttggttagaaaatcattctatgaatgataagttaaggcacccatatacaataaatcaattgataaaattaccagaaaataaagaagcactattcgattggttatcgagtgttaaatatagttttaatagtgaactaaaattaaatttaagaggtaaggatagtaaggctaaacagttacgtaagatagtaaaaattttagaaacagacttatttagttataaaaaaatatattggaaggacggtaaaatcgatcatgatgatgtgctgtattttagttatgaattgattacacggtacccctttattttaagtgtgttacgtgctaagttcccttatttttttatagatgaatttcaagatactaatccgattcaagctaagatagtatccttattagcagaagaagaaactattgtaggggtaattggagatcctgcacaatcaatatattcatttcaaggtgctagtatagaagagtaccttaaattcaaaattgaaaatcaaagtgaatatactattacagaaaatagacgaagttcaaatcaaataatagatttattaaatgaaattagaacagatattgatcaaactacaactagaaatgtagaccatgatagacctatcttatttgttggaaatagcatggaggcatataatgaaattcaagaaaaatacggtaatggcatgttcattcaaaccttagctagagataatccaaccgcaaatgcaatgaaatttgcggtagacaatagtaagctaaatactaaactattagatgaattagctttaaaggataataccaagcgctttaatattataaaaaattcaatggaagctctagagtttgctaaacatagtgattataaaaatgctataaaaataatgagtgctaattttattcgttattctgaaaaagagcaattcaaaaaatccgtcttagtcttacaaaaattaatacaaagacaagggacacttttggaagagcctttaatggaattctatcaattaattagagaagacatagagatgcctggttttagaaaaggtgctagccaagatttttataatacatattcttataaagaggtagcactatgtataacctataaagaagatattagtcagcatcggactattcataaatctaaaggggatgagtttcaaaatgtcttattgatagtagatacgatagagtttcttactaacccaaacttagctgaagatgaagaacaacgaatttattatgtaggtataagtagagctatggatagactatttatagtgacgcccgaattatcaaaagtgaatcgagcaataatagagtctaaattcaattttcaaataatagatttagaaaaagaaccgcaattaatttaa

SEQ ID NO: 72832 - DNA, 2079 bp, Bacillus cereus MSX-D12
atgtacatttcaaatatcaatataatcaattataaaaatttccgtgccaactctataaattttaatgatggtatcaacgttattattggacataacaatgctggtaaatcaaatttattacgagcattggcattaatttttaatactaatagtaaaaagcatttatcaattgatgattttaataaaaacataccattagatgaattaaaggtatatccacctagcattaaaataactgctactttacagcaagaagattgtgaagaattaatgagtgatgacttagtaactataagtaactggttaactagattagaagaaccttatgaagctaaattacaatatgaattttacctaccaactaggtttcatgaaaaatatcaaagtgcagtaaaagaagcagaagatatagttgaagtatggcaacttgtccaagatgaatttctgagattgtatacatataaaatatggggtggaaatcctattaatcaagttactgctgatagtgaagcattaaaaaaatttgattttcaatttttagatgcaataagagatgttgaacgagatatgtttagcggaaagaatacgctattaaaaaatgttttagatttcttcatggactataacataaaatcggatggaacgttagaaaaggaacaaaaagaagcggaaattaaaattaaaaagaaagaatttggggaatcagcaggagatttaatttcactattgaatgagcggatggcagaagggaaaaaacacattttatcatatgcacaggatataggtgcttcatatgataaatctactccaaatttcgatggaagtataacagatattgagctctattctgctttgaaattaatagttgaatatgagacaggtattaagatgcctattattaataatggacttggatacaataatttaatatttatgtcgctattacttgcaaaaatgcaggttgatgcaaatgaagattatttaggtagtaatgccaaggtatatccaatgttagttattgaagaacctgaagcacatttacatcctacaatgcagagacaattattaaattttcttaaaaaaaatttgaagaacaaaaaagtgagacaaattttcgttactacacattccactcatataacgggtgctgtaaatttggatgaattaatttgtatttataaaaatggaagcgaaactttaattggttatccaggaaaaactttcggtgaaaataaaaagagtaaaaaatacgtccaaagatttttagatgctactaaatccaatatgctattcgccgaaaaaattattttagtagagggattggcagaacagttacttatgtatatattcgctgaatatatgaatatttctctagaagataatcatatagcagtaattaatgcggatggaaaatatttcgatcattttttacatttatttaatacttcaaatccaaatgctattagaagaaaagtagcgtgtataacagatagagatccagagcggaaaaacttaactcctagcgaaaaaactgaaaaaaaatcatttaaaaaatgttatccatttgaaatgtatatagatgaaaaagggtatgagtataaaagaaatgaagagaaaaatagttatcctgataatattagattctttctgcaggatgaaaactatggtaaaacattggagtacgacttgattcgttttaatccaaactttaaaggattggttacagagtctactgccaatagagaagagatctttaagctaatggatcaatatagtgagggtaaatcagtcgatttaatgcttggaaatttaaatgcttcaaaagaaaacgaacggattagacaagcattagaagataaacggttaatatggacagacgaagataagaaaaaagcattaattgcttcaagatatttaaattcagtgggaaaaggagaaaatgcattagaattagcttatgtactagaggaaaatctattgaaaaagaaagtttctggccaaaaagaaaatattgaatttaaagtgtttaatgtacccgattatattaaattagctatagaatggatgtgtaaagaatga

SEQ ID NO: 72833 - DNA, 1746 bp, Bacillus cereus MSX-D12
atgattccaatttcttctcaagatacaatagatattgagcgacatttcaaagtcactgcgggacctggtgctggtaaaactcactggttaataaatcatatcagaaatgttttgggccattctgatagattagagaaaacacgtaaaatagcatgtataacatatactaatgtagctgtagaaaatattttgaatagattagggtcacaatccattaatcaagtagaggtttcgaccattcatagctttctatacgttcatattcttaagccatatattaatcatatagcagaattatttggaatagactttcaaaaaataaaaggtcacgataaaattgaacctagatatagtaaagttaaattatggttagaaaatcattctcaggttgagaaactcaagcatccttatacaataaatcaattgctaaatagaccacaaaacaaagatgcattattcaattggttagctggccttaaatatagatttaattgtgaccaaaacttagatttaagtggtgaagaaagtgatgctagacagttacgtaaggtggttaaaattctagaaacagatttacttaattataaaaaaatatattggcaagaaggtaaaattgatcatgacgatgtactgtattttagttatgaattgattacgagatatccatttattctaaaagtcttacgcgctaaatttccttattttttcatagatgaatttcaagacactaatccgattcaagctaagataatatctttattagcagaagaagaaactattgtaggggtaattggagatcctgcacagtcaatatactcattccaaggtgctagtatagaagattatcttaaattcaaagttgataatctaagtgaatatactattactgaaaatagaaggagttctaatcaaataattgatttgttaaatggaattagagcggatattgaacaaactaaaattagaaatgtagactgtgatagacctattttatttgtagggaatagtatagaggcatttaataaaatccaagacatgtttggtaagggtttatttattcaaaccctatctagggataacccaaccgcaaattcaatgaaacttggagtagacaatagtaatttgaatactaaactgttgggtgaattagcttcaaaagatactaatatccaacgatacagtattataaaaaattcaatggaagctctagagtttgctaaacataatgattacaaaaatgctataaaaataatgagtgctaattttaatggttattctgaaaaagaacaattcaataaatctgtatcaatgttacaaaaattaatacagttaaaagagacgtttttcgaagaacctttaatgttattctatcagctaattagagaagctataagcatgtcgggttttagaaacggtgctattcaagatttttataatacatattcttataaagaaatagcattgtgtataaattataaagaagatattagtcagcataggactattcataaatcaaagggcgatgagtttcaaaatgtcttattgataacagatacaatcgagtttcttactaatccaaacttagctgaagatgaagaacaacgaatttattatgtaggtataagtagggctatggatagattatttatagtaacacctaaattattaaaagcgaatcgagtaataatagaatctaaattgaacttccaaataatagatttaaaaaaggaacctcaattaatttaa

SEQ ID NO: 72834 - DNA, 1791 bp, Pectobacterium wasabiae CFBP 3304
atgcggatttctcgagtccggttaattaatttcgccaacttctccaacgttgatgttgaaacgggtgaaagcattgttattgtcggtgagaacaaagtaggtaagagcaattttattcgcggcttgcagttgattcttgaccctgggttgtccgagcgcgatcggcaactgggctttgaacatttttgggatggattaggcgaagaaaaattgggggagacgattgaaatttcagtggatcttactgattttactgacgatccccgattgatggctcatctgaatgattgtgttgttaatccaggaccacccatggtggctcgtcttacctatcgctttcagccaaaaaccgagttaaatcgtgcccctgaatcgctaaaagactatgagtatgtgatcttcggtggtactgatcccgatatgcatattggcggagcgcttcgccgtatgttacccatagatgttcagggcgcgttgcgtgatgctgagaaggatctttcaagctggcgcaattcaccattgagaccacttattgaggagctcaccgcgtcgctagatgatgatgctcgtgaggaaattcagactcagatcgacgaggctcaacgggagctggctggtcatgatgacgtagtggcgacagctgaacgaattagcgaacggttggtagctatcgcgggtgatcaacatgccgttccagtatcgctggggcttgctccggctcgcgttgatgctctgctacgcagcttacgcttgttgctcgacaatggtatccgtggcattggtgatgccagccttgggacggccaatctgattttccttgccctgaaaagcctcgagcttgatcgtcttgttgatgacggagaacgagaccatacgtttttcgtcgtcgaggagccagaagcacacctacatccgcatgtgcagcgccttgtctatcgttacttcttgggcactgatggagataatcgtgatgaaagtactccgctgacaacgattctgaccacccattccccacatatcgccagcgttacgccaatcagatccatcgttctgctgcgtcatgacccggaggaagaggagacaattgctctttcaacggtaaatgcaccattcacgcagcgggatgaggatgatctacagcgctatattgatgtcactcgtggcgaaatatttttttcgcgaggtgttgtccttgttgagggcgatgctgagcgtttccttgtcccagctttcgctgatgcactgggtatcccgctcgacatgcttgggatcactgtgtgttcggtcggtggaactaatttcaccccgtatgtgaaactcctagggccacaagggcttgatattcctcatgtgattctgacagaccgtgatccagtgaacggcaggcatccacgtgttcgcagacggttcatcagtctccttgaattggttgaatatgagcactaccgcgactacgaaaatatggatgctgaagatgtgatcggacttgccaacgattacgggtatttcgttaatgagaatacccttgaaactgaactgttcgaaagcggactggctgaggagatgatagatgtaatccgacaggaacttccacaactgaagcaagagactctaaatacattgcagcaatggctggacgatggtgaagtcgatcaaggtcggttgttgaagctaattgagcgaattggcaaagggcggttcgctcatgcgctggcctcctcggtgtcggaggatgtttgcccggattacattcgtgaagcactggagcatatccgcgatgccgtcgcgtag

SEQ ID NO: 72835 - DNA, 1821 bp, Pectobacterium wasabiae CFBP 3304
atgccgtcgcgtagtgtaagtgcagcctacctagcccaggcttccgagttggctggaaatcctggtcagttagccgcgtataactccctggggcattgcgttgtgcttgccgggcctggaagtggcaagaccaagacacttgtactgaaactggcccgtatcttggccgaggatgttcaggcaccgcgtggtgctgcatgcatcacatatagccaggaatgcgcgcgtgagttgacacgtcgtcttgaagcgctggggctcagagaggcaccgaatctctttgtcggaaccgttcatgggttctgtttgcgtcatctgttgatgccttatgggcgattggccgatctgccgatctcatttccgctgtcggtggcttctcagcgtgtgagtgatcggttactgcgacaatctggtgatcagctctttggctcaggtcatccccataaggccattgatctcgggcggcatcgccgttcagtgctggaccgcaacagcactgcttggcgttcagaggaggaactcgctgcctggaccgaggcttacgaatcggcattacggcaggatgggctaatcgactacgacgacatggtggtattcggccagcgtctgatcgtcgagcatgattgggttttgcccttagttcaggcgaaatttccggtcctcgcggtggatgaatatcaggatttgggggtggcgctccatcgtatggtcaagcgtctggtttttgaggggggcgtgcgcttgttcgctgtgggtgattcagaccagtcgatatacggttttactggggccaatggtgcgttgctcatggagctggcaggcagtgaaggcgttgaaacagttaggctccaattaaactatcgttcaggtgcgggtatcgtcagtgcttctgagatggcgctgggtgaggctcgtggttatcgcgcgaatgatccaaaccgtcagacgactattgagtttgtgttgtgtcctgaggggatggcggatcaagcgactcatgccattgcacagatcatccctgctgctttggctgctaaaccaggacggacgcttggtgatattgccattctgtacagagactatcgtgccggagatattgtggctgatgcggtgaccgctggtggttttgattatatccgtgtggataacgcagcaccttatcgcaaggttgccttgaccagctgggtggaagattgcgccgcatggtgcgccggtggctggcgtgttggtcgtccgcaattgcgtgggctaatagaccgctacctcgcgtttcatcggacgagattggatgatgcgcaagctcgacgtgaggggcagaggctaaccgcgctgctttgggctctacgcgccgaccaacagcctgcgcgtgattttgtcacgtcgctgcgcaatggtatcgttgattcgttgctgggcactgagctggtgcttgcagatcaggctgagcaattgaatcgcatgtctgcagcgcttgccgaaggtggtgcgttggcggcgttggatattgtgagtttgggtgggcgtgatggctcacctgatcaccttaatctgctgacgctccactctgccaaaggctgcgaatacgacgtggtcattatggtcggcttggatctgggcaatctgccgtggcgtggtgagacgccagaaaagctgcgtgagagccgtcgccttttctatgtggggctaactcgagcacgggatgaggttcatatgctgtattctggttttgttgatggtcgctacggctcgatgcgtcaggggcgttccccatttctggatgagctggaggggcggatgcgtgaggctggtttacggcagtag

SEQ ID NO: 72836 - DNA, 2103 bp, Bacillus alcalophilus ATCC 27647 = CGMCC 1.3604
atgtatctaaagagtgtaagcttatctaattttaggcaatttggaacagtaaataaaagtgaacctgctataactgttgagtttaatccaaactttaatatattggtgggagagaatgattcaggtaaaactgctattatagatgctataaggtacttattgggtagtattagtgacgacattgaaaaaataaaacttgaagacttttatagagaatcaatagggacacatagtgattctttttatattgaaggaaccttttcggatttaacagacaaagaagcgggagcatttttggaatggttatcatttaataatgaagatgaatatgaattgagagtctctctgagggtggaaaaaaagataaatgaaaatggacaagagtatattgaaagaaaagtacaggcaggggaaaagatttatgaaagtagattaagaagtcaagcaaaagagttcttgaaaactacgtatctgaagcctttaagggatgcaagcaatgaattaaagccaggatttcgttccagacttgctcacatattaaaagcacatccagcatttaaggaatctaatgatgtagagcattcattagttactaccatacaagaagctaataagaaagttgaggattttttccaagaggaatataaagatggacgatcgttggtaagagatttagagttacttttaagtgactttcacgatgttaacgatcaaagtaagtctaggtctaagttttccgtatctcagactgatttaacttctattcttaagaggctgagtcttgatactgaagatataaacttaggattaggtaatttaaatctattatttattgcaactgaattactattgttgaaaaataactcagaagaaaatgtaattggtccacaaattacattaatagaggaaatagaagctcacttacacactcaagctcagataagactaataaaatatttagaagaagaattaggaaggagcaagaaaagaaatcagtacatacttacttcacatagtacaaacttagtagcatcaatagatcctagaagtataatttttatgcataatagagtagcttatcctctaagagaggaatacactaaattagaacatgaagattatgcttttttacaaaggtttcttgattcaacaaaaagtaatttgttttttgcgaagggtattatttttgtggaaggcgactcggagatgcttttattacctgcacttgcaaatttattaggttacccccttcacaaaagcggagtgtcattagtaaatgtaaacgggacttcatttgaaaggtatattaaactgttttctagatcagatttgtggaaggaacctctagatagaccagctataaaaactccaatttcaattatcacagatatagatgtcaagccaatggtttactacaatattgagggcaaaactaaagctgtgtattctatagttgatcactcacaattaactgatgtactgaatttatgtgatgaacaatacgatgaagtaatccctgagcatataggaattgagtactctacgctaaataaattatcttctgattttggaattacgcttacagaaggtaatagaccagaaatagagaagagggtcaaaaaaagcatatctgaacaatatattatttcttcaggattacaaaaagaaactagtttaatggataaatattcaaattatgatgcgaacttagaggtctgtatttcgccagattggacgttagaatatagccttgccttgagttgtttagctcctttattattagagtcaattcaagaagtgagatataaaaagccatttgaaggaaagaaaaatgaggtctttaagacacttaaagaaaaactaattaaaaccccaaaggatccaaagttagcttatcaagtttttaagccaatcaatgacaaattagtctctaaagcagaggttgcacaatgtcttgcaataaagttaaatgcggtagcagatgatcccgaaatacaaatggagatgaaagagcaaatattcaaggatgataaactaaattatatagtgagagcaattgttcattcttcgactattcctaacgtattggaggaggtaaagtga

SEQ ID NO: 72837 - DNA, 1827 bp, Bacillus alcalophilus ATCC 27647 = CGMCC 1.3604
atgaacatcttagagaatctcaagattattaccccgaagatattgccatcaggatgtgatttttttgatcaacaaaaagaagtaataagtgcagagggatcaattgatatagtggcaggtccaggatccggtaagacaacggttctaactgcaaagtgtggactacttttaaatgatacagcccagagtgataaaggtacatgtcttattacacatacaaatgttgcagtagatgagataagaacaggtttaaagaagctaggtataaacgatattgaatatcccaattttataggaacaattcaagagttttttaacagcttctttgcaaaaaaagcttttcatataattataggagaaaagacgtttaatgtagtagatgatgaagaatatcaagataagtttgaaaaactttttgatgaccgtaaacctgattggtatttggtgaataatccgaatgtgaaaaaatgtaatccacaaattttattcactgataatttatcttacgaaattatcagtgatgcaaaaccttcatatagaaatgccttaaatgaaagtgttagaaccttatttagttggggcgttgtaactaatcaacaatgcttagaattatctaactggtatataaatatgcatgggccacaattaaaaaaagcaatgtcaaatcgctttcgctatgttcttttagatgaggcccaagacactagtcatctacaatttgaaatgttaaattatctgttctctgatagtgaaatatcatttcaaaaatttggtgatccatatcaagccttatataatatctttgatggtaatatagatacttggatacctacaaaacaattagaaacaaattaccgtgaaatttcagagacatccaggtttggaacgagcatagcaaatattattaaaaatgtatgtgtggaaagatacgatactttcacttctttaaatattatagactcattcgaacctcattatataatatataaaaatgaagatgacttaataagcaaatatagagatttaattaaatattatgagctagaatctgactcgttctctaagtcaataaaaaaagatgcgatactctcaccttttcacaatgatttgtcatgtcttttttctatttataccaaaccgtctactatgcaaagaaataaccagagtccagtaaagaacatctttcattttctagtagatatgatctgtaaagagatgggaattacttataagggtataattgaaatgttggaggtggacttaacttgcaggactttgattagtaaatgtattttgaaattagcaaataaaaaccttgaattaaatactgttattaaattatttgaagatattttgattaatttatcgaatagtgaaaaaaaagaattttcaaaagttaacttagaaggtcaagttgaatattttagacaagttttcttttcgagtttaaagaacgttgatgaagaggaaactagtaaatcggatttttatatcggtactgttcattcggcaaaaggtgaaactcaccgatctacattgcttgtgttaaacacaaagtttatagactatgacagtaataatgaactcctaatgtttgacttgttatttgaatacttattagggaattacaaaaatcctgaagagatattagatacagtagaaaaaaatgaaacagtaaaatcgttaaagttagcatatgtagcactaagtcgtcctacacatttaatggcaatcgcaatcccagaaagtataataaaagatagaaatactattataaaattagataaatttggttggaagaactcaggagaacttttacatgtataa

SEQ ID NO: 72838 - DNA, 2001 bp, Bacillus cereus FRI-35
atgttaatttctgaacttcatataaataattttagatcgtttggatataaatcacagatgatagaaactacaaatttaacagcactaattggtgccaatagttctggtaaaacaagtttaatcatggctttattaagattatttggacaaaaaaatacagatagaactttagtgaaaacagattttcatattccagagagcgcggatatatctaaaattaaggaaatagatcttatgatagaagcaaagataacatttccggaattaatgtcacagtcacctgctgatgtaaagacagtcccagaatacatcaaacatttaattattgaagaaacaggtgcagatccttatttacgaattaggttaaagggtaagtgggtacaaggttcaacccccgaaggtaatattgaacaagaattagtttatgtaaaagttccctatggtcatgaagaaaaagaagaagatttaactagagtacaaatacatcaccaaaaattaattcaaatgatgtatatacctgcaatgagggatccagcaaagcaattaaaaaatgcttccggtactttattatggcgtatatttgatggggttgactggccaaaagatttaaatgacgatataaaatctttaacgactcctattgaaacgttatttaaagagattcccagcataaaagagatgcagggaattttaaatactcaatggaataaatatcataaagataaaagatattccaatagccaatttaaatttaatggtaatagtttagaggaatttttaaaaaatgctgaaattttatttaatcctactgttgatgggaattctgtcaagattgatagtctaggcgatggtttaaaatctttattttatataacattagtatctactctacttgaaatagaaaataaacaagaaaaagatgataagcctttgttaaacatcctagctattgaggaacctgaaaaccatatttcacaacatttgttaggaagaattgttagaaacttaaaagaaatatccaataaagataacgcacaagtcattttatcatcacacaattcatctataattggaaaaatagatccagagtatattagacatttacaaataaagaactcagaatcaattgtaaaaaatattactcttccagaaaaagcagatgatgcacatacttatatcaaagaagccgtaaaggcgtatccagatctatatttttcgaaattggtgattttaggtgaaggagatagtgaagaaatagtattacccaaattactgagtgctgacaatatatatctagatgatttcaatatttcagtagttcccttaggtggaaggtatgtaaatcatatgtggaagcttttaaatgatttatcaataccacacattacgttattggacttagatagagaacgaggtggtggcgactgggggagaattaagtatgtattaaaacaacttgatgagaataatagatgctcagaacaacttcgtacagttgtactaactccaagtaacaaaacacgtatttatagtatggaagatatagaagattttcataagagagaaagtcatagattaaagtcactggatacttggataaaaaaattagaaaaagaagatgttttcttttcatatccccttgaccttgatttctctatgttaaaaagtttccaacaagaatatcaaaatactatgacaagagggcctcggattccgcaagatgtagatttaccagaatatgatgaaaaattacaaacatctatacaagcaactttaaaaaataaaaaagctattgcaaggacatattcaggagaggaaaaagagctgatgatttggtataattctctatttttaggtagagggaaaccaggtacacatatagcggcattaaaagatattggagatactgaaatactaaaacatgctcctgaagaactcttacgacttgtaaagcgtgtaaaagaaaaagttggattagtaggagataatatagatgaataa

SEQ ID NO: 72839 - DNA, 1923 bp, Bacillus cereus FRI-35
atgaataataaagtattagagcaagattggaaaacttcaaatgatgtaacacttgaagattcagccttacttgctataagagcttctaatcatgttgcaattaccgctggaccaggtgctggaaaaacagaattgttagcacataaagctggttatcttattcaaactgggatttgtccaaatcccaaaaaaatattagctattagctttaaaacagatgctgcaagaaatctgcaagaacgtgtcgaattaagatacggtaaaaatgtagaaaatagatttgaatcaaaaacctttgatgcctttgctaagggaatattagatcaatttatatacgcattacctaaagactatcaacccaaaaaagattacgagattattttaaacgaaaaatcactaaacgatataataaaaggatatattacaaactctaatccttatcatcctaattggcaacatgaatacgatcttaaaaaagtgttggaaaccatgaaagaaacggaattaccaatagtggtttttgagagtgatttatattcttggataaacgaaagactgtggacagttttattaaatggtaaggggaatttaacaagttcacttactttttcaatgatatcaattttagttgagtatttattaaaaaaaaatccattaatagttaaggtattacaagcgacatatagccatgtttttttagatgaatttcaagatacaacatataatcaatataatctcctgaaaacaatatttttgaactcagatactgttattactgctgtaggagataataaacaacgtattatgggctgggctggggctttacacaatgcatttggagtatttaaatctgattttaatgcaactgagcatacacttttcaataattttagatctgcgcctaatttagtttctatacaaaatattttttctaaaactcttaatgacacttccatagaagtccttccggttggagagtggaacgaaaatgatggggtttgtgaaatatggaattttaaaaatcacaataccgaagcaattctattagcgtctcatataagtgaatggatgaaagccgaaaatttaaagcctagagatttttgcatcatcgttaaacaacaagaacatatctatgcagctgaaataatgaaagagctttccaaaattaatataaaaagtagaatagaaaaagattatcaagaccttctatctgaggaattagttctgcttattattaggcttttacagttaagttatgaagaaaaatcccctgaattatggctgaacgtcattgatgaaatcatagatatgaagtacagagacgttgatccagaaaatataaaatatctcattatagaaaatgaattagtaaaaatgctagataaggttagaaaactttattcagatattgatgttacaaactttaattcacaattcacagaaatattacaagaaattatagtttttttaggcgaagatagtatcaaggcaacttatccaaaatacaaacaagctaattactttgatgaagtaatacaaaaaatgctagataaactaaaatatcaaaatcgtatttcaatgaaggaattattacaagagttttgtggtaaagatagtatacctattatgacaattcataaaagtaaaggactagagtatcacactgtggtttttattggagttgaagatgctgcattttggagtttttctactcaaaaagaagcagataaaaatgcatttttcgtagcattatctagggcaagacaaaaaatgatatttactataagtaaaaaaagaaacattttgaaatatggtaaggagaaaaatataacgcaagaaactgaaaatgtctctgagcttataaaaacgttaatggatgcaggtgtccctttaattgaagaaagtgatttggcaaacttataa

SEQ ID NO: 72840 - DNA, 2337 bp, Rhizobium sp. CCGE 510
atgcatattgaatcaattagacttcgtaattttcgccgtcttaaggacgtacgtatcgatctggcctccgacatctctatcttcgtgggcgcaaacaatagcggtaagacgtctgccacccacgcgctccagctctttacggcggcttcacgcgagcggttctcgcttcacgatttcagctcggactgttggattgccatcgatgcattcggcaccggtgaagtagatgaactgccgactatctcgatggatatctggttcaacgtagagccggcaaacctccatcgggtcgtcgagctccttcccagcctcgcctttacgggaagcaaagtcgggatccgagtgtcgtttgccgcctctgatcctggtgcattgttgcagagcttccagacagcccacgccctcgcggcagcgaacgtccagccggcagcgaacggcgctggcgactatcacccttcacctagaacgctctgtgactaccttcgggacgacggaggcgtcaggctgcgtcatggttttgaattacaatatcatgttctggatcgggcatgcttcgacaacgatctgcgcgaacacgctgattatgtcccgcgactgatctcatcagacaagggacggaacgggaaggacatcctggcgagcctcgtcaaagtcgacttcctgcatgcccaacgccacctttcagactcagcaggaggatcgcgtgccgaggagctgtcacgtgtcctcggccgtttctaccagcgaaacctggagcaaagctccgcagatttcgaagcccagcgtgcgcttgccgcttccgagatgatgctcaacgatcatctcggccgtgtctttggcccgaccttagatcgtctctcggagctcggttatccgggattggggaatcctcgcctcctaatcaagacagcgttgaacccagcgacaatcatgagttcccaggatgggacgaaggttcactatgcgctcggcgatgaaaatgaacacggcgtactgccgacgcttcccgatcggtacaatggcctcggtttcaagaacctcatctacatggtcgtcgaactcctcgacctccacgggagatggttggatatcgaggagagcaggccgccgctccacctcgtgttcatcgaggagccggaagctcacctacacgttcagcttcagcaggtcttcgtccgaaaggtcctggatatccttaagatcgacggcgacgacgggctctactatacgagccagctcgtggtctcgacccactcgtctcatattctctacgagcgtggtttccggccgatccgctatttccgacgcatgcccggagcagccggacagacgtccgacgtactcaacctctcatcgttttatgaagatacgtcgccgcgcaatcggaatttcctcgagcgatatctcaagctcacccattgcgacctgttcttcgccgacgccgcggtgctggtcgagggcaatgtggaacgcctcctgctgccacagatgattgcgatggcggctccccgtctgcgatcggcatatctgagtgtccttgagatcggtggagcattcgggcaccggttcaagagcctaatcgaattcctcggcatcacaacgctcatcataacggacatcgacagcgtgctccctggtgcgccccctgagatagaacccgaagatgacattgccggacaagaaggtgaaccgcagcctgccgtcgcagagaaccctgcggaagcggaagcggctgctattgtcgcggaagaggaagagccggaagacgagaatgaggagcccggccccggcaccgcctgcctggtttcgattgacggcgcggtcacgtcgaaccagacgctgatcaaatggttgcctggaaagacgcttattgcggatcttctggctgccgatgctagcgactgcacacagacgagagcggttgagcatggggcactggtacgggtttcctatcagacgagcaccgaggttgtttggagagacgagacaaggaccctcgccggacgcacattggaggaagccttcgcgctcgaaaaccttgtctggtctcaggataaagaccgtcaaagccttaagctcaggattaggggggcggccaaactagacctctttgaaatctccgctcggcttaaccggaaaatcgctggcgccagcttcggcaagaccaactttgcactagctctgctcgagcaggatccgaaggactggtcggtgccacggtacatcttcgacggcctcaggtggttggagaatgaagtcatgccaccggaggacggcgggggcgacgcacgcggagacgccggggagctcgaacctttcggggacatcttcgaatga

SEQ ID NO: 72841 - DNA, 1884 bp, Rhizobium sp. CCGE 510
atgaccagtcgaattggaaaaccggacacgaaggccgacatcgagctgcgtaccgcgctcgacaatcggccgcccacaaacttcgtgatggtggcaggagccggatcagggaagacaacctcgttgatcaaggcgctggctcatctctcccgaacgcgtgggaacgagcttcgcatgcgcggacagcagattgcctgcatcacctacacggacgtggctgtgaacgaaatccgaagcgacgtgggcaacgatcttctttgtcacgtctccacgatccatagcttcctgtggtcgctaatccatacgttccagacagacattcgcgattgggttctctcgcggatcgatgaaaagatcacagagggaaacgaccggctcgccaagccggggacgcgtgccgcgacccgccctaagatcgaggccgcgctagctcgatatcaacagcagaaggagattgtgcgtcgcctgcagaggttcacctacggaaccggcagcgactatggtcatggcgtgctggggcacccggatataatcaaactagtccctgccctgatcgagcagaagcagctcctgcgaaaccttctggccgcacagtatcccgttttgttcgtggacgagagccaggatacgaccccggcctttatcgaggcactccggaaggtcgcgcaaacggtggaacatccgttctgcctgggatttttcggcgatccaatgcagaagatctacactgcgggcgctggtgtgatcgatcgcgagcaggattggatcgagattctaaagccggagaattttcgatgcccacagcgcgtgttgaaggtcataaatgctatccgggcggaagacgacgatttgaaacaggtgagaggcagaacgataaaagtggaagatcaagacgtcccagtggatgggacggcgaggatctttcttctgcctgcagatgaggatcgcacccggcgcgtcggtgaggttcggaagtatcttggccacgtcaacgacgaccctctatgggagagcgaccagaaagacgcagatgtgcggatgcttgtcgtcgttcatcgaatggcagcaaaacgactgggtttcccaaatctctatgcatccttgaatgacgaggcgcctgacagcctgaaggacggcctcgttgatggcaccgcatggccgcttcgtccattcatcacataccttctgcccttggcatctgccgtgcgagcgggcgacgacttcgagatcgtaacgatactgcgcgagaagggtccgctgcgtgatccaggagccggtcaaaatgtagccggcgttctccgacaacttcacgacgcgacacatgaactcgatcgtcttttttccgagccagcgacaacgatcagagagattctgaacttcgcgataaattcgtcgctgatcgctgtagacgaacggatgtcgcgacatcttgcagccccggtaaacccggcagatgagcttgatccggagtacctcccgatggtggaattcctggccagcccggccatcgagctttggggctaccagaaatacatcgaggatctgtctccctttgctacccagcagggcgtcaagggggccgaatttgacagagtgctcgtccttctcgacgacgaggagggcaagggtcagaacctgttctcgtacggcaaatacttcggcatcactgagctgtccgatacggatgaacgcaatatcgcggaacgcaaagattccgtgatcgaccgtacaagacgccttttctacgtctgctgctcgcgtgctgttcaagacctggcggtggtgatgttcgtgccagatgtcaccgcggcaagggctgcgatccttaacaagggcttctttcgacccgaggacattctggaggaagggtcacttgctggctag

SEQ ID NO: 72842 - DNA, 2028 bp, Bacillus thuringiensis HD-789; identical to SEQ ID NO: 72154

SEQ ID NO: 72843 - DNA, 1962 bp, Bacillus thuringiensis HD-789
ttggctacagaaatagtggagaatatgttttgtgttaatgcgccagcaggtagtggtaaaacaacaaaaataaaatcaatgattgtaaatcataagataaaacatccaatagataatatactttgtataacctatacaaagagagctgcggaagagcttaacaaagattttaatgaagaagggattcatataagtacaattcattcatttcttcataaatttttaaaaatatatttttgtaagactgaaatgaaggatttatattttgaaatgtttgaggacttaatcaaagaaagtatagagaataaagaggaaaaagaacatatagttacaagaaaccaaaagtatattgaaaagcatggttgtttatcggtagagagtatcaaagcgaatatagatgctatttattataatgagtcttcgaacaatcatctttacacagggggattagcccatgatagtttattgttattcgcagaaaaggtgtttgataagtttccgaagattaaaatgagactaacgcaaaagtatcaatcaatcttcattgatgagtatcaagattcggctgctagtgtattaagaatgttttataaggcatgtcttaatacaaaatcaaacctctattttcttggtgacaagatgcaacaaatatataagaactatgatggatcatttgaagaagaattaaaaactttgaataccgatattaaattagatattaatcaccgttcaataccagatatcgtttctgtgctaaataatatatataatgataaggggtttaaacagaacccgtctaaaaaaaatcttgatattaaaccagaccatccaccaagaataataatgtgtgataacattcaagaaaggctaaaaagagagtgttcaatttatcccgatgctttattgctatttttattaaatcaacaaaaatttgcttcaattggtgcaagagaattatataaacaatttagtcacttggagagatattcacatgcaaaacaattaagtgccacggatgttttatctgataatactagtgaaaatacagatcctcttttaaaactactttttatagtcggagaagtggtagattattataaaaagtctaatgttggaagtataattcaaatttttaaagcgaatcgtaaattatttgacatggggattggtacaattactagtcatcgggatagaattgatttgaccaaactgttaaaacagctgtatgaagattatcataaagaaatctcgataagtgaatttttaactttattgaggggatgtaatctatttaaaagcagctatatagataacatgggcgatgaatatttggaagttttaaaagtgaaattaaatgaatttaaagcactatcaaattatttgcgaaatccagcagtctcaacacagcacggggtaaaaggagagagtcataatactgtattctttattgcagaagattcttttaggacgccaatagttcatatgcataaattcttaaaattatggactattaaggaattaacgttagattctttggaatctttttattatgattataataaatggattgaagatacaattagccacttgggatgtaaaatatcggatttaaataaagaaagtcacaatgaacataagatttatttaaaaacaagggtagagcaattatgcaagcattttgaggctgattttatatttaaggatttatgtgaagaatcttatagtaaatatattctcaatcccaatgttacaaatattaaaaagtgttttaaagaaagtactgtgtatggtgttctttcggcttataaacttttttatgtaggttgttcaagagcaaggagcaacttatctatttttgttgataaatctaagattgaaggtttctcagaggaattgattgttaagttaagaagaattggttttagtgttgaaattgaaacaaaagaattgcagaaagtgtag

SEQ ID NO: 72844 - DNA, 2145 bp, Klebsiella sp. OBRC7
atgtacatatcagaattggttctggtaaattataggaatttcaaacgcagcagatttgtttttgataaagatattaatactataattggtgagaatggcactgggaaaagtaatttatttagggctataagactgttgcttgacgatgaaatgctatttagagcctataagttaggagtcagcgattttagccatgatttagaagactggagggggcactggataataattaatattaaattcagggatatatcgcacgatgaatctgttcaatccattttccttcatgaaggtgggggggtagaagttgattctgaaaatgatgttactgaggcttcgtataaccttatatttagacccggaatatcaaagaggttggaattggcaaggttacctgttggtgacaaggctgcattaattgacgttagaaataatatttcaatagatgactatgagactgtatttaccggaagaagttttgccaatttttacaatgaagattcgtatttaaagattgtaggtgattttgataaagttgtatttccgagtaaaattgatagcaaaaatataggttggatcataaacaagcaaatgtctttatcaaaggacatttcttttacttttataaaggcattaagagatgttatacaggattttaatggtaataaaaggaatccacttttagagttgttagagattaaaagtgaaactttaaacaatgaagactatgaaaaaataattgagaatgttatttctttaaataaggatattgaaagtcttcctgatgtaattgatgtttctaaaggaattcattcaacaattagagagacggtaggtgaggctttctcacctactaaattgacgattaagtcacaacttccagatgaacctgaggaactacttaagtcattaacattgaatattagtgaaggctctaaaaattttgatggtactatcagtgatatgagtcttgggggagctaaccttttatatttgaccctaaaaattttgaagtataagtatcttgtaaataaagggaaagttgcgaatttcatcttaattgaagaaccggaggctcatttacatacacatatacaaaaagctctatttaaaaaattaaattttgaaaatacgcaaattttatattctacacactcaacgcaaatatctgaagcctctaaggtaagtaaggttaacataatatcaaaagcagaaggtaaagattatgtagatgtgtgccagccatcaacaggattaacagtcgaagaaatccataaacttgaaagatatttggatgctaaaagaagtaatcttttatttgcaaagaaagttattttagttgaaggagatgcggaagagataatgattcctgcattattctctaaattctttgggttaactttggatgagttaggcgttactattgtaaatgttggaagtacgggttttaaaaatgtcgccaatatatttcataataaaagacttagaaggcgctgtgcaatcataactgaccttgacagttcaatttatagtgaaataagtaaaaaagacagtaaggtaataaaaacaaaaaaaagaaaagcattaggctctgataaaataggaaaggaaaggaaggcattactagacatattctgtcaacataatgaatatgttaagccattttatgctgaacatacttttgaagttgattttctgaattattacggtaatgaagaatacgtcattgatgttcttaatgatatatacactcataaaagcaaaattaaaagcattgaagcagaccttagaactgagaatgtggaggtttatggagacaaggttttgtccgttgctaaatatgctggtaaaggatggttagcactggctcttgctgaaaaaatagatcataatgttctgattccggaatatatactagacgcgttgtccttctctatcggaaaatttaataagtcaacattacttgttgttctgctttatcgtaaacagttttatcttgattcttcaaaatcagaagaattggaatgcattgatcaaataattaacttgctgactcagagcaagagagcaattaaaaggcagttaataaaagatttgtattcaaaggcttttgggaaacatgataatcttttaaggatgatctaa

SEQ ID NO: 72845 - DNA, 1764 bp, Klebsiella sp. OBRC7
atggatagacttttccttagagagtttttaaatgaaaaacagatagatgctgttctatttgataaagatgctgttgtgatggcttgtccagggggaggcaagacaagaactttggtttataaaatagctcataagctttcgtccaaaacagatgatcgctttgttgttgcaattacttatactaacaatgctgctgatgaaataaagaaaagaattgtcgaaatgggtatttcactagacagattatggattggcacaattcattctttttgcttgaggtggattcttaaaccttattcaggattctgcgaagatataaggtttgggtataggattattgacccgcatgatgctgatgaattgaagcaaaggttttgcgataaacattcctgtagtattttcaaaactaattttgggtggaatgaaagaggtttgaaagttaagggggttaacaataggaaggcagtagaagagtattatagtcatcttaaatctaacgatttaatagattttgatcaggttatatatttttcttatttgcttttggttcaatataaatcgattgctttaaacctttcgagaatattcaatctcatccttgtggatgaatatcaagacacccaaatcctacaatatgaattgctttttcctttggcaaagtcaaggggaaatacctgtcgcttattttttgtaggagatcccaatcaggcgatatttaattccatgggaggagttgcattaagttttgaaaattttcgcgctagatctgggattgattttaatttactttatttgaatgacaattatcggtcaagccaatctattgttgactttttttcgttatttagaacaatttctgggcagccatttaaagcagttggtgaatttagaggttatgattcaaaagtgacttttaataaaggttgcagtattgaaaagttagatgattatgtaaaggaattagtttactccgccataagtgatgggatatcacaatccgatatttgtattattgctccatggtggtttcatttatctgaaataacacggcgcttaatggcattaatgcctgacattgctttcaatggccctggtgtcacacctatctcattaaacagggaaagtctttggtataagtttgcaagaattgctttaactccgtcctcgcctaaaaattatttgacaaggatttattatgctagtgagttgctaacacagttgaatgaagctggttttattttgaaaaatgaatcaaccgaggttaagaattttttaaggtattgtaactcattgaatgtgcgagaaatagatgggctagactatctgaaagctttttttaatgagagttcagcgtattttgattttgatattatgcaaaacgaagagtttagcgaatcatacaatgcattttttgcttctgcacaaaaaagaaaggagaaactggagattgaaggtttgggagtactgacaaaaactgaacactataaaaaaatgtttgataaaaaatcaggtgtgacagttactacagtgcattcagccaaggggctagaatttgattgtgtcattgcttttggattgttgcaggggattatcccacgatttgatgaagatgagcagcagtctaagaggctgttgtacgtattgtgttcaagagccaagaaaaaattacacttaatatcagaagtcgaacggcggcataaaagcggtccttatcttgcaaatgaggtgctctgtaaaaccaaatttgattatactaatgaatga

SEQ ID NO: 72846 - DNA, 2022 bp, Sphingomonas sp. LH128
atgtttctcaagcgcgtgaagttggctaactttcgttcctttgacgatgcgcatctcgaactgcagaaggacctgacggttcttgtcggcgagaacaacggcgggaagagcaatgcgatcgacgcgattcgcctggtgacgctcccgctgggtggtcgtcgggagatttactgcgagcccaccgatgtccgcttccagtgcggagcaacacaattcgagctggaggcgcatttcgcggaactctcggtaggccagcaggggcgcctaatctctgccgctaccgatgccggtctgacgagtgcctgcttcggactgcgctacgatggcagtcggcagggggcgagaccgcagctgtgggccggcaaggacggaaacgcacccgaaccaaactgccatgacatggtccggcacgtctatctgccgacgctgcgcgatgcgaagcgggcgctcgcatccggcaacccgactcgcatcatggctctcctgaaccacttcctcgagggaacgaccgcctccgatctcgcgaaggagcttgcacggacgcgcaggcacgacgtgctggtgaaggtcgacgatgccgtcgaaaaaggcctttcggccttgacgggcggcgtgcgccggcaggccgcgacgctcggcttcgcgtcggacgaggggttgatcgacatcgcccgcgatctgcgcttcaagctcgccgatcacggcgtcgatcctgaggatttgcggtactccgggcacggctacgcgaacctgctcttcatggcgatcatcgcggtcgagttggagaaggtccggagcacggacctgactctgttcctcgtggaggagccggaggcgcatctccatccgcaactgcaggccgcggtcctgtcgttcctgcgtgagcaggcggagcagtcgcggaagagcctcccgaccgaccacggtcccgcgggggaactacaggtggtggtggccacgcattcgccgaacctctcagcttgggtcagcagcgataggctggtggtgttcaagtcggtgatagcgtcggcagggacggcggaagcggatgagctgctcgaacccggatcgatcgacgccagcatcatcgaggacgtcctcggccatgatgcggatggcgatggcgaggctgccgcggagtccgtcgcggaggcgatctcggccgtcgtgccacgtcgtgcgacacggtgcctgcctctcgccaacatgccgcttgaggatctcgatcgccgcaaggtcgaccgctaccttgatgtcacgaaggcggccctcctgttcggcggacgggcgctgctcgttgaaggtatagccgaggcgctgctcctgccggccatcgcgaagcaccatgtcctgaaggaccacccggagaagctccggctcttcaggtccgccgtgttcatcccgatcgatggcgtcgatttcgcgccatacgtgacgcttctcctgaccgaactggagggtgcaaggattgccgaccgcgttgtggtgatgaccgatggcgacagggggctgaaaaaggagaaggaggacgaggagggagccgacgacgttccggatgaagggaccgaggcaccggcgggggaaaccgagaagctccacgaagccacggaagcccacgaagccgaggaggtctccgaggtcgaggacgacgccgccgacgacgggctgcttccaggtgaacggaggaagcaggccttggagaagctagtcggcagactaggcgcgatcgactacttcgcggcggtcacgagcacctattcgctggaatcggagctgatcgaggcgggcaacgaggaccttctggagaaggcctacctcgagttacatcgacgctcgaagaagaagtggcgcaacgccatgaaactcgatggcgacgagcgcgctgcggcgatccaccgcattttcaagaatgctcggaagggcgacttcgcccaggtgttggcgcggctaatcgaggacggcgagaagctagcagtgccaccctacatcaagcacgccatcgagcagttggtggccacgtga

SEQ ID NO: 72847 - DNA, 1725 bp, Sphingomonas sp. LH128
gtgagcgaagattacgcgccgaccaaggagcaggaggctgtgatcgggcataacggcccggctttcgtgaccgcctgtccaggtgcgggaaagacgcggacgatggtcgagcgggctcgacttctgctgtcagacgggcgggatcgccgcggggtcgccttcctgtcgttcacgaacgcggcggtcgacgaactggaggtgcgcctccggagcttcgggatcctgccgacgccgctgttccccagcttcatcggcaccttcgacaggtttctctggcagttcttcgtggcgccgttcggaatggagggctgcgacgtcacgccccggctgatcccagacaagggcgactgggtcgtgcagccctatgagaagatgcaggggcttcctctgaaggcgttcgaccgcaagacaggaagattgaaccgcgcaatcgccaccgaggagggctttgacgcggatcgcgacgccaagaagcacgaggctcgcgcactccggatgctggcctccgcccgctcaaaggggcatgtcgatttcgaggacgtgcgcacctgcgtgaagggacggcttgcggacaaggccttcgctgagcggctggggaaggccctcgcagcccgtttcaaagagatcttcgtggacgaggcgcaggactgcaatcccgacgacctcgaggtcgtgcagtggcttcggacttcggggcttatcgtcaaggtgatctgcgatccgaatcagtcaatctaccagtttcgcggagggatcaccgacgagctcgacaggttcgccgatcgcttcgaggatggcgacaggctgccgatgagcggaaacttccgatcgacgccggcgatatgcgccgcgatcgtcggattgaggccgccctcggcacgcggcgtgccggaccgtgcgctcgggagccacaaggccgattccaccgccctgcacatcctctcatacggtggaacatcggtgccggcggcgatcggcgtaaagttcggcgaactcgtaaaatcgcatggcattgcggtggcggatgcgcccatattggcctcgaggctgcagagcgcagcccgggcgatcgggcatcctgtctcgaaggacacggtgcacaagaccctgctcctggccagggccgccactgatttccacttctccttcaacctggataaccggcgcgaggcgctgtccaatctccaccgcgcgatcctgctggttcaggggcggatcgagaccgctggcgactatcaccgacatgtgttgtcggaaggcctggaggacggtcgttggcgtcccgagatcatcgatgctgcggcgaccctgaagttttcgccgggcatgtccgccgatgcgtggctcgacaaggcccgccgcgcattggcacccggactcgcgacacccggcggcatcaggcagcggctgaagtctagcaacgagctgctggccgccctggccactccgcccgcagatgcgcatccggcgcggacgattcactcaacgaagggcctggagttccccgccgtgtgcgtcgtcctgacgagcaataaggcgggaggcattctcgagcatctagaaggggcggctcgtcccgaattcgcagaggatgcccgcaagatctacgttgcggcgtcaagggcggaaaggctcctcgtgatggcgatcccgaagagccgagcgaagcgattggagacccttcttcaagggaatggctgctcgacggcccgtcacgacatctga

SEQ ID NO: 72848 - DNA, 2337 bp, Sphingomonas sp. LH128
ttgaagaagctggctatccgcaactttcgcaggttgcaggacgtcgttatcgatttcgcttccgatatctccattttcgtcggcgccaataacagcggaaagacctcggtcgggcacgcgcttcagctgttcaccgggcatggccgcttcagcatccatgattttagcgcggagttgtggtcgagtatcatcgcattcggcgcaggtgaggaaggcgccgcgctgccgaccctcgaagttgatatctggctggagatcggcgccgaggacgtccaccgggcgatcgatctgctgccgagcctcgcgtgggatagcacgcttgtcgggatgcgcgtcgcttatactccgatcgacccggaggcaacgcgtgccagatatgccgaggcccgcgaacgctctctcgctgcggtcgacaaggacgagcatgatgtgccggtgttcgacccggcgccgcgtcaccttcgcgattacctgcgcgagcatctgaatgacgaatatgagctacgctacttcatactcgatccggcgaagttcgatgccaacatggtcgccgaagtcggctatgtcccggcatcgctcgccggccgcgatcgcagcgggcgcgaaattttaagcggcattctccggatcgatttcctcaatgcccagcgccatttgtcggatagtcctggcggcgcccgcgcggaggacctgtcgcgcgtgctcagccgtttctacggtcgcaatctcgagcaaaagggcgaggatctcgacgcccttcgcgccctcgccgcatccgaagtttcgcttaaccagcatctcgagcgcgtgttcgagccgactctaaggagcctcgccaagctcggctatcccgggctgtcgaacccgcggatgatgatacgatcggcgctcgatccggcgcagattatgagcagccgcgacggcgcgctggtccactatgcgctgggtcccgatgatggcgcacccgacccgccgacgctgcccgaccgctacaatggtctgggattcaagaacctcatcttcatggtggtcgagcttctcgatctgcacgctcagtggcttgcgattgaggagaaccgcccgccggtccatctgatcttcatcgaggagcccgaggcgcatctccacgcccagttgcagcaggccttcatccgcaaggtcatggacatcctttcactcaagggcgccgatcgcaccgcctatacgagtcaggtagttgtcaccacgcattcgactcatatcctctatgagcgcggctttcagccgatccgctacttccggcgtagccgggcagaagcgacctcgacttcggacatcctcaatctctccgtcttctacgacagcacggatgccgatgttcgcacctttctcgagcgctacctcaagctcgcgcattgcgatcttttctttgcggatgctgccgtgctcgtcgaaggcaatgtcgaacgattgctcctgccgcagatgatcgaaaccgccgcgccgcggctccagtcgagctatctgacgatcctcgagatcgggggcgcattcggctatcgatttaaggcgctgatcgaattccttggtcttaccacgctcatcatcaccgacctcgacagtgtcttcggtccgctggatcagctggaggcaggtgtcgagggggctgcaaccgcaggagacggccctgtgcaggcggttggggacgccgccgtggtggacgcggatgacgaagacgaagacgaagaggcgaccgatcagctgccgcttgaaaagccgggcaaggcctgcatcgccggacatccgggagctgcaacctccaatcaaacgcttctgcaatggcttccgaaatgcggtaccgtcgcagagctgtgggaggcgaccgccgacgacaaaacacaggtacgcgccaacgacaacgacgcccttgtgcgcgtcgcctatcaatgccgcaccgatgtgacttggggcggcgacacgctttcgttggcaggccgtacgctcgaggaagcgttcgcgctcgagaatctcgactggtgccagcacaaggatcgaaagccgctccagctccgcatcgccaagaatgatgagaaggatctctgcgagttggccaaccgcattcacaagcgcgttcaggcgaagagcttcagcaagaccgactttgccctcgcattactcgccgaagaccccgcaacctgggttgtgccagaatacatcgctgccggtcttcgctggctcgaagctgaaatcgcacccccggacccagagcccgacgacgaggaaggcgcggaaggtgtgaccggcggcgggcccgacgcccctgccgcgctcgagccggatggcgaggttgccgcgtga

SEQ ID NO: 72849 - DNA, 370 bp, Sphingomonas sp. LH128
gtgaccagccggatcggcagccccgacacgccggcggacatcgaagtccgcgcctgcctcgattgcaaagtcccgcgttcgttcgtgatggtcgcgggtgccggctcgggcaagactacttcgttgatcaaggcactcgatcaccttgcccggacccgaggttcggcgctgcgccgcgcgggacagcagattgcctgcatcacctataccgaggtggccgtcggcgagatatccgaagatgtcggtgtctcgtcactgtttcacatctccacgatccacagttttctgtggtcggtgatccgtccgtttcaaagcgatatcgcgacctgggtcggcatccgcatcgaggagaagatcgccgagcgccgcg

SEQ ID NO: 72850 - DNA, 429 bp, Sphingomonas sp. LH128
gtgcgcgtcgcctatcaatgccgcaccgatgtgacttggggcggcgacacgctttcgttggcaggccgtacgctcgaggaagcgttcgcgctcgagaatctcgactggtgccagcacaaggatcgaaagccgctccagctccgcatcgccaagaatgatgagaaggatctctgcgagttggccaaccgcattcacaagcgcgttcaggcgaagagcttcagcaagaccgactttgccctcgcattactcgccgaagaccccgcaacctgggttgtgccagaatacatcgctgccggtcttcgctggctcgaagctgaaatcgcacccccggacccagagcccgacgacgaggaaggcgcggaaggtgtgaccggcggcgggcccgacgcccctgccgcgctcgagccggatggcgaggttgccgcgtga

SEQ ID NO: 72851 - DNA, 370 bp, Sphingomonas sp. LH128; identical to SEQ ID NO: 72849

SEQ ID NO: 72852 - DNA, 2013 bp, Bacillus cereus BAG6O-1
atgcaaacatcccgttcaccttatatatcaaagataaagattaagaacttccgcaactataaagatgtagatgttactttaaatcataaacaaataataattggagaaaataatgtaggaaaaacaaattttttacgagctatacaactcattttagacccaaagttatctgatgaagaccgttttttacaagaatctgacttttacgacgatttagaagaccctatgaagaataaggaaagaatagaaatttctattgaaattaaaggatttgaacataacaaaacaatactatctactttacaggaagcctcagtatctacaaaaccacccactttacgtttaacatatgagtattatccaacagaagatggtacgggtggataccaatatcgtatctaccagggcactgatgctaataatttgtttacacattatcatcgacgttttctaaatataaaagttattcccgctattcgtgatgtagaaagcgaaatgaaaagtctgcggaaatcaccaatcaatcagttaatcaatcaatacgatattagaaaagaagagcttgaaaaaatcgcgaccgctcttaaagaaaaaagtgatgaagttctatctattgatgaattagtagacttaactcaaaatataaattctcgattttcagatattatcggaacacaagtagactctactgtttcactagaaacaatagatatagaccctaatcgagttctgaacactttaaaattgatgataggacaagacaaaaaacgttccactagtaatacaagcttgggcttgaataacattctttacatttccttgattttattatctttacaagataaaactattccttctattttaaaagaagatacgtacggtaagttagcattagaaaaggaatcttccattttggctgattgctatgaaaaaaatgagagcagtaactatatactgaaaaaagatatccaggagaaagattatgctaaattatatagctttatggataataatttttcttctaataacggatttacccttcttgcaattgaagaaccagaatcgcatttacatcctgcacttcaacggattatttataaagatgtaatgaaggaaaacacatccattttaatgacaacacattctccacatattacatctgtagcaccaatcaattcaattgtacatttacattctacaaagaatggtgctgtcattaatactacagcttctcttaaactagatgacagagataaaaaagatttagaacgatatatagatgtaaaacgaggagaaatttactttggacgtggagtaatcttaatagaaggcgtagccgaggaatatcttatcccaagttttgctgagaaattaggaatgtctttagataaaaaaggaattatttgttgcaatattaattccaccaactttaaaccttatgttcaatttttagatactttagggattccttatgtcgtaattacagatggggactattacatatgggaagaaaagaaaaataagaaaggtactcttgaacccaaaaaaacatttggcattctcgctcaagatagccatgaagacttcggttatgatggaaacgacagaatcaaaaaactactaattgacttaaagaaaatcaaaagcaatgaaattcctgaaggttataccaaacaagacactctatttaaagtccacaacttttttataggtattcacactatggaaattgatattatgagtcgtattagcaacatgcaaacggaaaaagaactactatgtaagatatttaatgaactcacactaggtggggcaatacaaaagagtaactttaaaacatcgttagaaaaaggagaatatgtttcttgtcttaataaaattgaaagtagcaactctgggattggaaaaggacgatttgcccaacatttatccgtagaatgtactaaaaactttatacctagctatatacaagctgctattaaaacaattttcaaaagagtggacgaagtttga

SEQ ID NO: 72853 - DNA, 1827 bp, Bacillus cereus BAG6O-1
atggaattatacaataaaaaattaaaacagatacaacaagaccctgagcaatttactgcctttcaatccaatacaagtatcgttgtcaaagctggacccggtagtggaaaaacaaccattctaacactaaaaatcatgcagttattaaatgaaaaaattgcatttcctagaggattggcttgtattacctatagtaaggaagcagcgaaggaattcactgaacgtttacaaaaaatggggtgtccaaaaagaaaaaatgtttctctaggcacagttcattcattttgtatatcccaaattatcatcccatttgctaaactttttaatgacgatttccctcttcctttagacattattacagatgccgagaaacaaaaaatatttaattcaacacttacaaaccttggtatagataagtacacgctaagtgtggaggaaatggataaagaacgtagctttactttaacaggactaagtacagtaccagtaactttaaatccaactgcagcaaaagttgcatacgaatatgagcaacaactaaaaaagttaaaaaaaactgatttcattgaaatcgtaaaatactcacgagagctcattaacagagaagaatatattcgccgttgcttagaatctagatttccttggatactcgttgatgaatatcaagattttggaaaaccattacacgagatgattctttctctcttaagtttaaccaatataaaggtctttgcagtaggggacccggaccaatctatttatggttttaatggtgcaatacctgaatatttattagagctatacgataaacctgacatttcctccgtacatttaaagacaaattacaggagccatcaagatatcattgatgtctcatctattgcattaaatgtcgatgatagagagtataaagcaggtatagaatacgatggtaacgcagaatttcatttcattacgtgtgaagaagagcttgatacacaatacaattatgtagtgaataccattattccaaactgtcaaaatcaaggtattcctttacaagaaatttgtgtattagtgaaagatggtaatagcattaaaaatttaagcacagtgatgaaagaaaaacagattccacattatttttcaaaatttgaatttgcaaaaagtgatgttgtcctatggcttagaagttgtgctttatggctagtaaatccaacttcccaatctttcacagaaatagttaacttttggattcaattattgaaaaatgagacgaagcatttctctgatgaagaaacattaatgctacaaaaaaaactttataccattcttgaagatagtaaaaaatatgccgaaaacttaaatgattggttaacctatcttgaacaagaattaaatcttgcacaaattctaaatgaatctgtaacctatttagacgaaaacaaatatctcgaaacgctaaaaaattatgcacagagtggttctttcaaaggttataacctatcacagttttcacaaataggtaaacccaaagaccaagtgacactgtctactagacatagttcaaaaggtctagaatttgaagtggtcattatgttaggaatggaaaaaggagtattcccctattataaaaatgaacgcaactctgcaaaattaaacgaagaacgtagagttttctttgtttgtttaacacgagctaagagaatttgttatttactaaggtcaaaaaaatatacaagaaaaactcgcaacggaataatcacttttgaccataaaccttctatgttctggaacgaattatatgaagtatgtgagaataaaaaattagtttcttctacaaattag

SEQ ID NO: 72854 - DNA, 1968 bp, Rhodovulum sp. PH10
atgtatatccgatcagtcacaatttccggcttccggtcatttggacccacgcctcacaaaatcaaattctccgacggtctcactgccgtcattggtccaaatgcgtcgggcaagacagcgctgctacaagcgctgtgcaaattgtttggcatcagccgggggcaacgcaacgttcagcgttcagattttcacttgccggtcggcgtgggaccggatgaccggacggcccgcagccttacaattgaagttatcatcgccttgtccgaactcgccaaaggatcggcaacatcgaagacggttgcgccttgcttcaagcacatgcagatcgccaagaccggggcgacgccggtgtgtcgcctgcggcttgaagcccaatgggccgatgacggtaccgctgaaggcgaggtgacacaggatctgttctggatcacaacattagatgacgccataaaggacgagcataagagcaaggttgcaccgttcgagcgtgggttcattcaagtctactacacaccagcgacgcgcaatcctgaagcgcagatcaagctctctacgggggctctcgccgcccggttgcttcgtgccatcgagtggtcgaaaggaacgcgtaaatcggtggaagacgcgacgaaggcgctttcggatgcgttcggaggcgagtccgccattaaggcgatgagcgaggcgctctcaacgagatggcgtgacctgcacgatagcgtgaccgacaaggaccccggccttgctctgatgagccagcggttcgaggaagtcgtcgcaaaggtgcaggtgttattcgaacagcaggccaccggagtggagcggggcctcgacgtgctcagcgatgggcagttgtcattgttctattttgcgctcgcggctgccgtatttgacctggaacgtgcggccgtcgatggcacgatttccggttttcggcctgacgccttgcgtatcccggcattgagcgtgttcgcgatagaagagccggagaaccatctctcgccatactacctctcccgtattgtgcagcaggtccgatccatcatcaccggccatgcggcgcaggcgctcgtcacaagtcactcccccgccgtgcttagccgcgtggagcccacggaagttcgttattgccgttgtgacgtcacgtcgcgcgaaacaagtgtcacggccatcaaacttcctgaagacgacgaagaagcgggaaaattcgtccgtggtgccatgctggcgtttcctgaactgtacttcgcgcgttatgtgatacttgttgaaggtgattctgaacgagtggtaattccacgcctcgcgcaggctgagggactccttgttgatccgtcatttgttgcaatcgttccactcggcggtcggcatgttcggtatttctgggaccttctggagggcttagacataccgtatgccactttgctggacttcgaccttgggcgcaatggcggagggtgggggcggatcaagaccacgcttgttgaactcatcgagaacggttattcccgcgagcagctgttgaaatgtcagaacggtacgcttgttgatctcaaaaccatgcacacgtggccgacaaacgaatatctagcgtcttgggtcacgttcttgcgggaatatgatgtattcttttccgatccgctcgacctagacatggcgatgctgaaagccgttcctgcagcctataatgcgatcataccaaaagatggtggaccgtcaggcaagacggaaaccgctgatacagccgttttgggaaacggcggcgaaggcattgagccgtacaagaagtattaccccggctacgccgagttgatgcctgaatatcggtatcattttctgacccacagtaagccggccacgcacctacgggcgttcacgcatctggatgacgcggcactgaagaaaaacatgccggagccgtatcgggcgttgctgaaggacgtgaaggaacacttgaggcgagactga

SEQ ID NO: 72855 - DNA, 1899 bp, Rhodovulum sp. PH10
atggcgttgccaatccgtcgtattgatccagcacattggcagcctgtgggtatcgacgcgcttgaagacaacgcgatcgacgtcgtccaatccacgaataatcgctcggtcattgccggtcccgggtctggcaaaaccgagcttctcgcgcagcgcgcatgttacctcttgcagtgcggcatcgcgccgatccctcagcgtatccttgcgatcagctacaaacgcgatgccgctgcaaacctcgcaactcgggtgcgcgcgcgggtgcatcccgagttgggccaccgatttgactcgctcaccttcgacgccttctctaaggggctccttgatcgcttcgggcaagcacttccaaaagaatggcgtccgacccaaaactatgaaatcactaatgcgacctttacggttgtccaaaacacgctggaacttctttcaccacccgcagcggtggggacgaagcgcgacattattgcgatcagcgtgaagaccttcgagaaggatcaccttgttgcagcgcccctagcgcttacgccgctaggcagcccgtcgcctgcgcaatgggctgcccgcgaattctggcagaactggttgcacggtggatcgcacagcgtgctcacctttgcaatgatcggacggcttgctgagttgctggttcgcaccaatccgatggtgcgtgatgcacttcatctgacctattcgcacctgttcatggacgagtttcaggacacgacccaggtccagtacgaccttgcgaaaacgattttctggcagtcagaaacggtagtcactgcggttggtgatcacaagcagcagattatgcgctgggccatggcgatggacgatccgtttacgccgttcgaaacagagttcggggcgatacgtacgccgcttttcaacaattatcgatcctcacctgatctcgtgcgtattcaagatgtgctcgcgaaagcgctcgacggtgggtcctcgacacccatctccaaggctgaagggacgattgttggcaatagttgcgaggtctgggatttctcttccgtagccaccgaagcgacgctccttgctgacttcgttgcgcgggaaatgatccaatatagccttcagccacgtgacttcgcatttctcgttcgcatgaaggcagtggactattttaccacgcttcaacctgcgctcgcggcgcgcgggattcttcttcgcaacgaagccgcacatattggaaaggtggctctgcaagagctgttttccgaacttctttcagagactctgatcactgtcctgcgtgtcgcaacttccgaaaccgctggacgatgctggtcagaatgccttgatgcgatttgctcgctccgaggtcttgctgtcgatgatgatgaccgcaggcatatggctggaaaggcgctggagcatttctcggacgattttgttacccgctttccaacgccgcccactgatgaaaaccgggcggaggagattctagcatctgtgatcgacttggtaggtcgcgcgaatttgctgacggcgtctccggcctatcgacaaggtgactggtttgcgcgtgtgtgtgatgccgcgcgaatgcatcttgtcgcgtcatctcgcagtgctgcgggatggaagcaggctcttgacacatatgaagggcttcatgctgtaccgttgatgacggttcataagagcaagggacttgaatatcacaccgttatattcgtcggtttggatgatggtgcatggttcaattttcgacatcaatcgcaagaggaaatgtcagggttcttcgttgcgttcacccgagcaaaacaacgggttatatttacctattgcgctggtcgtggcaggcgacagcagattgcgccgctttatgctcttctcaaaagcgcgggtgttcagaccatcaagaagtcatag

SEQ ID NO: 72856 - DNA, 642 bp, Klebsiella pneumoniae subsp. pneumoniae 1084
ttggatcagatatcaaaaagcacggtagtaagcgcattaacgctaccggaaaaagaagacgagctttctaagtttattaaagaggcagttaaatcataccctgaaatctatttttctaaactggtgatatttggcgaaggggatagtgaggaaattataattccaaaggtgcttgagctgtattcgacggagattgatagccattctatctctgttgttcctcttggtggacgtcatgtgaatcatttttggcgtctgttgaagtcattacagattccctttatcactttactggatttcgatatcgatagaaatggcggtgggttcggccgacttagatatgctattgagcaactgtctattttctgtggtggaaaatatggcaagacaaaagaaaaaatacctgcatgggatgacgaacgagatccaacaacatttaaacttccgcgtactgacggtgattcatataatgttgtggctgcgttggagaatcataatatttatttttcatcgcctctagatatcgattacgcaatgattgaagcattccctgatattttctgtgaaaaagatgtggtctatggggaaagagggcctaaaaatattgaacaggaagaacaggaagaacaaaaaaagagctga

SEQ ID NO: 72857 - DNA, 1674 bp, Klebsiella pneumoniae subsp. pneumoniae 1084; identical to SEQ ID NO: 71699

SEQ ID NO: 72858 - DNA, 1746 bp, Pseudomonas putida LS46
atgcatctggctgaactgaatattcgcaactttcgaaagctgcgtgacgtccagctgcgttttcaacccggcctgaatgttctggttggagcgaataatgtgggcaagagtgctgtagtcgatgcgctacgagccctgctggctggttatgaagagccgtacccccgattcggagctgaagatcggcaccgttcaccgcagggcgagcaggctggagacatcgagttccattacgtcttccgagggttggcgcccgatgacgaggctgattttctggccgcgctcaagcctatcgccggcggccaagcagaagcgcatttccatgtgtgctactcagataccgaccaaggggggcgcttgcgagtgcgtcgttggtgtggtgatcaccaagaggtctccctgactgcggacatgatcgaaaacttgcgaggggtttatcttcagccccttcgtgatgcagcgcaagggctgcgtccagggaggaacagtcagctttcgcgcctgttgcacctactgacagatgatgcggggcgccaaggcatcaacgaagcattgcagcgactggatgatgagcttcgggatcatgcacctattcgaggtacacagacggcaattgctgatcgtcacaatgcaatgctcggagcgcaactgcgccaagctctcaacgtgggactgagtgcctccgactttcagcggctgtctaccagattgacgctttctgtggacgacttcgaacttgagcagaacggcctgggcttcaacaacctgatctttatggctgtggtactcagtgagcttgcccgcaactctgatgctgcataccgcggcctgatcgtggaggagccggaggctcatctgcatcctcaactgcaggctgtacttttgagatatctggcgagcttgcaagaggtggagggagagcaacctgttcagctctttgtgacgagccattcacccaactttgccagtaacgcaaatcttgattgcctagtgtgcttggtggagtcggaggggcacatcgagacgttcttcccgcgtgaagtaaggtttgggaacggcaagcgggagaagttagagcgctatctcgatgtcacccgcgcggagctgttctttgcgcgtcgggttatctttgtagaaggggccgcagagatgatgctcgtcgatgctttggccaccgcagcaggtttcgacttgcgtgggcatggagtgagtctgatcagcgtcgaggggctcaattttgattccttccttccgctgtttggcgagaacgctctgaagattcctgtcgcgttgattacagacgccgacccatcaggagtcgtggttcccgatcaaccggcccaacccctgtatccagctttaggcgccgcagttcaggtttccgacaacaccgcgaacatgctagagctacaggacagatatgtccgtgttttccatggcgttaaaacattggaatacgacttggctctgcacccagtcaatcgcacagcgatgttgagtgctttggctgagtttcaccctcagattgctgtgagccttgaggtcgtcgtcaatgcagctcttgacgatgcagccaaagcacgcgccctgttctgtggaatgtttgagcgaccacctacccagaaaaatgtacagaaaggccgcttcgggcagagcctggcttatgtaattagggagggagccgcctgtgaggttccgccctacatccttgatgctatcgcacatgtgtgccagatgccgggctag

SEQ ID NO: 72859 - DNA, 1734 bp, Pseudomonas putida LS46
atgattgagccatcccgtgagcagcagctcgtcattgatgctcctttggttccgctggccgttacggcatgtgcgggaagtggtaagacagctactgcgattcagcgtctagttgaaatgcgccgacgtcttgctggatctaagggacgcatagctctgctgtcattctctaatgttgcagtagagacttttcgccagggttaccaggagctttctcaaacactgccaagcggctccggtcgaaacagggttgatatagataccttggatggcttcatcacaacccagatcatgaaggctcatgctcatcgaactatgggggctaaccaggcaccctttttagtgaccggtggcgagcctttccttgctgggttcaattgcccaacgcgggatcacccgatacctgtaagcgagatcaaggttcgattcgacgctggtcaaccgctcttttactacacagtccatggcaacgagatgctgctcaaccaggcagatgctagccgagtggttgctcgactgggacgcttgggcggctatacgcacgatctggggcgctattggtgctaccgcgtcctaagcgagcagcccgtggtcttaagggctttggctcgacgctaccctcatatcatcgtcgatgaagctcaggacattggagtcctgcatcagaagcttctggagcttctaatcggtgcaggtgtacaagtgtcgcttattggcgatccaaatcaggcaatctacgagttcgccgatgccgacggtctcttcttgcggaactaccatcagcgggatggcgttgctccctaccacctgacccgcaactatcgctccttgccttctattctgagcgtcgcgaatcacctttcgggaagggcagatgatcctgatcgtgatgacgaacttccccccctaggggcctacttcattggttatagggagcaggctcttccaacactgcaggatgctttccatgcagttcttgatcgtcaagcaatcacgccagatagagctgctgtcgtatgtcgcgcggctgtactggcctccaggttgtcgggggaaagagatccagaaggaaggggagcagtaaagctgtttgctcaagctgcattacttcgagatcagcgctccgatttcctgggggcattcaggatggtcgcgcgtggcattttcagccagttggatggccccccacctgggatgctcaataggttgagtggtgtcgctcatcaccgtgaactacgcgagctgcgacgtcgactgtggttgttcaccagagatcctgctcaaggtttaccggcttcaagtttgccagcctcaggtcaatggcttcctctgctacaagaacgagttgctcagctacttcgtgaaatccatcgtgattttggtctggtcacattggatggactgacacgccggctaacacgcgctttgctgcctgccgggcctcttagcgcggagcttgaggtggaggttgagcaggagcctaaggcccgggtaaaaaccgttcaccaggttaaaggcgaaagtattgatgccgtcttgtatgtggccaatcgggccaacatcgaagccatgctgaacggcatggatactgaggtagggcgcattggctatgttgctgtaactcgcgctcgcaacttgctctggctggcagtaccgacggccgccttggttgtcctgagaccaagactggagcaggctggatttctcgaggtagaccaggttccaggggattaa

SEQ ID NO: 72860 - DNA, 2190 bp, Enterococcus faecium P1190; identical to SEQ ID NO: 71696

SEQ ID NO: 72861 - DNA, 1794 bp, Enterococcus faecium P1190; identical to SEQ ID NO: 71697

SEQ ID NO: 72862 - DNA, 2190 bp, Enterococcus faecium P1139; identical to SEQ ID NO: 71696

SEQ ID NO: 72863 - DNA, 1794 bp, Enterococcus faecium P1139; identical to SEQ ID NO: 71697

SEQ ID NO: 72864 - DNA, 2190 bp, Enterococcus faecium P1137; identical to SEQ ID NO: 71696

SEQ ID NO: 72865 - DNA, 1794 bp, Enterococcus faecium P1137; identical to SEQ ID NO: 71697

SEQ ID NO: 72866 - DNA, 2190 bp, Enterococcus faecium P1123; identical to SEQ ID NO: 71696

SEQ ID NO: 72867 - DNA, 1794 bp, Enterococcus faecium P1123; identical to SEQ ID NO: 71697

SEQ ID NO: 72868 - DNA, 2190 bp, Enterococcus faecium ERV99; identical to SEQ ID NO: 71696

SEQ ID NO: 72869 - DNA, 1794 bp, Enterococcus faecium ERV99; identical to SEQ ID NO: 71697

SEQ ID NO: 72870 - DNA, 2190 bp, Enterococcus faecium C1904; identical to SEQ ID NO: 71696

SEQ ID NO: 72871 - DNA, 1254 bp, Enterococcus faecium C1904
atgacaaatatcttcgaaaaaatcgtaaatgatttaaatttagaacaaaaagatgttgtggaaagtgaagataacctttatgtaaatgcatgtcctgggagtgggaaaacaagggtacttacaaggaaaattgcttaccaagcaattaaacacgatggatcactaaaaagaataattgctatcacatacactaatagagctgctgaagaaattaaggaacgcctaagtttacttagtatagatgatgatattaatatttgggtggggacaatacatcagttttgtcttgaatttattatttatccttttaaaatgaatctctcaagagtatcaaaaggatttacaattattgatgattatactcaaagagcttacgtcagccaaattaataatatgctgaatttaaatctcaaaacgtatgaactgaacaaaattgatttgtcactttctcatgattttaaaattaatgaagttcagtatactcaagtttctgaaatgtatcacactatgttggaaaaaaataaagaaattgattttgatatgattttactagtagcgtataaaattttaactgtaaacagtaacgttgcacgtaatattgctagtaatataagggcgatttatgtggatgaatttcaagatactagagaattacaatacaatgtaatagctaaattacttcaaaacaaccctcaaattcagtcaatgtttgttggagatattgaccaagcaatttatggatcattagatggtatagctaaatcagttgaagaactagaaatgctaactagtcacacttttcaatcaaagacgctacatggctgttacaggtctaatcagagattagtagacttctactctaattttcagagttgtccttacgagattgaaagcagagggaataataaaaacgaccgtggttttataagttatgattgcaaagttactaaggaggatttacccaacataataaaaaatataataaaggaaaagattgaaagcggcattcatgaaaaagatatttgtgtacttgctcctcaacactatcctctgttttcactgggtgagtatttaaagaaagaattaccgtattgcaattttgatgctataaatatatcaccaattaaggtaaataatcatagtttatttttcaagttagcaattttgtactttactgaatcaggtgaaaaggttcgaagaagaaagctaattgcaaacgatattttaattacgccgattgtaaaattaagctag

SEQ ID NO: 72872 - DNA, 2190 bp, Enterococcus faecium C497; identical to SEQ ID NO: 71696

SEQ ID NO: 72873 - DNA, 1794 bp, Enterococcus faecium C497; identical to SEQ ID NO: 71697

SEQ ID NO: 72874 - DNA, 2190 bp, Enterococcus faecium 506; identical to SEQ ID NO: 71696

SEQ ID NO: 72875 - DNA, 1794 bp, Enterococcus faecium 506; identical to SEQ ID NO: 71697

SEQ ID NO: 72876 - DNA, 2190 bp, Enterococcus faecium 510; identical to SEQ ID NO: 71696

SEQ ID NO: 72877 - DNA, 1794 bp, Enterococcus faecium 510; identical to SEQ ID NO: 71697

SEQ ID NO: 72878 - DNA, 2115 bp, Pseudomonas aeruginosa PAO579; identical to SEQ ID NO: 72562

SEQ ID NO: 72879 - DNA, 429 bp, Pseudomonas aeruginosa PAO579; identical to SEQ ID NO: 72561

SEQ ID NO: 72880 - DNA, 1929 bp, Rheinheimera nanhaiensis E407-8
atgaaactgcacagtattcggatatcaaattttcaaagttttggtgctgaaccaacagaactgacactggaaaatattacctatctgattggccccaacgggtcaggcaagactgctgcactccaggctttgtgccgactgtttgcatttgatccatcattacgccgtattcagcgctcagacttccatgtcccgcacgatgaacaagaagcgcccgaagaaaggcagttatggattgaggcggacttcgtgttccccgagttggaggatgaagaagataactcgaccgttgctccccatttcagtcacatgcgccttgatgaccctgacggaattcctcgggtacgatatcgcctaagtgccactatgggcctggatggggatatcgatgagacttttgtgtatgtgcttgaagctggcccggatggttcacctctaaatcctcaaacggttcccaggtctgaacgaaatcacatacaagtccactatctgcccgcaagaagagatccgactgaccacattgcatacggaacgaacgcgctgcttggccgattgctacgtgccgtgaactgggaaaatgaacgagaagaggtcaaagggttcaccgaccagattagcgagagtttggctgctaatccatcggtcaatgcttttagtgcccacctgaagaaaacatggagcactcttcataaaggtagctactttacagatcccaagattacttttgtggcatctgagatcgaggcgttgcttcgtcatttgtccgtatcattctcgcctggacatgatgacaatcttgtcgatttttctcgactcagtgacggtcagaagtcgatgctctatctatcgttggttctctcatctcaagctgttggtcgtgctgtccttgccggtgaggacgactcttttgaccctgaaaagttgcgtccgccagtctttactttaatagcccttgaggaaccagagaacagcctctcacctcactatttgggaagaattgttagcgctcttaactcaatgacgagcaacgaagatgctcaggccctaattgctacgcatgctccgtcgatgttgcgacgtgtcgatccggaatatattcgatatcttcgacttaccgaaacccggcaatcaaaaattacgaaaatccaattgccctctagaaaagatgaagcgcacaagtttgtacgtgaggctgtccaagcattccctgaaatctacttctcacgtttggttgttttgggtgaaggggatagcgaagaaatagtgttaccacgtattttcagtgcgaaaggggtacctgttgatgaatctgcggtgacggttgctcccttgggaggaagacatgttaaccatttttggcgtctgctatctgcgcttgagattccatacataacgcttctggatctcgatgtatcaagacataatggtggttgggggcgtattaaatatgtaaatgaccaactgaaaaagttgactccagctcatgcattacctgatacatggataatttcagcctggaatgatgagtctatacctatccgaactcaccatttttttgaagatggtacaaaggatctatttaaagagcttgaaaagaaaaatatatttttttctgagccgttagatttagatttttcaatgttattagcctttcctgaacaatactctaaggaaaactacaaggcacctacagtttcaactgttaaagcggttctcggaaactctcatcataatcctaagcaatattctctaaaagaaagaaagctatttaatacttaccataagcgattcaaattgggcagcaagcccactgcgcatatagatgccttggctcaaattagtgacaagaatttactgtctaatataccaaaatcatttggacgacttgcagatgccgtgatagccaagcttgcggagctgcccgagtga

SEQ ID NO: 72881 - DNA, 1656 bp, Rheinheimera nanhaiensis E407-8
gtgattgctgtagatgcatggttgccttcggatgggctaacacttgaacccaatgctctgctggctgcgaaggaagaagcgcgctgtcttgcactgactgcggggccgggagcgggcaagacggaaatgcttgcacagcgagctgacttcctcctccgaaccggaacctgccgttatccgaagagaatactcgctatttctttcaaagttgacgccagcaaaaacttgaaggagcgaatccagcgacgctgtggacaagaattggcttcccgttttgatagctacacatttcatgcgtttgcaaagcgtattattgatcgcttccgagtagtgcttactggtaatgatgctctggatatggattattcgattggcgaaagaaaagtcacaagaaggcaaattacatttcatgatcttgtgccgctagcaattcaaattctcaaggcctctgctgtcgcaagaaatgccatacgccaaacttacagcgatgttttcttggatgaattccaagactgtacggatcagcaatatgaactcgttaaggtagctttccaaagtacaagcattcgtcttaccgctgtcggtgacaccaagcagaaaatcatgggatgggcaggagctttggacggaattttccaaacgttcgctaaggatttttcagccgtaccactaaacatgtaccgaaactttcgttcaaaaccacgcctgcttcggatgcagaacgagataattcgtgtgcttgatccagcttccgttatgccagatcaccaacttgctggtgaggagggagaggttttcgcgtggcaattcgagaatgcacagggggaagctgagtatttggccgatttaattgccgggtggataagaaatgaaaaggttccgttgtccgaaattgccgtattagtgtccaaacaactagatctttatgccaaccacttgatggcggcattggaagttaggggaataccgtaccggaacgagcaggagatgcaggatattactgtcgaacctgccgcgaggctcgttgttgactatttgtcctgcctctacggccagcgagagcccaaagcttggattcggcttatgaatcaattgattccctttgctgatgatgaggtgcagtctagcgctaggcaaagcttccaacgcttcttcaaggagcagagaaaaatcatcaccatgaccgagctgttggatgagccgttttcgggatggtgggattctgtgtgtagctttctgaagaaaataggaatggagactcttgttgctctctcgcctgactatgagtcacatgctaggttaggtgaagttgtgagagataccaaagcgcacattgaagaattgcttgaacttacccccgatttgcctcaagccttgactcgtttctctgatgatcaggctgtgcgtattctgactatccataagagcaaaggattggagttcgactcaacgataattatggccgttgagaacgaaatattctttggggatcaagatgctaatcggtgtgctttctttgttggtgtatcgcgtgccaagcgtcggcttgttcttacatacgcaaaagagcgagatagacctgctaattatcataaaagatgggataccgcacgaacccctcaaactgagtatttgggctacgtaatagccatctag

SEQ ID NO: 72882 - DNA, 1956 bp, Pseudomonas aeruginosa ATCC 14886
ttgaaacttcagcacatccgcgtatgtggcttccaatcgttcggatcaaaaccaatcactattgatctggaaaacctcaccttcctgatcggcccgaatggctcaggcaaaacagcaacgctgcaagcgctctgtcggctcttttcgtttgaccccaatcaacgacgcgtacgtagatccgacttcttcgtccctcacgctgaggaagaggtgcctgacgagcgggccctctggatcgaggccgaattcacatttccagagctggaggatgcagcaggagagcatccgaccataccttgccactttgggcacatgcgcctggataatccagacggggtacctcgcgtaaggtatcgcctggacgcttcgatcggcattgatgacgagatcgagcaaggccttcgctatgtcctggatgtcgatgaggctggtgatccggtcgataccgtgccggtaccccgggatgagcggaacttcatccaagtacactaccttccagctcgtcgtgacccagcagaccatatcgcctatggcgccaacgcccttcttggacgcctactgcgggcggtcaactggtcagcccagcgcgaaaccatcaagcaattgaccgcggacatctcgcaaagccttaccgacaacgactcagtaatcaacctcagtgcagggctatctaaaacctggagggagctccacaaggggcaattcttcgcgagtcctagtgttacgtttattgccaacgaaattgagtccttgttgcgacatctgtctgtatcgttttcacctggtcatggtgaacagatggtcgatttttcgcggctcagcgatggtcagaaatcgatgctgtacctgtcactggttttgtcgtcgcaggctgtggggcgggcagtgctcaatggagatgatgagtccttcgattcggataagctcaggccagcagtcttcactattgtcgccctagaggaaccggagaatagcctgtctcctcactatttagggcggatcgtttcctcgctcaaaaccctggtgggcagctccgaatttgcagacgcccaggcattgatcgccactcatgccccatcaatgttgagacgagtcgagccgactgctatccggtacttacggttggacgagtcgcgttgcacggtggtgaccaagattaaaatgccgcccaacgaaaaaggcgcggcatacaagttcgtgagggaggctgtccaagcctacccagaggtctacttctcccgcctggtgatcctcggggaaggcgacagcgaggagatcgtgctgccccgcttgctcgcagccaaggggttattggtagacgaagctgccattacgatagctccgctgggcggccgtcatataaaccacttttggcgacttctcagtggattggagatcccttacgtcactcttctggatcttgacgttgcgcggtttgggggcggctggggaaggatcaaatatgtcgctactgaactaaaaaagcataggcctgatgatctctacttgtcggaagatgagttggcaaagctgcccagctggaacgatcccacctttaaaattttgaaggctgaaaaggatcccaacttcaaatcctgcattggtgatcttgagccgctgggggtgttcttctcggccccaatggatctggatttttcaatgataaaggcttttccccaagcttacggattgacggccgataaactggttgcaccgaagctcactcaaatcaagtcagtgttgggggacagtcattttgatcctaagcaatacacattgactgagcgcaagcacttcaatgcctaccacaagctcttcaagctcgacagcaaaccgaaatcgcatattgaggcgctctccaagctcaccgatgccgagctcaaaaagtcgatgcctgcatcattggcacgactggctgatttcgtcctcgccaaggtcggggctctacaggaatga

SEQ ID NO: 72883 - DNA, 1671 bp, Pseudomonas aeruginosa ATCC 14886
atgattctgatcgaagactggagaccctctgaaggcattgtctttgagccgaatgccgaaacagcggtgagagaggttaagcgatgcgttgcgctcactgccggccccggtgcggggaaatccgagctgcttgcacagcgagctgattttctgctaacgacagggacgtgccgatacccgaagaggattttggccattgccttcaaggtagacgcgagtaacaacttaaaagagcgggtctggcttcggtgtggagctggatacgctaatcggttcgatagctatacgtttcacggattcgctaaacggatcattgagcgatttcggccggttctcaccggcgatgatgcactggacgctgggttccaagtggtacccaggggtaaggcccatcctgttcagaccgagtttggtcttcttattccgctggcactcaagattcttgatgcttacccgatggcggtaaatgccctcaggcagacctacagcgatgtgtttctcgatgaattccaagactgtacaaatgagcagtacgcgctggtcagcaagatatttgcaggtacaacgcgtcgcgtcaccgccgttggtgatgtgaagcagaaaatcatggggtgggcgggtgcacttgacggtgtattcggcaaatttgaaagcgacttcgcggcagcccatctcaacatttaccgcaattttcggtcgcagccacagcttttgcgtttgcaaaacgacatagtgaaaattctcgatccaggctctgagatgccagaaagcttgctcgaaggagagggcggagagatccatgtccaagccttcgatgactgcacagaagaagctgatagcttggcgaagcagatcaacacttggattaacgtagaaggcttgtctccctccgagatcgcggttctcgtaagaagccaacctgaggcctataccacccggctagcagtggcgctcagcgcaatgggcatcccataccgtaatgagaaccaaatgcaagacatagccactgaaccaatggcactggtgattgtggactatttgttatgcctttacggttcacgcgagcccaaggcatggacgcgattgatgcgccgtattatcccttcggacgatgatgagcaaagcggagcgctgcgtactgactggaataggttcatcaaagaggcgcgcaaatcagccgccgaggacttggcaaacaactgctattcgcagcggtggagtcttttgaaggatttcctgtcgatggtcggtgtgagcttgcttaccgggctttcccatgactacgagtcgagagatcgactgaaagaagtcatcaaggatattaaaaagcacattgatgccgcactggagcgggaacccgacttgattcaggccctgtcgcaactgtcggacgaccagtcgattcgtattcttacggtgcataagagcaagggtttggagtttgactctgtgatcatgcttggcgtggaagaccaggcttactggggcaacgacacccatgaaacacgctgcacgttctttgtcggagtatcacgcgctaaaaggaggctggtggtaaccacggcccagactagggaaaaccttggcaacatcagcagttggcgtatcaggcggactcctcacgctgaatttctatcgtacgtctcaagctggcagactgaagaacaataa

SEQ ID NO: 72884 - DNA, 2424 bp, Pseudomonas aeruginosa CI27; identical to SEQ ID NO: 71738

SEQ ID NO: 72885 - DNA, 1932 bp, Pseudomonas aeruginosa CI27; identical to SEQ ID NO: 71739

SEQ ID NO: 72886 - DNA, 1734 bp, Staphylococcus equorum subsp. equorum Mu2
gtgaaattaaaaaatcttaaagtcaaaaatttcagaaattttagcgatataaatttagcattaaataatagaaatatcatatttggaatgaatgacattggaaaaacaaatttattacaagcaattagatttatgtttgatagacaaattagaattaatgggtttagagcgtcagattaccacaaaaatgatactaccttgccgattgaaatagtagttgaaattgatataagtgatagaaataatgaaacaccaaaatctaatgattctaaactattaatttctaaaatcaaagaagctagaaacaatctcaattatcccgattctttctttattatgttaaaaggagtatttgatgaaaaagaaatctttggtaacccagttttatactggggctcaacattaagtgacttagaattggtaccagttagaggacaaacttctgctatagatgatattttccacgttgagtatgttaaccccacttcgtctttagagcatacttttaaaaaatataaaaaaactctttttaataatagttttaaaactgaagatgatatcactatagaaaatgacatcactcaaaacataaatgacttaaataataatattagtaaacttgatgtagttaaagtagctcaagaaagtttaacctcctcttacaaaaaatttagaaatgaatcaatgaatatagaactccgttctgaaattgcaataaatggttatttaaataatcttactccttacattaaatggactaatgaggagggctattacccaactggaggcgatggtcgaaaaaaattactaacctatgcattaactaaaatgattactgaaaagtttgctaatagtaagataattatatatttaattgaagaacccgaaaataatttgcacaggtccatgcaggtagctttttcacaacaattgtttaatgacaagatttatagttacttctttttaactacacattcttctgaagttttatatgaaatggatgatacacaattaattaggatttcaaaccccaataaaagtattgggaattcttatcatcattatctaccagaaaaatataaaaacataaaaaaaatgttaaataaaggattatcacaagctatattttataataccgttctcttagttgaaggtggatctgaatacactttgtttgaaactgttttgaattttatatacccagaaaaagaaattgacggaaaatatacacttcaagttgatggtgtcggatttaaaaaatacacagaattatttgatgctttggatatagtttattttgtacaaactgataatgaccttcaacgaatgaaaagttctcaaaatgaatatatgactactggatttaaaagaggttttgaaatcataaataaacccagccctttacaaaaagtaacattagacttaaacgacataaataatgacataaaattaaaagaaaagaaaaaggagatctttgatactaacaaaacctatatattgcaattaaaagaatcaaatatttatctctctgaaattgaccttgaaaatgatttatataaagttatgggagaagatatgagcgagatattaaatacagatactccagttgcaaaacttcaagaaagaaaactttttaacatggtagaatttgttaatcatttaaatgaatgccaagccaaaaaaatatgtgaaggttttagtgttctgaaaggatttattgattatgaaatataa

SEQ ID NO: 72887 - DNA, 1539 bp, Staphylococcus equorum subsp. equorum Mu2
atgaaatataattcttacaatacacatgacttagaaaatcgaaacaaagcaattcacagtaatgaaaatactcttattcttgcaagtgctggaacaggaaaaactaaattacttgttgataaattaatttacgaaaaagatcacaatgattcatatcaaacttttgcagccctaacttttactaataaagctgcgaaagaaataaaagagagagttaaatttaataatagacatctttttataggaacaatagatggatttttagagaaagaaattattgagccatttatttccctatacttaaaaactgaaagtaaattattttacagttatacgaatgataataaattcacttcttatagtgatggtatacaacaaattattgataaaaatattattggatcctataaagaatcatcaaagaacttcaagtgtgaattgtcattaaaaattttaaaagaggtcatatactcacgcgaatatctaaaatttaaatataagaagatctttatcgatgaataccaagattgtgattttacaatgcattccttgtttcaatatttaaatactcaactggcaattaaaatgttcatcgttggggaccctaaacaagcaatctatcaatttagaggtgcgaaccctcgatatttagaagatttaattaagaaagatgattatttaaaattacaactcaacaataatttccgtagtaaacaagatataattgacttttcacaagcaattagccctgaaatagaagtggagaatttggtcaattctcagagtatattttattatgctagcaatccgtcagagtcaaaaacaaatattataaaatttctaatcgaagaatctataatagatctttcatctaaaacattccttattttaggtaataataacgatatttataaattacataaagaattaaatactatctaccctagagaattcgaaattgttaataaaactaatataactaattgtattaataaaactatacttgaatctattgcaaagtattattttgattccgaattttctgagtataattttattgaaaatttatatttagaatatgataatatattgattgctgatattaaaaatattttacttaaaatcaaaaatgaaccgagtatcgaaaatatagaagaattgtttgataaactagaaattcctgtacgtgaatttgaaggtaaactagagtcagagcttctacaaactattttaaaaaatgatattaataaaaccctttataacatgcaaacaaattcgaaattattgttaactacacacgcctctaagggcttagaagctagtacagtaatactttttactagttatttctttcattatgagtcatttaatgtagaaaacaactatgtagcgattactcgtgcaaaaaataaattaattttgattgatgataataattgccgatataaaaagcgtatgaatatgcttttagaagaaaaccaatataacaaatttagttttgatgattttgtaactgatataagtaatgctatacagtag

SEQ ID NO: 72888 - DNA, 1971 bp, Acinetobacter baumannii IS-116
atgcatataagttcaataaaagtaaaaaactttagagcaattaaagatgctgaattaaaactagatcctaatcagaaacaggatttaactttaattgtgggaaagaataatagtggaaaaacctcatttattatggtttttgataaattctttaagaaggaggataattttaattttcacgacttttcaacacatcttagagaaaaaatttataaaattgagagcgagactattgaagaggctataattggtctatttttggaaatatcatattctaaagatgataatcttgaatatttgtctgaatttattatagatctaaattctaaaaataatactgtaaagttatattttgaatgtttaattgatgaggaaagattgcgaaatgatcttatcaatattgataagaagcataaaaaaaagtttattgaaaaaaatattacttcttacttaataaaaaatttatatatatatgagaaagatgaggatatcgaaaataataaacaaaaattaataaaaaaagaagtttcagcaattaatagtttgattaattatcaagtaattcatgccaaaagaaacttggcaagttctgagacaaaggaaaaatctagtcttccattatcaaaattaagtactgaatattttaataaagaaaatatgttcagtgaaaaagattttattaagattaataatgccatattagaaatggatgaaaatttaaataatttatatgatactcattttgaaggtttttttgaaaatgttagggattttttaggaagtacggctttaaaagtattatcaaatttagagtctagacaaataatgtctaatagttcaaaagtagtgcaaatagatagtgaagaaaattttttacctgaatcattaaatggtttaggaaatttaaatattttatatctattattgcaaattgatttaaaaaaacgcttttttatccaagaagacagaagtattaatttactttttattgaagagccagaagctcatacacacccacaaatgcaatatatattttcaaaaaaaattaaaaaaataattgaaaatatccctaatttacaaacctttatttcaactcattcatctcatattgtgtcacagtgtaattttgaggatataagatattttcatactcataatggaaatgtgaaaataaaaaacttctatctagaattagaagaaaaatataagttgcaaacagaattgtttaagtttttgaaacaatatattactctttattcagcagagttgttttttgctgaaaaagttatatttattgagggagtctcagaaaaaatactacttccatattttataaagaattttgatgagaaaaataaaggaaaacatgactatattccaatcagttctcaaaatattacttatattgaagctggagcgaatgctaaagcctttcaacatctattaaatttcttcgaagttaaatcacttattatcactgatattgattctgttgaaccagtagaaaaagatggaaaaataaattatgaagcttgtgaagttaagaatggggttagtagtagtaatgcaacaattaatcattatttaaattataatgaaaatgatccggattggtttaatcttttgaaaaaaagaggtattaaaattactgataaaaatattaatctattctaccaaacagaagagaatggatatcacgccagaagttttgaggattcatttataagtgtcaattatgaacttataaaaaaacataaaaaagatatttttggtttgaaaaataaatacaaaattaatgataatcctgaaaatttttatgaccttacagatagtattataaaaagtaaatcagaatttgcttcttcgcttttgtttttagctctggttaatggcgacaaagaaggtgatgaaaaaattgaatggaaaactcctaaatatatttatgaggcattagaatggatcaatcaataa

SEQ ID NO: 72889 - DNA, 2094 bp, Acinetobacter baumannii IS-116
atggatcaatcaataaaagcaattgaaagcgttaaagagattattataaataatcaatttcagaaagacggttttagaaattttgtattgcaaggtggggcaggtagcggtaagacagagtcacttaaggaagttattgaatttatttctaatagttatccaaatcaaaaaattgcttgtattacacatacaaacattgctgtcgatgagattagatcacgtattaagaatgctaatctttgggtttctacaattcactcttttttaaatgaacaaaccaaaaattttcaaaagaatttacaagaagttttaccttatattttttatatagataatagtgatatcaatgattatgaagattataaaaaaagatatgaaaaattatctaaactaaattataagctaaataatagaagaatggataaagttgtaggtaaaagagattataatgctgatataattaattacaataatattttacttggtgagataaaatccataaatagcatgattcttgaggtaatttcctcaaaagattttagagatataaaatataatgaaactgtatttgattcaataaatgatggaactttttctcacgattctcttataaaagtttcatattttcttgcagaaaaatatagcttattttctaagattataagtgataagtttgactatatttttattgatgaataccaagatactgataaagttttagttgatttattgttgaaaaaaattgcaacaaataagaaaactactattggtttttttggtgactcaatgcaaggtatttatgatggtataggtagccttgatgattatattagagattttaatctaatttatatacctaaagatgataattatagatgttcacagcaagtaattgattttttgaatataattaggaatgatgatattaaacaaaaagttgcacttaaaaaaggtgagaatttagattcacgacaaggatcggttaagatatatattaataaaattcaaaaagttaagtctaatggtcgtcaagaagataaagaaaaatatattgctttaataaatgacgcaataaaaaaagtaaaggagaagagtgatattttaaatcttaatatcttgcagttaacaaataaatctatagcatctgagttaaaattttcaaaattatttaaagtgtttgaagatagatatcctaacttggagcagactcagatagaatctaacttgaagaaaatacaagttaaagatgtagttgacttaatttttttatataaaaacaatagacataatgatttaatattaaagcttaagaaaaataatttaaaaattaaaaaattagatgataaaattaatattattgctcgattaagttatatttgtgataatgatttaggcttaaatgaagctcttgattattgttatgaaaataaattacttataaagtccccacaaagaatcgactttgaaagtcaatcaaagcgtcattttgagcaatgtgattctgatcctgtattcaaagacttaaaaactcttttagaaagagataacctaaatacttacaatagagctaagcaacattgcacatatgatatcgatcaatatgattatgatgattttatgagttcttatagaaagattaaatttagtgattcactattatcaaataacttacttctgagtgaggttttaaattattttaattatattgaggaaaattcaaattcagacgaaaaatatttaacaatgcataaaacaaaagggacaggtattgaaaacgtttttgttgtattagaagaatttttctggagtaattattcatttagaagtatatatgactctagttactctaattttaaagttaaagaaaaatctgagaagttattttatgttgcatgttctcgtaccataaaaaatctaatgattttaataaactatgaaacgaatgatgagctggaattgatacgagagaaatttagtggttttgaaattattgaattaaatagcagtgatactaatttattgattactaatccagatgttgaaaactttattttacctgctgctatagaaagtaatatacaagtaagtatttaa

SEQ ID NO: 72890 - DNA, 1671 bp, Acinetobacter baumannii IS-58; identical to SEQ ID NO: 71826

SEQ ID NO: 72891 - DNA, 1782 bp, Acinetobacter baumannii IS-58; identical to SEQ ID NO: 71827

SEQ ID NO: 72892 - DNA, 2205 bp, Bacteroides fragilis HMW 610; identical to SEQ ID NO: 72688

SEQ ID NO: 72893 - DNA, 1899 bp, Bacteroides fragilis HMW 610
atgataacagattacgataattgcctagatgacaaagtggatgaagaacttttggcttgtttgaatcttcaaaatcctaaaagtttcttcctatttgccggtgctggctccggaaaaacaaggtcattagtcaatgttctagagcaaatcaaagataagtacggagacgaattgaaactccgtagaaagaatgttgccataataacttatacaaatgctgcctgtgatgaaattattcaccgcttaaaaaatgatcccacatttgccgtttcaacaatacacagctttgcatgggaattaatcagacattacacggcagatattaagaactggctacgtaatacactaaacaaagaaatagacgaattagagattgaagaatcgaaagggcgtcctggaactaaaacatctgttgatagaaaaaggaagattgagaataagaaaaatcggctttcgacattagatagaatatcaaaatttgcatataaccctaatggcgacaatatagaagataattcgttaagtcatactgaggtcattagcataagtgcttttttcttagaaaataagcctctctttcaaaaaatattaattcagaaatatcctattttgttggttgatgaaagtcaggacactaagaaagaattaataaatgcgctattcatggttcaagaaaagaataaaaacttttctcttgggttgtttggggatactatgcaaaggatatatactgatgggaaagagaatctaggtaccaatctacctaatgactggtataagcctgaaaagaaattaaatcatagatgccctaaaagagtggttacccttatcaataagattcgcagtgatgcagatggtattgaacaacttccaagaactgataaagaagatggttttgttcgtttcttcattattccttctgatgttgacaacaaaatagccattgaaaatgcgataaagcagaagatggcagaaataacaggggatgatttgtggattaatagtagcgatgagaaggctgtaaaaacgctgacattggaacaccatatggctgctaaaagaatgggattcgacgatttatttgcttctttatataaagttgaacgctatcgaatcgggttattggatggctctctacctggaatacgattctttactcaattcgttcttcctcttattgaggcgaaaaggaatggggatgagtttgccgtttcaagaattgttcgactgaattcgcctatgtttaagagagaaaatataaaactccatgaaaagcaaactgatgttatcaaaagtgctaataccgctgttaatagtttgttttcgctctggaaaaataatgacaatccaaagttacttgatattttaaataacattgcaaaatctaagctgtttgttattccggatagccttaaagttattgcgcagcgtacggataaggactctgtaatagtagatgattcatccaaagatattgatgagtcgattgcggcatgggatgaagcattatcaactacatttgagaagattattaaatataacgactacatttccgataaatcgatgtttggtacgcatcaaggcgttaaaggtttacagttcgatagagtattagctattcttgatgatgatgaagccagaggttttttgttcagttatgaaaaattgtttggagctaaagagactagcgataccgataaaaaaaatatgaaagttggaaaggaaactagtatagatagaactcgccgattattctatgtgatatgtagtagggccatgaaaagtcttgcaattgttgcatataccaacaatgttgatgccgtaaagaatacagcaatagacaatgattggtttactaaggatgaaattcttcctttagatttacttgcaattaaataa

SEQ ID NO: 72894 - DNA, 2205 bp, Bacteroides fragilis HMW 616; identical to SEQ ID NO: 72688

SEQ ID NO: 72895 - DNA, 1899 bp, Bacteroides fragilis HMW 616; identical to SEQ ID NO: 72893

SEQ ID NO: 72896 - DNA, 1776 bp, Proteus mirabilis WGLW4
atgtcaattcttattaattgtgtaagaatttcgggttttagaggtatcagtgaggttgaggttgagctagggcgagtagcgattttgctgggaacgaataatgccggaaaaacctcttttcttaagtctcttcaattagctctgggtgattatcagcgttacttcagtgatgaagattttcacatagatagtactggtagaaaagtcgatgaagttattgtagatttgatgattatacctacaaacagcatgtatattagagctgatgaatttgatgataaatgggttgatgtatttggtgataatattgccttagatgctaatggtaaagactttgttgctattcggacaaaagtacagcctgatgaaataaaaggtgggtttaatactcaaaggtattatctgaatgaatggactgaatttgatatatggaaaaatgtaactcctagcgagaggaaaaaagtaagatcaaaaattgatgctatcccttatatttgtattgaagctcaacgagatatccataatgagcttaaagataagtcatcatatataggtaaagtcttatcatatattaaatatgaggatgatgacgtcgctactcttgaagaaatgatcaattccataaatgaaacagcagtaagtaaaagtgaacctctccaaagtttaaaagattcacttcagggattaaatgagtcttttcttggggcaagctatactgaaataacgccatttcctaaaaaaataagagatttatctaagcaattttcagttcactttggtgatgaagaaaatcattcattttcaatggaatatcatggtactggaacaagaagttgggcttcaatgcttacagtccaatcatttttaggattcatgcatgagcgtcatgataatgaaaataaagcgttacatcctataattggagcagaagaacccgaggcacatcttcaccctaatgctcagaggacattattcaagcaactaacatcctctcaaggacagattatattaagtacacattctccatacttaagtgccatggcagaaattgaagatataaagtcatttatcaaaaaaacggatggtgtaacggttagttgccttaaaaaaagaatagagcatgatgaaaagaacgctataaaaagagaaattatgttaactagaggagaactgcttttctcaagagctttgattttatgtgagggagttactgaagaacaattgataccttcaatgtttgagctttattttggaaaaacaatgtttagtgttggagtcaattgtgtcagtgtaaatggtaaaaattaccctccgtttattaagcttgctagtaacttaggaatacctgtatgcattattagtgataatgatggtaatactaaagatgaaataactcgtcaaattaatcgattggaaaaacaggatggactgaatctaaattcttcttgtttctctttaaattttctagaaaacaataatgatattgaagcagaattgtataatgaattgaatattcatgatgaaataattaactcattagttcttagcgaaaccaaggctagcagtaaccaacagtatttagaagcaaaaaggcgtcaactggaagagttgtctgatacggatataattgcaaaaatgcgtgattcaaaggctagctatgcaggatatttggggccgattctggttgaaaatgctaatcgaaaggaatttaaagaactattaccatcatcggttataacagcatttgatatggttaaagggtggcttgaattatga

SEQ ID NO: 72897 - DNA, 1899 bp, Proteus mirabilis WGLW4
atgactgattatttatcattacctcaaaaaaatattgttaatgctcctatggggactgcaatacaagtactggcttcagctggttctggtaagacaagggttttaactgaaagaatcaggtatatacttgataattcagaacgagggagtgttattgccctcacatttacaaataaagctgctgatgaaatgcttgaaagattagatgatggcagcgaaaatcgcgagcgtatttggattgcaacaatacattctgttgcacaaagagtacttgatagttacggatatactataggtttacctaaagaattacatatattcgagcgtgagcaagatagaatggaggtatttcttcattctctgaaagaacaagggatagatattgatagttatttaaatattgaagatgctaaagaaaaacgtaatcgtgaaaagttattaagtcaatatcttaatgttttttctgaaattaaaagggagtttttaactgaagatgaagtaagggaaaaatataaatcgaatccccgaatttggaatatctatcaagattatcagtcagcactattggaaagtggaggtgttgattttgatgatatcctattgtattcgcataagattcttttaaatcaagagtctgtgtccaggatatatcaaaaaaaatatattgctttatttgttgatgaagctcaggacttgaatcgagctcaatatgaatttataaaggttctttgtggtgagaaaataaaaaacatcatgatggttggtgatagtaatcaaatgatttatggttttaatggttcatcatctgattattttattaaatcatttggtaatgatttttctcctgtgatttatcgcttgaaggaaaattataggtcttctcgtgctgtgatagaattagctaataaaattaagccgaatagtcaggttagtattaatgctgccattgatggatttaaaacttttaaggtattggaggatgagcaatcagaagcagtttgggtctgtgatacggttgaaaacttacttaaattaaaaaaacatcctgaaattgaaggtgatattgattgttcgaaaatggttattattggtcgtaatagatttgtttttaaatctattgaggatgaaatgaaactaagaggtattaaatacttcttaaagcgtagtgataggaatgagcaaccagtgtctttcattggtaaattaattgacttggctataaaaattaaaataaattcaaaagactgggttgatggaaggagattgtataaattaattggtatagagcaatttactaaaataaataatgattacaaaattagtgaaatcataaaagaagtaaataattcaaatgtggatgataagagcttaataagtttaattttggattatgtggaaaatctttcttttgaatctcctaatttattgaagttttgttcagagcttaagtctaatttaataaatttgggggcagcagtaaatgactcttctaaagaagatgatattgctcttggaattagagatatagaacaacttcaatctatgtgggggcgttttaaacgtaaaggacttggagataatctgtcctcatttagaaatgcgttggctttagggcaacttaataacgatgctttgggtaaaggaatcatgttaagtacagttcacacaatgaaaggccttgaaaaagatattgtttttcttgttggaatgtgtgaaggcgttttcccggactaccgggctaaaagtaatattgatttggaagaagaaagaaataatgtatttgtggctattacacgctctcggcggtggatttacattagttatccagaaaaaaggatgatgccttggggggattataaataccatgcagcatcaagattttatcttgatatgcaataa

SEQ ID NO: 72898 - DNA, 1953 bp, Aeromonas veronii AMC35
atgttcattgaacgattaacgttaaccaattttcgctgtttcggggccgaaacgaacattgatctgacaccaggtctaactacattcattggtgcaaatggttctggtaagacggcagtgatgcaggcgcttcagcggcttttcggtatcaccggagatcagcgtcatattcgtcgccaagacttttatgtgcctgcagatgaggctgttgcacctctacaacgacactttagcctcgaagccatattggcttttcctgagttggacacggacgaggttggtgctgcagccattccggagttctttcagcaaatggctgccgacgaggctgggcgtttgaagtgccggcttcggctagaagcgacatggacagatgatgggtcgctcgatggggctatcgagcagaagtactgggccgtacgtgccttcggcgaattcactgatgatgagtgcgttgagctgaaagctgtcgatcgggcacgtatccagatgatctacgtacccgcttcgcgtgatggttcttcgcaggtaacttcatttttgcggggtcgcctgtggcgcgcgatcaattggtcccagggtgtacgcgacacgtttgatgaagctggtatgaccctcaatggggcatttgctggtgaagcggctgtcgatgtggttgctgacgcggtacgacggcgctggcaagaggtccatacggccggcactgataccacgccattgtttcgccccgtggatttgcatttccaggagtttattaggaaggtcgaagtagtttttcggcctgatgaggctggacgtgaacgagcccttgacgatctcagcgacggccagcgctcgttgtttcatctcgcaatgacggcagcaacactggatgtcgaaaacagtatcgccggggatcccgtcgcagccggatttcaacctggcggcgtccccttgccggcattgacccttattgccatcgaagagccagagaacaatctcgcgcccttctacctctcgcgcatcgtccgtcaagtcgaagacctgacggtggggagccgtgcccaggcagttgtctcaagtcactcggcaagcattctttcgcgagttgatccttctcaagtcaggcacttccggctcgactccgctaatcggacgtctttggttcgagcgatctgcctgccagaggggctggaggaggagtcaaagttcgttcgtgaagctgtgcgcgcctatccagagctctacttcgctcgattcgtcgttcttggagaaggtgcttctgaagaggtggttatcccgcatctggcagaggccatggatttcgatattgatcgctcgtttgttgctgtcgtgcctctcggtggacgccacgtcaatcatctgtggcgccttctcagcgagttagaaatcccttacgcaacgctgcttgacctcgattgggggcgcgatggcggcggttgggggcgaataaagaccgcctgtactcagttgcttgagaatggtgtcgcccctcaagcgctgtttggtcagcaactggatccagatggccctgatgccaatctcgctcgctttgatggactaccagcagagaatatggcatggatgcaggagtggaccaattggctgcgccggttcgacgtattcttctgcgctcctctggacctcgactattcaatgctctgtgcttttcctgctgcatatcaggttattgagcccggacggcaaggtccctctaatcaaggcgaccctcgcattgcggtgctgggagagacggggcgccgggagctttatggggcggatcaagaagcctcgttacgctggtatcgatacttgtttctcgggagaggaaaacccagcacgcacgtgcgtgttctcagtagtcaggcatctgaaaccttggctgcaggagcgcctgaggagctccgggcgcttctcatggctattaacgctagattggaaccggcgaactga

SEQ ID NO: 72899 - DNA, 1881 bp, Aeromonas veronii AMC35
atggcactaattcgtccggagaattggcggccacgcggcattgaggatttagagcctgctgcatggcgcgcgttgcgccatgagggatccgcctgtgtagtcgcaggcccaggagccggcaaaaccgagtttcttgcccagcgcgcagcctacctgcttgaaacgggaatttgcccggctccttaccgtgtgctggcgatttctttcaagagtgacgccgcagaaaatttagcagcacgggttcggaagcggtgcccaccggatctcgcgaaccgctttacctcgctcaccttcgactcctttacgaagggcttggtagatcgcttccaggcggcgattccggtagcgtggcggccaacacgtccctatgacgtggcatttccgacgcgccgccaggtcgagcaatccattgctcgtgcgagacaaaacgcagcagttcaatggcaagccacaattggtggctatacctctgagacatttgagtcgcacaaggtgggggcataccgactccctatcgcccggaatgcaccgcattcggctgaagaatttgctatccaccattggtggaaagaacaacttgagcgccaaccgaactcaggtctcacctttgtaagcctgaaccgtttagcagagctgttgctacgctcgaatccgcatattcgacgtgctctgcagcacacctatccgtttgtgtttgtcgatgaatttcaagacacaacctacgctcaatacgacttcctactatcagcattcggaggtgctgacattgcggtaaccggagtcggtgatgacaagcagcgtatcatgacgtgggcaggcgctcgcacggattcatttgactgcttctctgagggtttcggcgcagttcgtatcccgttgctgttcaacttcaggtcgtctccagaccttgttcgaatacaacaggttgttgcgcgagcgcttgatccagatgctcctcaagcggtagcgcaggcgcagcgccaggttgacggtgatgtggctcaagtttggaacagccgcactaggaaccgggaaacaacacaccttgcacgctggattgtgaacgacatggccaatcgtgccctttcgtctcgagattacgccattcttgtaaaacaacgtgccgatgattttgaggctgaactagcgcctgctttcgcacaagttgggctacggattcgcaatgaaagccatgctcttgggcgaacgacattgcaagaccttctatctgatgactttgcaaaaatcgccattgggctactcaggctcggtgcaagccgcagagcacctgctgcctggcagttagtttcctccgcgctttgggttatacgtgctattgctccagacgatgagttaggatcgatgcgcattgagacagagctctctagattcatcgcaacgcttcgcgctgatatggcacattgtccgccttcggtagccaatgccaatgtctttgctaatcgcgtggtggagtttctcgacctggcagccctccggcgaacctacatcgaatatgcatccagtgacttgctaaacattatggaagaggcgttccacttgcaccttgccgcgtcttctgatgccgctgactggatcggttgtctcgatgccttcgaagggatagatcaaatccccatgatgaccgtgcacaaaagcaaaggtctcgagtacgacactatcgtctttgttggccttgatgatcaggcttggtgggcgcatagaccgggtaatcttgagggacttgcaacgttcttcgttgccctttctcgtgcaaaacaacgtgcgatctttgccttctgccaagagcgcggtcagcgacagcggatagctgagctataccggcttttgacagacgcaggtgttccggagatggtaatttga

SEQ ID NO: 72900 - DNA, 1776 bp, Aeromonas hydrophila SSU
atgaacatattgatcgacaaagctaggattgctggctttagaggtatagaaaatgttgaaatatctctaccaagagtagccgttctaattggggctaacaatgcaggtaagacatctataattaaagccatgcagttggctttgggtgattactcaagatacttaacagaggaggatttttatatcaatgatgatgatcacgttgctgagagcatcattgtagatgtaagaattatcgctcttgatacacaaggtgaaagagctaaaatatttgaagctgaatggattgaggagtttgaagacatcattcaatccgaacctgatggcgcacagtttgttataatcagaactaaatgtgaacgcgataaagttaaaggtggatttttaacatcaagatattggctagatacttggcctgaattttctgtatggatgagtgtaaacaccatttcaaaacgacaaatacgtaagcgctttgatgctttaccttttatatctattgatgcacaacgagacatacatcaagagctaagagaaaaaacttcttatattggtagagtgctggctagtgtcgaatatgatgatgaagatgtcaaagagctcgaaagaatggtggcagatatcaatgaaaaggctatttctaaaagtgaaccactatcagagttgaagattcaccttgatactctgagtcaatcatttgaagggaatggtcaaacagatattacgccatttccaaaaaagattcgtgatttatccaaaagattcactgtccattttggtgagaatgaaaataattcattttcaatggaatatcatggaatggggaccagaagttgggcttccatgcttactgtcaaagcattcacagagctatcggccagaaaacatgcagaagaagtagagccattctttccaattattgctgccgaagaacctgaggcacacttgcatcctaatgcgcaacggactctttatcaacaattgaaaagctctaaggggcaagtaatagtcagtactcattcaccttttctcgcagcgatgagtgcactacaagatattcgctctatggtgaaagtgcatgaaagaactgtggtgaagcagcttccacatgtttttgatgcggaagatttacttattctacagcgtgaagtcatgaggtttcgcggagaagtgttgtttgcaaaagcaataatcctgttcgaaggtgtgactgaagagcagattgtccctgcaatgtttgagcattactttggcttttcttctttctctgctggagtaaattgtatcagcgttgcggggaaaaattatgcaccatttatcaagctggggtgtagtttaggtattccagtctgtgttgtaggtgataatgatggaaatgcaagagcttcggtagaagctcagttagttaacattagaagagatacggggttgatgttaaatgaccaagaatttaacatctattttttatctgataataatgatattgaggctgagttagtaaatgaattaggtattgttcctgaattagttgaagctttggttctgtcagaaacaaaaggttctggcaatcaaagatatgttgaagctaaacaaagagaaatgttagctttagataaaggtgcattactgatgaagttaagaggggccaaagcttcatatgctggatttctagcttcggtcatttgtaacaatccacaaaaaagagcaacgggagagctggttcctattgcttttagaaatgcatttgatcaagtgaaaaggtggatagaatcatga

SEQ ID NO: 72901 - DNA, 1896 bp, Aeromonas hydrophila SSU
atgattggtttgtcaaagacgcaagcggatattatttattcatctatagggaacccgattcagattcttgcatcagccggttctggaaagacgagagtattaaccgaacgcatcagatttattctagataacacgaaaaaagatagggtcatagcgcttacatttaccaacaaggctgcggaagaaatgcaagagcgccttgcagaggttgatgatatagaagacagagcttggatatcaacggttcattcggttgcacaaagaatacttgaacagtatggacatactatagggcttccttcagagctgcatatatacgatcgagatatagatcgtatggaggtttttcttcagtccttaagagatgatgggattgatatagacaattaccttaacactggagactcaagagagaaaaaaaaccgccagcaagtcatgcaaaaatatatggataaattttccataattaagcgagagttgttatctaaggaggaggttgaagaacgtttctctatagagtctggcatctggaaaatttatcaggattaccagagtgcattgttggcaagcggtgggattgattatgatgatattcttatttttgcacacaagttattactgactcaagaatgggttgcagatctctaccgcacaaaatataagcatctgttcgttgatgaagctcaggaccttaacaaggcacagtatgagtttattaacgtattttgtggaggtaaaattaaaagcatcttaatggttggtgatccaaaccaaatgatctacggctttaatggatcttctgaaaaataccttacaaaacagtttgtggaagattaccatcctattcaatacaaactgaatgaaaactacagaagtactaaagcagtaataagagtcgccaataaacttaaaccccactcgcaaactgaacatgtgatggctctagatggtttatttcatttgcaatcttgtgttgatgagcatgttgaagcattgtgggttgtaaataaaatcaatgaattgttgaggctggctaatcatcatgaaattgagggtgaaataacgctggaaaaaatggtgataattgctaggaatagatttgtctttaaagtgctaatggatcagcttgaaaaagaaaatatcgcgtttcattttaagaaggctgagcgtcaaactgaaccgacatcattgtttggcaagatattagatttttcaatccgtttgaaattaaaccctaaggattgggttgatggcaagaaattgtgtgcactactaaaaatttctcctccaatagattggaaaggtgaaaatttactaagtgtctggtctcgcgctgttagtaatgtagatattttattccctgatcttcaatctgaactattagaaaaagttgataaactcgatagtgaagaacccaatatccccaagttctgcaaggagctggcagataaactcgcactattagcaaatgaagcaaaactagatgagaacaagagtgaaattgaacttagtatcaaagagttagatgaattcaggcatgcttggacccgattcaagatgaaaggcttaggtagttcactacaagcatttcgaaatgcatatgccttaggccagcttgcagaaagtgctcaaggtgcaggcataactctaagtactgtgcacacaatgaaagggctggaaaaagatatcgtgtttttgattggtatgtgcgaaggtgtgtttccagactatagggcaaaaacaatacaagagttcgaagaggaaaaaaacagtgctttcgttgccgtaactagagctagacgatggctatatattacatatccacaaaaaagaacaatgccttggggcgatattagatatcagacaccatcccgcttcatacgtgatctaagctaa

SEQ ID NO: 72902 - DNA, 2070 bp, Alcanivorax pacificus W11-5
atgaagctgcgtcatgcaaagatcaagaacttccggttactcgcagacgtgcagcttgctctggaggatttgactactgttgtcgtggggcgaaacaacagtggcaaaacttcactgtccgagatcatacggcgactactagccgaaggcagcgcagcatttcaactcgaagatttctccagtgcctgctacgacaggttctgcacggcactggaagctcataataatggccaagatgacgatgtagtcagggctctgattccgttcatcgagttgcgtttgacgtttgaatatgaccctgctcagccacagttggggcctctcagtccattcgttatcgacctcgaccccgactgtaatgaggtactcgctgtagtccgctacgagttgaaggatggacagctcgcccaatttttctcgggtcagccggatacccccctgaccgatgaaacgaggatagctttctttcgctcgcttcgagaacgtattccaaccagctttgccgtcagggtatgggcggaagatccgaatgatgcggagaacaatcgtcagttgcagccgagtgcactgaaggctctgatcaaaaccggcttcatcaacgctcaaagaggcctggacgacataacatcccgcgagtccgatgtactcgccaagactgttgaactcctctttgccacagcttcttcatcttcggcagatgaggctgacaaacagattgcccaagcgctgaaagaggccgttcaggacattcaatctcagatagacagcagcttcggcggccaactgaacaatctgataccggcattgaagaactttggatacccaggattgggaaatcaggaactgcataccgagacattgcttgatgttcgcaagctgctctccaatttcaccaaggtgcgctatgccggctacagcggtgtgactctgccggagtcctacaacgggcttggagccagaaacctcattttcatccttttgcagcttgcgggattctataaatcgtttctggccgaaccaaattctccaggggtgcacctggtcttcattgaggaacccgaggctcatttgcaccctcagatgcaggaggttttcatacgtcagctcgcgaagactgctcaactgctggttgaaggcacggaaagtaagacggcttggccggtccagttcgtcgtttccacgcactcatcgcatatagccaacgaggccggatttgaaagtatccgctatttcctcagtggcgaagtacaaggcgcagccgctggcgttcggcaaacgagggtcaaggatctacgcgaggggctggacggcgtttccgaaccggacaagaagtttctgcatcagtatatgacgttgacccgctgcgacctgtttttttccgacaaagcgatcctagtagaaggtttgagcgagcggctcttgctccccgcgatcatcgaaaaactggaaaccgcagagccagatcggccaaagctatcaagccagtacgtaaccactatggaagtcggcggagcatatgctcatcttttcttcgggctcctgcgctttcttgaattgccaaccctaatccttaccgatctagattcggtagaaaaaccgggcggaagcgcgtgcgaggtccacaagggaacctactccagcaacgcctgcctgaaagcctggttctccgatgataatccattcaccctcaatggcctcttgaccaaggatgaatccgaaaaggcaaagcatggcaactgcatcgcctatcagtgcgcggaggaagagaacgggccatgcggtcgcacctttgaagatgctttcattctcgcgaaccgagcattattcggcttgaatggagccacacgggaagagcttgaagcgggagccagaagccaagccagtaagatcaagaagtccgagtttgcgctgaagtacgcaatagaagaaaaagcctggacgacccccaagtacattctcgatggaatacgctggctagcggctggcatcgagccagccatccctgacccggcgcttgccctggcggccgaggcgatgatcgccaacgaggaggatgccgctgatgcctga

SEQ ID NO: 72903 - DNA, 1740 bp, Alcanivorax pacificus W11-5; identical to SEQ ID NO: 71839

SEQ ID NO: 72904 - DNA, 2100 bp, Celeribacter baekdonensis B30
atgataacattgtccaaaattcatgtgcgcggctttcggctcctcgaagacatcgaaatgtcggtggaggtcggctctactgtcatcgtcgggcgcaacaatagcggcaagacgtcgttgacggaggtgctggatcattttctcggcgaacaggccggcaagtttaggcttgaagacttctccgctggcctgcgatcagctttcatttcgagcaaggtcgaccgcgacacgggcgttctgcctgcatcagagttgctcgaaaagcttcccgccatttctctggatctgacgtttacatatggcaagggaggtctcggtcccctgtcgccgttcatcattgaccttgatccggcctgcacgacagcgattgcgcggattgaatactccgcgacaatcgccacaattggtgcccttctcgatacgccagccgaccctgcggtgcccctcttaatcgaaccggctccggcagccgaaccggttgtgcccgtggatcccaataccgccttcttcagacatcttcggacggccatacccgatgcatatacgttgcgggtctcggccatagatccgaccgatccgacaaaccggcgcaccttccagagtgcctctgaactcaccgccctaatacgtgtcgggattgtccgtgcgcagcgcacactcgaccccggcaaaaagggagacccggaagttatcggaaaacttctgagccagctctttagaacggcgaactccgctgaggcggcgcaatcggatcaggacgttgtcgcgcagctcaagaaatcagtgtcgcacgttgaggccgcaatgcagagcggctttgacacccagcttaaaggcctgttgcctgcgctcggtatgttcggttttccaagtctcaacgacacggagctgagaccccataccaccatcgatattgaaagcgtgctaacagacaacacgcggatcctctattcagggtttgacggcgttcatctgccagagggctataacggccttggcacgcggaacctgatctacatcctgctacagcttgaagcgatccataaggtctatcgcggcctacccacccgccctgcggtgcatcttgtattcattgaggaaccggaggcgcatcttcacccccagatgcaggaggtgttcattgccaagctgaacgaagcggtgggcgcattatctgccaggtatccgggggacggtgtctggcccgcacagtttatcgtatcgacccattcatcacaccttgcaaacgcagccgcgttcgaagccattcgatatttcctgaatgtcagcactcctatcgcgggggtccgacggacaaaggtcaaggacttccggaagggcgctacgaaaatcccggagccggatcggaagtttcttcagcaatatatgacccttacgaaatgcgatctttatttcgcggacaaggccattctcgtcgagggcgcaacggaacggatccttatgcctcgcatcatccggatgattgataaagggatcgatgccgccaagtgtctcggtagccagtatatcaccactatggagatcggtggtgcctacgcgcagaagttttttccgctgttggaataccttgagcttaagtccatcattgtgacggatctggatgcagttcgccttgaaggcggcaggcatcggaagtgcctctgcgctgaggcggggggcacatccaacagcgcgctcaaggcatggttcgacaagccggacattcaggtgacagaacttctggcaaagactcctgcagagaaaacaagaggcttctaccggattgcctatcagattcccgaagagggctccgcccattgtgcgcgcagctatgaggacgcactaatcctcgcaaacctggccgatttcggaattgcagccgatgcggataccgcgagcaaggcttgggaagtagcaaaaggcttcggcaaatccgaggaagcgatccggttcgcagtgaaggaggaagactggaatgtgccgcgatacatccgtgaggggctggtttggctgtctgagcctccgccacccctgcctcctatcccgccgctgattgaaccgccagctacaatcgaggtcgcagcggaggccgaagaatga

SEQ ID NO: 72905 - DNA, 1743 bp, Celeribacter baekdonensis B30
atgatcgcggctgtttccccagcggttcaggccgcgcaagccgcacaggcacgtgtcagtgaatgccttgatgccgggcaaaacttccgtcttgaggccggtgcaggcgctggaaagaccttctcgctcgtagaagcattgaagaagatcatcgccgagcggggacccaccttgatccgcgcgggccaaaaagttgcatgcatcacctacacggaggtggcccgcaaagagatcgcacaggatatcgaggatcatcctgccatccttgtgaataccattcacggctttgcctggtccttcctgacccagcatcagaaggcgctccgcgagcttgtcatcggccttgagtcggaacgggagcttgaggcaatcgcggcgggaggcggtgtgaaagaccagattgtcgactataatctcggcttctttggcatcgacgataaacggatcacgctgcaccatgaccatgtgcctaagtttttcgcaaaactgctggctaaggaaaagagccgccgcctcttcactgacctctatcccgtgcttttcatcgatgagtatcaggataccgatccgcacgtgatgtccgccatctccgagcacttctttaccgctggtgaagggccgataatcggcctgtttggcgatcactggcaaaccatctacagaaatgactttgaactgacgaactttccggatgtgattggaatcgacaagggcgcgaatttcagatccgtgccagcggtggtcaatgtgctgaacaaactgagaccgggtttgccgcaggctgtccgggatccgaaggcacccggagaggctcgattcttccattgcaatgacttcaagggcgcacggcgcgatgacagcccccataaactggacctgccggcgacggatcattcggcggtggtggagcgcctgaaggagcacctcactgctgacggctgggacttcgcgccgaagcggacgaaggttcttatgctgacccataatgccattgccgcgaagcagggctatccgcgtctcgcgaaggttttcaaatacaacgatgccttcgcgaagaaagaggatgctgtaattgcattctttgcggacgtcgtagaaccgctatgcgaagcatatgaagctaaacgattcggaaacatgttcgcacatctgggcagggcgccaacgatacggtctctcgatgacaaagccagctgggtgaaggacttggataagctcgtggaactgaggcttaatggaacgattggcgatgtgatcgattttctccgagactccgcgcgtccccgcctgacagaccgcattatggaacgcgaagacgagattaagaagcttggaccagagccaacagacggcgaatctaacacactaaagaaccatagggcattgcggtccgtcccctacgccgagcttatagaggtgaaccgatttgtaagtgggcatacgccattcgcaacccagcatagcgtgaaaggagcgcagttcgagaacgtgctggtcgtcttgagtggaggatgggctcactataactggcataggtttctggaccagctccacacaggtgccattggcccgaaggaagagggcggattttaccgcgcacgaaacctattctacgttgcgatatctcgaccagagacgcgtctggcagttctggcaacacagacactgagccctgctgcgctatcggcggtttcgcatctttttgaacctggtaacgttagcgcgattccgtttccgaactga

SEQ ID NO: 72906 - DNA, 1752 bp, Serratia plymuthica A30
atgtatttaggtaagctaaaaatttcgcggtttcggtcttgtgatgatgtgaccgttggtctccgcccagatttaactgtattggttggtgaaaataatggtggaaaatccaatgtcgtagacgcaatcagattgcttactctgccgttgagtggacgccgcgaacgatatccagaggatgaggatgtacgacgctattcgaccgtcccaagttttcaaatcgaaggggctttccaaggtctaagcgataccctcaaaggtctattgatatctgcagttcccgatcctaccaagagcgaggctaccttcggttatcgatatgaatcgcgttctgaacatgctccccgtggtaagactaccgtgtgggctggacgtttcgacactaatggaccagagcttggttcttctgagttgatccgacacgtttatctccctcctttaagggacgcacatcaggtgcttggtactagcagtggcgctcgagtgatggcattgctgcgtaatttcttgccaaaagagcgggaacaggatttcctcgctggtgtcaggcgtgcggataatcggcctgagatcttaactacaatcaatacggatatcagtactgctctcggactactcactaatggagtacgtccgcagatagcggcattggattttggtagcgaaaccttactcgatgtagctcgtgatttgagatttcgtatggccgatacaggtttgatacccgaagatattcggtcttctggtctggggtactcaaatctactctacatggccactgttgttgtagagctgactaaggctaaagaggcagacctcacgattttccttgttgaagaacctgaagcgcatttgcatccgcaattacaggtacttgtgcttgagttcctcttggatcaagcgcgccaatcagcatcacgtatcgcagcgccaggaaagcctgaaggccgcatccaaattgttgtgacaacccattcccccaacctgaccgcatgggtttctccacgtcacctagtggtcatgcgttcgcggcatcgtgaacaagatggaatagccatctcagaatcagtgagtgtgcccattgccgaaatagggctaaagccaaagacattagataaaattagccgatatcttgacgtgactcgttccgctttgctgtttggtaacagagctatattggtggaagggatcgcggaagcactattgttgcctgtgctagcacaaaagcttgtgctagccgatgatttagatgggtggcttaggttcaagggggctgtaattgtgcctattgaaggtgtggacttccgtccatatgtagaggtgctgctacggccatatggtgatgcacgcattgctgataggctgatagtgatcactgatgcggacccaaccgtgttgggaaataggaaagttgatctggaaaatctggcggcaacgcatggagctccagatgctctgatcgtgctaaccaatcagcacacattggagcacgaaatttttgatgctggaaatgaaagtttcctgaaaagcgtgtttcttcgtttgcatcgtaattcacgtagagactgggaagcgcagatagagggcattccagaacaagatcgtcccaatgcatttcttaaattaattgaggcgaaaaaaactcgtaaaggcgatttggcgcaagctatggcttcgcgcattgaggcgggtgaaccatttgttgttccgccttatctcattgatgcaattcgtggagcttcacgtatatga

SEQ ID NO: 72907 - DNA, 1776 bp, Serratia plymuthica A30
atgactggcatccacaatctaaccccagagcaagagacatttgcttctcacattggcggagccttcgttaatgcttgtcctggagccggaaaaacgcgcactatcattgctcggctagcgaggatcgccgctaagttgccttctcgtcagggcatagcgatactttcattcacaaactccgcagtagacgagttccgcgaacgatgcctggctgctgggctcgatacgcttttgaagtatcctagtttcatgggaacacttgatgctttcgtcaggcatttcgttgtactgccaagttgcgcggtatcgagccaaactcggccaattattctagatagttgggatacgcttggtgtagaaattcgtttatcaggtcaatttgcctttcgaggtgaaccggtaagcctggatttgtttgatccagaaaccaatattattgatcctgataggatcggacatgcgggtttgcaaaatcatgtacgtcaacatcagattcgatatcaacaagctgcagcaaatcggcgacgatctttgttacaagctggctatatgagtgcaggggacgcacgtgctcaaacattgcggttgattagagataatgtaattggtgagtcacttgctcgcgcattggcggcacgttttcaagaagttatggttgatgaagggcaagattgcaatccactcgatctgcaaatactgacatggctcagagcacatggggtaaatattacgttcgtttgtgatcctgaccaagcaatctacgaatttcgtaatggcaatcctcaagggatacagatatttaaggatacataccctattgcatcgcataaggggttgacggggaattttcgtagtagtcccgcaatttgccagttagcagccactctaaggcgagaaggtcaggttgatcggtcgcttggtgaaagtgcgaatgttgactatccaattttacttctaacctatggtggccggggcccaacggaaattattggtcaggcattccttggacggattacggaactgggactggactcaaccaatgcgattattttggctcattcaagcaaagttgcgttgcgggcatctggcgtcacttccagcaattcaaccggaaactcgcgaattgagtcgctggctcgtaaagtgtcagagttctggtcacctgccgcaaccccaagaacgaaggagaatgtagtccagtcagtcgaaatattgttgctggatttaatgggggggcgccaaccaaatgagcatctgattaaagccatcgaacgtcttggaatggaccggcgtgcccatcggagatgcgccctaagttttctcattaaccttccaaaaacgtgcagagattccgatgaagagcggcttgcctggatagcctgtgttcatgcggaaatggagaagctgcatctgccactccctgctggcgtaagcgtacgtcgtttcttccgacagcctccgaatgcgcaatggtcaaagcatcttcaagtacccgctgctctcggtttcgcatgtggcaacatacatgaagtgaaaggtcgtgagtatgatgcagtatgcgtcgtagtcccgccgaatcgagcccctgaaaacagaattgaagcactcttcgagtcatggcaagcgcgagtagatgctgaggcaaagcgcgtactctacgttggcctcacccgtgctcgtaattttgttgctcttgcgataccaaacgcctttgcagggcgctgtgttgatctgctggccacaggccaagtgccctacacaagagtggatttgtga

SEQ ID NO: 72908 - DNA, 2139 bp, Klebsiella pneumoniae subsp. pneumoniae WGLW5
atgcatatatccaagctcagcctggtcaactaccggaactttcccaacacgaagctgctgttccagaagggtatcaacactgtcatcggcgaaaatggatctggcaaaaccaatctctttcgcgcaatcagattgctgcttgatgacaacatgattcgctctgcctaccggctggagcataccgactttcatcgcggcctagggcgctggcagggacattggatcatcatcagtcttgagtttgaggaaatctctgcggatgaatcagtgcaggcgctcttccgacatgggacgggcgtaattgaggaagaggcgaacggcaaggccacttacaacctgatctttcgtccgaagaaggaaatcaggctgcgactttctcaattgaacgatggtgatcaggcaggcctcgacgctatcctgaacccggtcaccatcgacgactatgaaacgattttcacaggtcggagtgaagccgacttcaacgacgaggccttctataaggatgtggtcggcgacttcgcgaatgttcgattcaatgaagaggttgaatttcgtgttatcggcgcgaagattccgaacgtgctgtccgtctccaaagaaatttcgttcactttcgtccaggcgctacgggacgtcgtctccgaatttcacaacaaccggacaaatccgctcttttcgcttctgaagggcaagagcggcgatatcgaccccgtggcgttccaggctatcaccgacggggtaaaggcattgaatgactccatcgaagcgttgccagacgtgcaggtcgtccggacggatatcagagacaccatcaaggatgcggcgggtgaggcgtattcgccgtcttctctttctatcaagtcggatctgccagacgaagctgacaagttgttccagtcgctcaagctgttcgttggcgaatcgggggagagccacgaaggaccgatccacgagctgagccttggtggagcaaacctgatattcctcacgttgaaactgcttgaattcaagtatcaaaaggctaaacagtcgatcgccaactttctgcttatcgaagagccggaagctcacattcacacacatatccagaaaacactgttcgacaagctcaaatacgacgacacacagatcatttattcgacccattcgacgcacatctctgaggtcagcaatgttcagaacgtgaacatcctcggcagagaaggtgatcgttgcgaggcataccagcctgcaattggcctaaacccagaagagatcggcaacattcaacgctacctggatgctgtccgtagcaacttgttgtttgccaagagcgtcctcttagtggagggcgatgcagaagaaattctcgttccgatcctgatcaagaacgtgctaggcgtcagccttgatgaactcggcatcagtttaattaatatccgcagcactggatttcagaacgtcgcggttcttttcgatgatgcccgaatccggaagcggtgcagcatcgtcaccgaccttgacaagtccatcattgacacaacgccggcggcgggagactccgaagggctgctccggcgcaagggcaagtatcaggcatcccaggaaaaaggggtcgccaggaaagcgttattggaagacaccttcaaagataacgggtgggtttctccattctttgccccccataccttcgaggtcgacttcattgccgccggcaatgcgcgtaaggtggtcggcatccttcctgatgtctacaaggatgcaccaaccatcgcgacggccaaggcggagctcgaatcagcggacatcgcgttgttcggtcagcgcgcattgaccatggcggacaactacggcaagggatggtttgccatcttgctgggaaagaagatcgatccgcagaccgccattccgaagtacatcttggacgccatcgcttttgcgcatccggtggtcactaaggaagtctggtttaacgtgctgagctaccgcgtgaactacatcgatgcagaagatatcttcactgcgtctgccgtattcgacgactttagggccaagctgctggccttccgaaatggagacatcgacttcgtcggcatccgaaacgagatgcttgccacgttcccagatgatcgcatcaacgatgtactcgcggtgttctga

SEQ ID NO: 72909 - DNA, 1800 bp, Klebsiella pneumoniae subsp. pneumoniae WGLW5
atgttcatgtggaacaaagatgatctgaatcccgagcaggaagcagccattctgaagccagggagcgtctttctcatcgcttgcccgggcagcgggaaaacgcgcacgctcacctacaaaatcgcctatgagttgtccaggctgaaatcgaacaagcagtttgtcgttgccatcacttatacgcaccgtgccgccgacgaaatccacgagcgcattgagagccttggggtggatacatcccgattatggataggaacgatacattcgttctgtcttgaatggatattgaaaccgtacggcatctatcacgaagcgttggatcgaggcttccgtgtgatcgatcagcatgagcgcgagaaaatcctggaggcattgtgcaagccttaccagaagccaaaaataacattctgggattgtgagttttattacaccgaaactggatatgtgctctcctgcccacaagattggaagcattcgggtcttcacgtcatattgggcaagtattttgagattctgcacgaaagtcggcagctagactttgagctcattctttactatgcgtaccaactgatcgcacgtcatcctgcgatcagcactcttctggcacagttgttctctttcgtgctgatcgacgagtatcaggacaccaaacgaattcagtattcgatcatcaccgccattctgaaagctggtcaaggtgcgaccaaggcctttattgtcggagatcctaaccaggcgatttatcaatcgcttggcggatatccgattgccttcgaggatttcaaggcgatggccaatatcgatttggacgaactcgaactgtcgcggaactaccgttcttctgagcgcatcattgagtacttcggaaactacaacgttcacaacacacgcatcgaagccgcatccgaggacaaggcgtacccaagccttatttcattcgacgacacagtgagcaaaaatgatctggacgctgagctcatccggctcatccgtttcaacattgagactatgggcatctcacctcacgaggtgtgcattctcgcgccacagtggacgcatcttgcaagcatgacacgtcgtttggtcgccagcatgccggagtactcattcgatggccccggtatggttccctttgcacgggacacagagaatttctggtacaggctttctaagattgcacttactcaggcatcgccgggaatgtatgtgcgcagactgcggtgggccggggagattctgaatgacctagaggcggccggggctagcgtgtcgaagctcacgcggaggtccttgttgagggagtgcaatgcaattaagatcgatgaaacagatggtcttacctacttgagcgcatttttcgagcgtctgtttgcaaacttagcaatcgactttcgccttttcacgctgcttcaagagcatcacgttgccttcttcgatagttcgcaagcccgggtaaatcgattgaagagtgaaggtagcgaatttataggcgatattgagacattcaggaaggtatttcagcataggactggaatcaccatctcgacgatacacggcgtcaagggagccgagttcgatgcagtgatcgcttatgcattattagaagatatggtgccgcatttcaatgatccgaacggtcaagaaagcgcgatgaaattgctgtatgtcattggttcgcgggcaaggaagaacctgcaccttgtttcggaacgaggtcgagttcgccagtattctggcgaagagtatcaagtaactcgcaagcttgcctcatgcagttttggatacgatcaaattccatag

SEQ ID NO: 72910 - DNA, 1851 bp, Herbaspirillum frisingense GSF30
atgacaatttacgcaatcgagagcggcgtcgcaattacggacgttcgcgtcagcaatttcaggtcgctcacgaatattgaggtcgagctcggtgatctcacggtattgatcggtgcgaataatgccgggaaaaccagttttctagacgccttatataccgctgtcggagcgggcagaaagaccttttcgagcgaggatgtgaggctcgcgaaaggtgaggcattgcccccgaaagatcgccagattacggtggatgttcgggtacgtcctgtgggagatgacggggaggttattgataaattcccagccggaagtttttggacgtctctgtgggggagcttgtttgctttcgatgacgaatttaacgagttcatcgctttacgtgtcacgatggcttggagcatcgccaaagcagattacgtcgttgagcgtaaagccttgaaggaatggaggccgtttgccgactggttgacgacagaagtgcatgatcgaaatgtcacggcctctttgctcgaacctttggcatttcactacatcgatgcaaaacgcgatctggatgaagatttgcggaagcagggctctttctggcgtcgaatgaccgatgaacttggtctggacgaagcagacatcgccgaattggaagaaacgctctcttcgatcaatcaacaaatcgtggataagagtgaggtgctgaaacatctcaaagatagcctggctgatttacaagtcgtcgtggccgcagacagtgccgggattgatatctctcccgtagcccggaaattgcgagatttgtcgcgagggattgacgtgtctttttccacgtcgggggcacaggcttttccgttggctcgccacggcatgggtaccagaagcctggcgtctttgttggtcttccgagccttcgcctcgtggaggaatactcgggttgttgcaagtggagacaaaattcactcccttcttggcctcgaagagcccgaatcccaccttcacccccaagcacaacgctcactgttttctcatatcaaagacatttccggacaacgggtggtcagcactcattccccttattttgcggggcaagcccaattggaggatctgaggctgttcatcaagaacggcggggaaacgtcttgcactcggcttgacttaacgaaactgaccaagttagacgacaagaggaaactccaagagacggtgattgaatctcggggagacattctgtttgcaagggcggttattttgttcgagggacaaacagaagagcaggcccttcctatctgggcagaggcctattgggaagcaactattcatgagctgggtttcagttttgtccgagcgaacgggacagactatttccccttcatttggttggccaaaagcctaggaattccttggtatattatcggcgacggtgaggcaaagccggtctcagatttggaggacgctttaaaaaaagcagatgctccggctatcaatgactctaaaaacatcgtcatattccccaatgggcataattttgaaaccaagttggttagcgagggataccttgctgagatagaaatagccctggacgaaatgagcgaacgaaaaaattatcttgatgagttcatgaagaaacatcatggtaaagcgtatccaaagggaagaggtaatcgcgattatgagtccgatggtgcccgtctgagggcggcggcggatgcaatggccctgtccaagaccagagtctcgaagcccgttgcaaaagcgatttctggattagaagacgagggaagacgcttcccagaagagattcgttcgctatttgaagtgatcagtcgcgatcacggtctacacataagagagaagaaataa

SEQ ID NO: 72911 - DNA, 1719 bp, Herbaspirillum frisingense GSF30
ttgacggagcgtgtgcggactttgcttaccgaggtgccagggcacttccgggttttggcgttgacgttcaccaataaagccgctgaggagatgcgtgaccgattgtctgatctcggaagtgagcggcagagagccttcatcgggaccattcacggtttttgtttggagatgcttgctgagcgtgggaaattcgttggagtggaaggtacgccaaacatcttcgagcagttcaaagaccgcaaagagattctcctgaaagccatcaaagaagatccctacttggacgaggagctaaatcagaccgtcgatccgaaggaacgagggaaacgcgttgacgaatggcttcaaatgatctctcgggtgaaggcacatccgattacgtatgcggtcattgaagaggagttgacgaggcgggtgattcaggcatacgacgctggattgagggcctgtcatgcttacgattttgacgacttgcttttgctgacatacaaactactgagtgaaaatcccaagctcgctgatttctatcggcggctctacaactttgtctgtatagacgaagcccaagatttgaacgaggcccaatatgctgtgatttgtgctttgtgtggagatcatcttaaaaatgtgatgctggtcggagatccgaagcaatcgatttacggcttcaacacatccagccccgaatacatgtaccgcttcgagaccgatttcgcagcgaagaagatcaacctcaccgaaaatttccgttcttcccaagccgttgtatcgatggccaggaaactcgactccaactacctggtggaggcacagatcccaattccaggggagttgcagattattgtagggaatgacgaagaagacgaggctaagaagatcgttgaaaaaatgagtttcctgtttgcgaatggacacacagacgtagagggaaaaattactccgtcgagttgtgccattttgggcagaaaccggtttgtgctgctgaaaattgaagcagaacttcaatcacgaaacatcccattcttccgacgcgtgacatcgaatcacgaaaacgaatctgaaacggtcgatgaatttcagttggccctcagagtagtcgcaaatccgaaagatcggctgcactttgcggctctcgcaaaaaaatggaaggtgtctgatcctgaaagcacccttgattcgctcggtgctctcgatggcatggcgaccatgtcgggcaataagaatgctcttcctatcgtgcacgccgtcagagcgattgtgaatagctctgaccgcttggatctcatgccagcgttctcatctttgcgaagccatgccgattcactggatgaaaattcgaggcgggcaatctatgaagatgtcgctgtcttcgagcaggagtgggatcaatatctaagagcaagcagcacaggccggactttggtcgggtttatgagcagcaaggcacttggggctactcagcactcccaaaaagagggggtagctctgctgactgtgcattcttccaaaggcctggaatttgacgtcgtgtttatcgctggaatgtgtgagggtgtgttcccagattatcgtgcgaagggaaaggctcttgaagaagagcagagaaacgcatttgtggcagtgacgagatccaagcggcttttatatttgtcctatccaaaaatgcgaatgatgccttggggcgataaccgtttccaatccccatctcgcttcctgtga

SEQ ID NO: 72912 - DNA, 2091 bp, Facklamia hominis CCUG 36813
atgattttgaagcgtatgaaagtgaaaaacttcaggttgttaaaagattttgaattagaatttaaggaagaattgtcattagttattggtaaaaataattgtggaaaaacatcagcacttattattttagacaagatgttaaattcatctaaagtgatgtgggaagatataaatttggaatgtcagaaagaagtttatgaaaaagtaattgattatgatatatctaagcacgagaatgctaaatcattagaaactattagtctgcaattatttattgagtatgatgataatgattcatatgaaaatatccaaaaatttatgatggatttaaacccagaaaataacactatagtgttagaatttatttcgttaattgctgtaaaaaaaatcatcgaattaaataactttattagtgaaaaaaatattaaagatttcaaatcattttccaaatttatgagtaagaattttgcaaacttcttcgaaatgaaaaaatattcaagaggatttgatattgaatcaaaccaaataacgcaagatagatcagaagaaattgataataaggatattcaaaaggtcattaaagtggcaggaataagagctgatcgagcggtttctaatgatgatcataatcatgttttatcgggtttaactggtaaatatttcagttcttataaagctgcaaaagatgaaagtgagtcagtatttacaagacttgaagaaaaattggaggcagcagatgacgaattatataagatttacaatggagacaaaagtgaaactggagaagttattgagggcatttttagtaatgttatagatgttataaaaacttatggtggtgcagaaaatggaattgatatagcaatagagtcatctatttcagagaaaaatttattatcagataatacgaacttaagttatagacaagggggagattattcgcttccggaaacatataatgggttggggtatttgaatttaattggtattttatttgaaattgaaaccaagatacaggaattatttgaacaaccagcagatataaatctcttatatattgaagagcctgaagcacatacacaccctcagttacagtatatatttataaggaatattaaatctcatatcaaagaacatagaaaaaatttgttggaagacaagaataaacagttgcagattttaatcacttcgcattcatcacatatagtttctgaatgtaattttgatgacattatctatctaaagaaaaacgggaatacggttatagctaagagttttaattctttaaaagaagagtatggtggagatgaacagaaaggatttcagtttgtaaaacaatatcttacaatgaatagaagtgaactgttctttgctgataaagctatttgtatagaaggagataccgaacgaattttaatgccaatgatgatgcataaaattgataataaagaaaagccaaaagcagatcttattccactattatcacagaatatttctataatagaagttggagcgcattctcatatatttatgcctttattttcctttttaggaacaaaagttttgtttgttacagatattgattctgtaaaagctgaaaagaaaatagataaaaatggaaaagaaagaactgtatatacgagttgtcaccctgaagagggaacgaatacaagtaacgcatcaataaaagaattttttaaagataccggaattgatacatcgaataatcaatttaaggaacttgtagggaaaaatgctgaggataaaattaaagataatatgagaatagcctatcaaataccagaatctgatagtgagtatcaagcgagtagctttgaagacgcctttatagcattaaataaagactttatattaaaaaacaaagaagggttttatcaatatggagctttaaaagactttgtagctgatgaaatagaaagtggcgattattataaatttgcattagataatgttaaaaagaagtcagcatttgcatcaagtttactatatttcaataaagaagatggtaatgatgatgaaaaatggaaggttccacattatattgaggagggcttattatggatacagtaa

SEQ ID NO: 72913 - DNA, 1908 bp, Facklamia hominis CCUG 36813
atggatacagtaaccttagaaaaggaagttttagaagctctacaatgtataaaagatggtgaaaattttattttagaaggtggagcgggaagtggaaaaacatactccttaatttccttaataaatgcacttacagaggaattaccagatataaagatagtatgcattacatatacaaataatgcagttgccgaaattttatcaagaatagaaaatgagaatatttgggtttcaacaatacatgagtttatatggtctcttatcagaaaatatcagaatgaaataaaaaatattttagttgagcttattaacgatgataatgaaaagaactttaaaaagccaaaagatttttctgaggatttaatttctaaagaatatttcgaaaatctttatgtagattatgatgagtattattctgtaacggcaaatgatgaaaatagagtgaaaatcagccataatcacattttgattgttgcagagaaaatgtttgagaaatataaaaaaatagcagacattttaaaggatattgcagattgtatttttgttgatgaatatcaggatacaagtcctttagttgctgatattttactaaagcatcttgagcaaagcgataagaaaaatgtaattggtttttttggagattcaatgcagtctatatatgacgacggagttggtaatttaaatcaatataatttaactaaaatagtaaagacgcaaaaccgaagaaatccaagagttgtaatcgaagtagccaataagtttagagatgatgatattgagcaaagaccttcagaagatataaatgcacctaatatggaaaacggtactattagagaaggtagtattaaatttttatatggaactgaaataaatgattttataagtgtaaaggggaagaatatttttgaatcttgggatttttctgatggaaaacaaacaaaagagttaaggctaacacataaatataatgctgaaatgactggctttaaagacttatatgatctatataatgctgatttgataactaagcttataagtgggataaagaaaaaaattgataagggaaatttagactgtaataagactttgggagaaatagcgttagaggtaaaaccgacatataacaaagcggagctgttagatcaaattaacggaaatgaaatttatcagtcaatatatagtgttttagaagatatgtcatgggaagaagcttacgaaaaatgtagaatcactaaggaatcactcatgtcatataaattaaatggaatgagtggtagatatgaagctaattcttatagagataggattttacgcagattagatatattagaggagattattgaattatatgaggctaatagatttaatgattttctacgaataacaaaattttctattcataatagaaatgataagatttgccttaagcaagcaattgattatcttgtaagtgaagataatcaaacgatagaaaatgtattaaaatttgcggaagtaaaagggttactcaaagaagatgaattgtttagtgattatatttcaaataaagggttttatttatgggagagaataaaaaagataacatttaatcaatatagaaaaagcgttttatatttaaaagaattttcaccaatttgtactcaacatagtgttaaaggtagtgaatatgacaatgtattgcttgtattagagtctgattggaataaatatgactttagaacattatttgggaaaggatctccgaactctaatgttcagaaacgtacaaaaaaattattttatgtttgtataacaagagcaaaaaagaatttaataatatatatgcctactgatgattctgacatattagaaaaagctaaagagtattttggtgaagagaatgttatcgatatatcttcggtaaaatag

SEQ ID NO: 72914 - DNA, 1911 bp, Lactobacillus crispatus FB049-03
ttgagactaaagacattactaattaagggatttaaatcgttcaatgaagaaacgaaaattgatttttcaaaagaaacagcatttattggtacaaatggttcagggaaaacagcctgtcttcttgcacttaataaattattctcatataatgcatcggatagaataatacatgaatcagatttttatataaattcagcaaatcaagatagtcaatcgagggacctatatattgaagctgtttttgagttagataaagctaataaagacgaagataagaagtgtgaagcacagtattggaatcggctaatcataaaaaacggacaagataagccgcttttacgaattagacttgaatctacttggacgaattcaggaattgctgatggaacagtagatacaaatatttacttcatgacttctctagaagataataatgaagaaaataagatagtagctagaagatcagagttaagcagtatacagttcatttatgtacctgcagttagaaatcctgaacgacaattaagtaatacctcagatggaatgatttctcaattgataaaaagagttaattgggatgatgaaattaaacaaaagatagtaagcatttcatcacaattaaatgatacattttgggacgaaaaaggaagtaaattaatacaagatactttaaatcaagaatggaaaagtctagaacctaattctagattttctaatgtaaaagctagtgtatctagcatagatatcaataagattatgagtcgtatacggtttgaatttaattcaaatgtaactaataatgtattttctgtggatgaaatgagtgacggaataaaatcattgttttatatttctaatattgcaagtgttttagcaatagaaaatacggtacaagaggatgatataaaaattgaatatcctgttgtaacaatatttgcattagaagagccagaaaatcatatttctcctcatttacttggaaaagtaatggataaagttaaaagcataactaaattagataatacacaaactataatcacctctcattctccagcaataataaaaagagtattgccagagaatgtacgctattttcatttgacaaaagatgccgtgacagaagtgaagaaaataaaattgcctgatgacaaaggagaaaaatataaatttattaaaagagcggttcaaacttacccagaattgtatttttcaaaattagtaatattaggtgaaggcgagagtgaagaaatagttttatcgaaaataattagttcgtatactggtttagatgaagcaaacatatcaattgtacctttagctggacgaatggttaattatttgtgggatttattagaaagcttaaatatagcacatataactttgttagatcttgattatgggagatatttaggcggaaagaaaagaattaaagatattattgatgagttgaagcgatttaatcctaatgatgacgaattagaaaaaatagaaaacaaatgcgccgatttagcagaaaataaaaataatttgttggatttgacgaaacaactagaaaagtatgatgttttcttttcctttcctttagatttggattttatgatgttagcagcttttctggataaatataaaggaatagcatcaggaagtccaaagaccaaagcggatgaacgcaaaaaaattttggatagaactttaaaaggaaaaagagaggaagaagttgattatgataaaaatgatatagaattaatgagatggtataatatgcttttcttaggaataggaaaaccattagtacattttactgctttggaagatatatctgaagaagagctatgcaataatttacctgaacaattaaaaagattacttgagtctgtaaagaataaattggataagaaaaatgatgaataa

SEQ ID NO: 72915 - DNA, 1863 bp, Lactobacillus crispatus FB049-03
atgatgaataaggatcaatggaaacctagtaatgggatagttttagaatcaaatgcaaaacaggctatttttacaaatgataatattttggttcaagcaggcccaggagcaggtaaaacagaattattagcacagaaagcatcatatttatttcaaacaggattatgtcctgctccttttaatattttagcaataagctttaagcgtgatgctgctgagaatattaaagatagagtttcaaaaagagttggtaaagaagagggaagtagatttatttcaaaaacttttgatgcttttgctaaattaatagtggacagattttatttagtattgccgaaagatttacgacctagacctcagtatgaaatctcctctaattcaactcaaacaaaaatatacgaacatgccttcggctatgttcctgatagaaacgctgtaaatgatcttttgaaagtagatttgaatgatataaaccctcagagtaataattataaattttggaagtatatgttaatgggagaagaaaaaacgtatttgacttttgaaatgatttctagactagcattatatattatccagcataataaatatgtaagacatattattcgatcagcttttccttttgtgtttctggatgaatttcaggatactacagttttgcaatatgatattttccgtgaatgttttttaaatagtgaaagtaaaattacggctgtaggggataataagcagcaaataatgttatgggctggtgcggataaagaaatttttggaaagtatacgcgtgaatttagagcaacaaaggtatttttaaaagaaaatcatcgatcagctttaaatatagtgaaattacaaaaacttatgtatgaaaaaatagataaggatataaaccctgacataataattaataaaaataaggatgaagggaaagtttttctaatagaaactaacgaaccctcaaaagaagctgaaattgttggggaaaatattataaaagaaatacgtatgggtgttaagccttcagaaattgctatattagtaaaacaacgccctgaagattacataagaaatataaaagagtatttaaaaactaaaaatgtaactgttagggttgaatcaaagtatactgaaactttctctgaacctatagttaagttgattttgaaaatgattttagcgtctattaacgtgataaatggacaggagtggcaagaactggtagatgagacttctgaaatatttctcattaatttagctgatgctgaaatagagcaaaaatatatcaaaaaattaaatgtattccttgataagctatttaaaaatctattggttcaagtccatgagaatagatcaaaaagtaattattactgtaaaatcgtagaatctataatagacttttttacgattaataggcttcaagtttactatccagaatacttagaaatagatcaattaaatagaacgaaaactcaatttatagagcagcttaaagaatgcggatcaataaatgagttaaatactgacatcaaagaaatatggaaagaaataattgacaattatttaggaaagaattcaatagcaactttaactatacataagagtaagggactagaatataattctgtttactttattggattagaagatagtgctttttggagtttctcaaaccaatctgagtctgatcgtaaagcattttttgtggcaatttcacgtgctaaagaaaagctgtactttactttttgtcgaggaagacaaacggttagaaatatttatcaaactaaaaaaaacattaaggaattttatgagttgtttgacaaatcaggtattgtaaaggaaataaatgataataacaattcttga

SEQ ID NO: 72916 - DNA, 2337 bp, Acidovorax sp. KKS102
atgcatttgaagaagttggccgtccggaatttcaggcggctgcgaaacgttgtaattgatcttgcttccgacatctctatttttgtcggtgccaacaacagcggcaagacatcagtcgggcacgcactccagttattcactggcagtggccgcttcaacattcacgactttagtgccgaactttgggccgacatcgttgcgtttggtgagggcgatggcgaggcgagccttcccacgatggaaatcgacgtttggttcgaaatcggtccggacgatgttcaccgcgtcatcgatcttcttcccagccttgcttgggaaggcaagctggtggggatgcgtgttgcctacgcgcccaccaatcctgcggcgacgcatgcacgctatgtcgaagtgcgccagcgcgtgctcgatgcggtcgctaagggtgaagacggagcacccgccttcgatccctcgccacgtaacctgcgggagttccttcgcgacaggctacatgacgaatatgagctgcgctatttcgtactcgatcccgcgcggttcgatgcgaagatggtcgcagaggctggctatgacccagccactctcaccggacgcgaccggagcggccgtgagatcttgaacggccttctccacattgacttcttgaacgcacagcgccatctctcggacggcccaggtggctctcgcgccgaggatctctcccgtgtactcagtcgcttctacgggcgcaacctcgaacagaaaggcgaagatatcgaagcgttgcgcgccctcgcagcatccgaagtctcgcttaatgagcatctcgaacgagtgttcgaaccgacgctcaagagcttgtcgaagctcggctatccgggcctctcaaacccgcgcatgatgatccgctcggccctcgaccctgcccagatcatgagcggtcgagatggcgcgatcgttcactatgcgttgggagccgatgacgggaagcccgacccgcctaccttgcccgatcggtataacggtcttggcttcaaaaacctcatcttcatggtcgttgagctgctcgacctccacgctcaatggctggcgatcgaggaaaaccgtccgccggtccacctgatcttcatcgaggagcccgaagcgcacctccatgcccagcttcaacaggccttcatacgcaaggtgatggacatcctagcgctcaagggcgaggaccgcacgcactatacgagccaggtcgtcgtcacgacccattcgactcatatcctttacgaacgaggcttccggccgatccgctattttcgtcgaagccgtgcacagaatgtgtcgacctccgatgtgctcaacctctcggttttctacgacagcaccgatccggacatccgaagcttcctcgagcgctatttgaaactcgcgcactgcgatctgttcttcgccgatggcgccgtgctggtcgaaggcaatgtcgaacggctgctattgccgcagatgatcgccaatgccgcgccgcggctgcaatcgacctatctcaccgtcctagagatcggcggagcgttcggctaccgattcaaaacgctgatcgagtttctcggactgacaacgctcatcatcaccgatctcgacagcgtgttcggtccactggggcaggatggcgagggtgcggcacccgctggtcaaccggaagccgcggaaccagccgccgagaacgcgcaggctgccggcgctgacgctgaggacattgacgatgacgaggaggatttgcctgtggctgcggagaagcccgggaaggcgtgcatagccggtcatccgggcgcggcgacgtccaatcagactttgctccaatggctaccgaaatgcgacacggtcgccgccctgtgggaggcgacggctgagcagaagatccaggcgaggacggacgacaatgacgctttggtacgcgttgcctatcagtgccggaccgatgtcacttggggcggagaaaccctggcgctagccgggcgcacgctggaggaagcattcgcactcgaaaatcttgaatggtgtcaggacaagaaccgtaagccgcttcagctccgcatcgccaaggccgacgagaagaacctgaccacgcttgcggaacgcatccacaagcgcgtgcaggctaagagcttcagcaagaccgacttcgcgctcgccttgttagccgaagatccgagcagttggtctgtcccaacctatatcgccgagggcctgagctggcttgagaccgagattgcgccgccggaaccggacgaggaccagccgcatgagggccagccgcatgaggacgcgccccagggggcaccagtcgccgccggcgacgaggtagcggcatga

SEQ ID NO: 72917 - DNA, 1791 bp, Acidovorax sp. KKS102
atggtcgccggtgcggggtcggggaaaacgacctcgctgatcaaggctatggcgcacctagccgagacccgcggtcctgccctgcgccgcgccgggcaacaaatcgcctgcatcacatataccgaagtcgccgtcggtgagatttcggccgatgtcggggcctcgccgctattccacatctcgaccatccacagtttcctgtggtcagtcatccggccgttccattcggatatcgcggcttgggtagccatccgcatcgacgagaagatcgcggagcgacgcgcacactacgacaagcctcggactcaggcgaaaacgaaggcccgcctcgaacaggagatcgcagatctcgaagccgatctggctgcgatcagtgaagtagagaagttcgtctacggcaccggcagcagctacgctgaaggcatccttggccatgacgatatcctcaagctcaccccagcctgcgtcgcagcgcatccgctgctgagacaactcgtcgctaagcgctttccctacatcttcgtcgatgagagccaagacaccaatccggaggtcgtcgaggcgttacggcacattgcgggcgaacatcctggcctgtgtgtcgggttcttcggagacccgatgcagaagatctatatgagcggagcaggcactgtcccgctgaacgacggctgggcggagatcacaaagcccgagaacttccggtgcccgacatcggtgctcggggtcatcaatgcaatccgcgcccctggcgacggtcttgagcaggtgcgtggtcggacgataaccgttgatggcatcgagcagccggttgccggtacctccaatctgttcatcctgccggcggacgcggagcggagtgcgcgcctcgcggccattaggcagtggctggccgccgaaaccggcgacggtctgtggctaagcgacgtgcgggaaggcgatgtccgcctgcttgtactggtgcaccgcatggcggccaaccggctcgggttccctaatctgtatgctgcgctcaatgaccgagcccccatgagtctgagtgaagggctgagcgatggcacagcctggccgctccgtccacttgtccagcacatacttccgctcgttgtcgcggcgcaagcgggtgatcggttcacagtgatatcgaccttgcgcagcgaatgcccgaggcttgaaccagcgcggcttcgagggcaagcgacggcccccgttcttacagcgctacagcaagcgctcgacgggcttgtcggtctgttggcagcaggatcgcaggcgactatccgggacgtcttgacgcatgtgcgagataacgagttgctgcgcctcgatgatcgcttcgccatgcatctggttgcagagcctgtggatgacggcagcagcggcttcgagaacgttcaagcctatctggcatgcggtgtcgacgaactctgggcctaccggcgctactttacagaggagtcaccgttcgcgacgcatcatggggtgaagggtgcccaatttgagcgcgtattggtcgtcatcgacgatgaggaagcgggcttccggcagtattcttacgggaagtatctcgggtacgtccccctctcggacaaggacgaagccaacctggcggcaggtgaagagtccgtactcgatcgaacccgccgcctcttctatgtgtgctgctcgcgtgcaacgaaggacttggcagtcgtggcctttgtgcccgatgtcgcagcggctcgcaccgcgatcgtggcgcagaatctattccccgaggccgtaatccgaggtgcggagcatctgggctga

SEQ ID NO: 72918 - DNA, 2202 bp, Pseudomonas syringae pv. avellanae str. ISPaVe013
atgcaaagatctggcaatctgctactgtcgaactttgctactcgcttgccaaggattgcacgtatgcacctctctaaggtttccctcgtcaattaccggaatttcgagttcgcgaaattcgtatttaaaccgggcgttaacacgattatcggggaaaacggttctggaaagagcaatctgttcagagctattagactgctccttgactccaatatttacagggcagcgcacgaactgtctgagggcgacttcttcagaaaaaagacctcttggaagggacactggatagttatcagcctcgagtttgatgacattagcaccgacgaatccattcaatcgttgtttgtccatcacggggcaattgtctccggcagcgcggtcaacaaggccacgtacaacctgatttttcgcccgaattcgcacatcagaaccaagctggcagctctctcagcgggcgacaaagctgggctcgccacgttacaagagtcaatgaccgttgacgactatgaagtgtggtttacaggacgaagcgacgttgacttcaccgcccctgcgcgttacagggagattgtcggtgacttcgacaacgtttggtttcccgctctcgattccaagctgatcggtaccaagattcctcaccagctttcggtcgccaaggaggtgtcgttcactttcgtcaaggcgttgagggatgtagtgtccgacttcaacggtaaccgtcaaaacccgcttctcaacctgctgacacgcaaaagccaggaaatcgataaatccaaatatgagacgatcaccaataccgtaaaatcactgaacttagatattgaggccctccaagacgtacaagatgtgaggggcgatatcaggacgacaataagcgaaaccgccggtgacgcttacgcgcctgctagccttcatatcagatcggatttaccaagcgaagcagagaaactacttcagtcattgaagctttttgtcggcgaagcagatgagaattacgccggggacatttcagagctgagcctaggcggcgccaacctgatctatctgaccctaaaattgctggagttcaaatatcagaagcagcgtgaaaccgccgccaattttctactggttgaagagccggaagcccatattcatacacacattcagaaaaccctttttgacaacataaactacagcaacacccaaattatctactcgactcactccacccaaatatccgaagtcagtaatatcgaaagtgtgaatgtcttggctcgcaagggcgtccgttgcgaatcctaccagccttcagtttcacttacgcgcccagaaattgtccatcttcaacgttatcttgacgcaacccgtagcagcctcctttttgcccgcggggtgatattgattgaaggcgatgccgaggagtttatgattcccgctttagtgaagaaggtcatcggcgtgagcctcgacgagctgggcataagcttgattaacatccgcagcacgggctttgaaaatattgcctgcgtgtttcacccctctcggatccgtcgcaagtgcagcatcgttactgatctggacatggctataactgggactgacatccttgagaccgacagtgacaccgttcgggcatataaatcgaaagtagcgggatcagcagaatcaggtcgcacgagaaggacacgtctagaaaatttctgccgggacaacccgttcgtcaacacgtactacgcacaacacacctttgaagtcgatttactgatggctgacaacacccacgagattaaaagggttgtcgacagtatttataccgacgtgcctacgcgtcgcactgcaaaagccgaactagaggatgccgacattggggtggcgggcaaaagaatcctgacgatggccaattaccttggcaagggttggttcgccatattgttagcggacaatatcagccgggcaacgaatattcctgagtacattctcgagtctgtcctgggggcgtgtgaagaactgccgtgcaagacaaaactaaagattctcaggcatcgaatcgttaccttaaccacagaagattactacgaggagttttataacgatgctcttctagctcaggatctactagtcaactatgaaaacggtaacctgtcgttctccactttgaccgactcacttggcgatctgctgtgtgaggattcagtcttggcaactttcttgggcatttaa

SEQ ID NO: 72919 - DNA, 1824 bp, Pseudomonas syringae pv. avellanae str. ISPaVe013
gtgaggattcagtcttggcaactttcttgggcatttaacatggtggatctttcaactgcgggccttgatgacaaacagcttgcggccatcaaccaccccggcagtgtgtttttaaccgcatgcccaggtagcggaaagaccaaaacgcttacctataaggttgccgcggaactatggaaaattgatgaccatcgcaaattcgtcgtggccatcacctatacccaccgggctgcagatgagatcttggagcgcgtggagcggctgggcctaccgactgcgcaactctggattgggacaatacactcgttttgcctggaatggattatacggccttatgcgatctatgagccccggttggatagtggattcacaatcatcaatcagcccgatacagaagccttgttggaggagttgtgtaagtctacaagctatccaaaaatcaaaccgtatgactgtggataccacttcattgacggaaaagtaacgcttttatgctctgatagcaaaaagcacgctaacatacgcgacgttctaaagcgttactttgcaactttgaaaaaagaaaggaaaattgacttcgagctaattttattttttgcgcataagttaatttcaagcttccctgtaatcgccaagcatctgagtaacttattcagtattatattgctcgatgaatatcaagacactaaagaaatacagtatcttattctgttctgcattttctcctcccgccctgaccaaacacgagcgtttattgtgggcgatcaagatcaagccatttttaatagtctcggcggatacgccattgctttcaacgagtttaaaaccaaatcgcacctctcaattgagagcctctcgctttcctacaattaccgttcatcgacaagaatcgttgaatattttggcaattatagattgcatcccggcccaataacgacctattccgagcacaaggattatcaaagcttaatctgctatgaccgcacgacatcagtaaaccatctggacgacgaaattgagcggttgattcgtcatagtctgtacgtgcaggggattcgccccgaggaaatctgtattatcggtccgcaatggccttcattggcagccctcacacgacggctgatgagcaggcttccggagtgtagttttgatggtccaggcatgattccgttcggcagagagcttgacaacttttggtacaaagtgagccgtttatgtttatcagacccggcaccggacatgtatttaagacgggtccgttgggccacagaagtgataaatgccctcgatgacagtggaatcaagtgcaatcacacttcgaaaagcctgctgaaagagctgaacgctattcagttgacagagcagaatgggatgcaatacctcgagctgtacttcagcaaatttcttcacctgatgcaaataccttcaattgatacccatccaagtctgcacaatcattatctgtctttttttgaggcagcccataaaaagatagcgcgcgccaaaaatgacggcttacagttgattgagggcattgataacttcaaacgcgcttttcgacctagatcgggcatcacaatttcaacaatccatggcatcaaaggcgctgaatttgacaacgtgatcgccttttccctgcttgatggcatggttccgcattgggcagatcccaagccgctcgacagcgcaaaaaagctgctttatgtaatatgctctagggctcggaagaatctatttttaatatctgagacagctcgaggaaaagcagccaccagcgaactggcaaggactaattacttatatgataccgtgcctgaacgttga

SEQ ID NO: 72920 - DNA, 2073 bp, Pseudomonas syringae pv. avellanae str. ISPaVe013
atgcagatcgagcgcgttgaaattcggaatttcaggttgcttcaagacgtcagtcttggacttgaagttggaaccactttgattgtgggacgtaacaactgtggcaagacgtctattgccgaggtatttcgtcggttgctctcggacagggctccctctttcaaattagaagacttttccctcggctgccacgagctgttttggacagcatttgatgcgttacataatggtgtcccccgtgccgacgtcgcagaaatgcttccagctgtccaagttacgctggacatttcttacgacatcaaggcgccggatctgggttcgctcagcgagtgcatcgtggatcttaatccaaattgttcgtgcgcgcgcatcgtactcacgtacgggccgaagcctacagctttggattcattgttcgaggcaattccgctacctggagatgaacaatttgacaggtctgcgttttttaatctcatcaaggtacgcctagcctcgtcatacgaggctcgacttgaagctgtcgaccctaacgaccctattaaccgaaagagtcttgaactcagatatctcaacgccctgatccgcggaggattcatcaatgcgcaacgcggactagacgatgacacccatcgggaacgcgatgtccttggcaaagtggttgaggtgcttttccagtcggccttgacggatccgaccgatcctcaaaagcgcacaaccgctgaacaacttcacggtgccgttgaaaaaattcagaaggatcttcatgacggcttcaacgccggtctgacatcactactcccgacattcgagctgtttggatacccggggctcgatgatcctggccttacaaccgtcacgaccttcgatgtcgagcggctgcttaaagaccatacgcaggttaggtatcggggcgtaaatggactgactttgccggagagctacaacggtttaggcgtgcgcaatttggtatatatccttcttcagttgctaaaattttttagggagtttcaggcaacgccagcagcggcaagtgtccacctcattttcatcgaagagcctgaagcacatttgcatccccagatgcaggaagttttcatccgtcagctccatctgatcaaaggggaatttgagaggcagttgaacgacagtcggccatggccagtgcagtttgtgatttccactcattctccgcatatggccaacgaggcgcgctttgaaactatgcgttacttcttgtcagcggccgatgaacacggtgtccggcagtccaaaatcaaagacctcagacagggaatgggtggcgtgtctctgccggatagagactttttgcaccagtacctcacgctcacgcgctgtgatctgttttttgcagacaaggcaatcttgattgaaggcacatctgagcgtctgcttttgccgaccatgattgccaaaactgactcagctgcggtcggtgaacccaagcttgctagtcaatacgtgaccgtgatggaagttggtggggcgtatgcgcaccggttccacgaccttctctcgtttctggagctgcgtaccctgattgtgacggatatcgattccgttaagccaaacgaggaaaacaaacgtaaggcttgtcccgtggcagaaggtcagttcaccagcaatggatgcctcaaggactggtttgaacccaacatctctccgacgcaactgcttgcaaaaacatcggtagagaagacgaagggagctaggcgtctggcataccaggtacctgatgtagccgatggaccatcgggcagaagttttgaggacgccttcattctggcgaatctgggcctatttgatttaggccatggtgatgcagcgcttttggcttataggcatgcggctgatcagaaaaaatctgagttcgctctgaaatatgcgattgaggatacgaattgggtggtgcctcgatacatcgcagaaggattgaggtggttagccgttggcgctccagttgtccatgtgcaggtagctgtccaaggaatggccgccgtcgcagaggctgccggtcagataatagccactgaaaaaggcaatggtgatgcttaa

SEQ ID NO: 72921 - DNA, 1758 bp, Pseudomonas syringae pv. avellanae str. ISPaVe013
atgcttaaccatcaagagagcccagcagacattgccggtcgacaagcactagaacgcatgttcgcatgtctccacgaaggccaaagttttcgactcgaagccggagcaggtgcgggcaaaacatactctcttgagaaggctctgagccttctgatcgaaggtaggggaactgccttggtccgtcaggggcagcaaattgcctgcatcacctatactaatgttgcgaaagacgaaatcatctctcgttttcaggcccaccctgcgatccgagcagatacggtgcatggcttctgctggtctgttctcaaggattttcagacgtctcttcggaccttcctcagtggccaagacttttggcgagatcgctttgaacctctgggaggcataggcgggagacgaatccattacgaaatgggcatccctagggtctctgacgaagaagtctcgattcggcacgaagatgtgctcactttgatgattcaagcattgccgtcgcagaaattcagggcggtgatcacctcgagatatcccattttattcatcgacgagtatcaggacacggatgagcagttcttcgaagctttaaggtcatggtttttggatcgtaaagaagggccgttgattggtctatttggggatcactggcaaaaaatctacggttcaggttgtggcttgattgaacatgatgctcttcatgtgatcgacaaaaatgcgaatttccgatctgcctctcgcattgtcgacgtgcttaatcacatgcggcctgaattacttcagatggtaagtgaccctgaattgatcggtgaggcgcgggtgtttcacaccaattgttggcctggcgtcagacgaacaggacagggtggcgggcattggaaaggtgatactagcgccgaagctgcacgggcgtatttttcacaccttaaagcgcggctcatagctgaaggatggcacttctcgcccaagaaaaccaagattttgatactcaaccatagcggcatcgccagggagcagggctacgagtctattccaccgatctatgggcggttcaatgagtcgtggttaaaaaaggaagatccacacataaagtaccttactgatcattttgaacccgcttgcgcggcatacgctcagcgtcgttatggcgaaatgttcaaacacttagcgagtgaccgtccaacaatccgccagcatggagataaagtggcgtgggtcgaagcgatggacacactggacgagctaaggctgacaggaactattggcgacgtaatagattatctccgtaggataccccaaatacaattgcccgatgccttggtgcggaacgagcaaaggttggaggctgctgggggagaggtgagtgacgaagaaccacggcgggttacgcagcttcgaaaattgcggggggtttcttatcgtgaattgatagcacttgatgagttcatcgatgggcacacgcctttcgcgacaaagcatggggttaagggagctgagtttgagaacgtcgtcgttgtcctagggcgcggctggaacgagtataacttcgctgaaatgctcgaatggtgtgaggctgagccgcctgcgaacaagcgtgcgcgatttgaaaacaatcgcaaccttttctacgtggcgtgctcacgtccaaagatacgtttggcactattgtttacccaactgctcagtccaaatgcactgcggcagattacggcttggttcggcgacgaatttgtcattgagttgcccccagagccaggtaactga

SEQ ID NO: 72922 - DNA, 1788 bp, Pseudomonas avellanae BPIC 631
ttgccctcgcttttcgagtacttgagggataagcacaataagtatttcaccatctcgcgtcgtagtttgtactttgatatgcaaacaaaaaaagaggatgatgagcatttcgtagacttagacctcgaaaatattaatttatctaaaatcataaacttcaaatggattagtgctaggcgtaatgtgtctaacaaggatgcggacaactctctatcgcaactatcagctaagatttataaaaagctcgaagctagcaaccctaatgagtcggtggtggaagagttcaaagatacgttgactaatactgatgccaagctgaatatcgtttaccagaaaatatttgaaggggttataaatgatgtgaaaaaatttggagggttaagtcaaaatgattctgttataaaaattgtgtcatcgctgcagcatcgtgatttgttggaagagaataccacggtcatgtatggccttggtaacaacgagcatgacctaccagaaaactataatggattgggatatctaaacctaatcagtatgatatttgaaattaaacttaagcttcatgactttcataaagatatcaacgaatctccatctgatataaatttgctcttcatcgaggagccggaagcgcatacacatccgcagcttcagaggatcttcattaaaaatattaagtctttgttaaagcctggtataaaaagagtcgatggtgtaaagcgagatctccagacgatactcagtacacactcttcatatatagtatctgaaagcgattttgaagatatcaagtatttcaaaaaaacggacaaaggcgtcacatccaaaaatttgaaagatctaaaggactactacgaagactcgcagcactacacatttcttaaacaatacttgaccattcaccgttccgagttgttttttgcagataaagcggtttttatagaaggtgacacggagcgtgttttgcttcctgcgatgatgtcgaaagttgatcaggaagatcttattaaggaattagaaacaggtgttgtaaataacattccactgctctctcaaaatatttccatgattgaggttggagcttattcacatatttttgaaaagttcgttaattttataggtgtcaggtcacttattattaccgatatcgatgcctcggctatgatgcctgttatagataaagcaaccggccagccaaagctcaacaaaaaagacgaagttcaattaaggcttcagaagtgtaaagttgaacatggtactcacactacaaacgcctcgctacggtttttttataagaaagaagatttagctttttacgaaaatctaaattcaagtcagaaaaccttagagaaaatggacgatgcccagtggtccccttctatattagggaagctactctgtgcctaccaagtacccgaaaagaatatggaaggcgaggtctaccatgccacgagctttgaagacgcgttttttcatataaatagagtttttattaagagcttagccttcgacgaaggtgattttttcaccggagataaaaaacttccgtcgttagttcaaatacacctaaaaagttttgcgagtggagctacagatgcattcgattgcgcggagaatgcgattacaagtaaaccgtcgtttgctatggagatattactaaacagcacaattaaaacggtatcagtattgaatgctaacacgacgaaattggagaatgtctcgatcgatttttctaattggaatacaccattgtacattaaggaggcattgcaatggctcaaacaaggctag

SEQ ID NO: 72923 - DNA, 1902 bp, Pseudomonas avellanae BPIC 631
atggctcaaacaaggctagcactcgagcccgaggttcaaagcatatttgatcatgtcgatcaggggaaaaacttcttgctgagtggaggggcaggtagtgggaagacttattctctcgttcaatttatacggcaggtacttgctgaggatcccaagaaaacaatcgcatgcatcacctatacaaatgctgctgtagcagaaattcgaggacgtattagtgctcccaatctgcatgtgggtacaatccatgagttcctgtgggacataattcgtccatacaaggctgagctgattgatgcattgattttttcacttaaaagtgagtctcccactagtatcaaaaatccagatgataagtttgatccggaagttcttagaggtgcagaggtacagtacaaggagtatacaagggtcagagaggctatcgtttctcatgacgaaatcttgaagcttgctcatggtatgttcagcgcttatcctaagttatgcgacatcgccaaagatcgctataagtttatactggtggatgaataccaggatacgtctgaattggtggtagatatacttttagtgcactttcagaaaagtagcaaaacaagcatcatagggttcttcggtgatgcgatgcagtctatatatgacgagggcgtgggagatctcaataagtatcgcaagctagggttggttgaagaggttaaaaaactacagaatagaagaaatcctaagttaatctatgagcttgcgaatagactgcgaaccgatggtataactcaagaggcatcaactgacgaaaatgcaccaaacatgtctgaaggaaaggttatatgtggaaacatgaagcttgtttttaccgccactgatctagataagctggacgaggttaaagactcgttagggtgggattttaaagatgttaaagaaaataaagagctcaatcttacccataatctaatcgcacctaaggctggatttgctgaactgatgctgatatacgacggtgataaaataattgcttatcgcaatcggataaaagatttcattaaagatggaaacatagaggaagacttctcagggtttacctttggggaggtgattgactatctagtagagagattcccaggtaacgtaaaagatgtcactcccacaaaagggatgaagccttttatcgatagccaccaagagctatatcaaatagctctggcgacaccttacgttacattcaggcgaatgtatgttgccaaagaatcgctcatcgacgacaaaaaagatgacccttccgctaccagcaaagcgggaagcaaacgagatgcgctgataaagcacctttttaagattcaaaatattatcaatctgtatgagactggacgttataatgagtttttaaagagaactgagtttaaaataaggtctgtcgaagataaaagactgctaaaaaagatcattgacgagattagtgcgatgtcagatcggtctattggggaggtaatagaccgtgcagatgaacttggggtctgtaagaaggatgataatctttcaatatttttctctagaagtagatatttgtatgagcgagttataagtgtaaagtttaacgagttccaaaatctttttagatatttggaagggtatacgcctttttctactcagcacaaaataaaaggagctcagttcgacaacgttttagttattttggataacggaaactggaataattataattttaaatatatattcgaaggtgctgggaacgagtcggttatcgaaagaacacggaagctattttatgtctgctgcacccgatctaaacgtagcttagtggtctattaccgcaatccttctgaaaaagcgcttgcaaccgccagaaagtggtttggagacgagtgtgtacaatgtattgattaa

SEQ ID NO: 72924 - DNA, 1968 bp, Sinorhizobium meliloti Rm41
gtgaaactggaacgactgacgataacaagtttccggtgctttgggccggatggggagagcatcaattttgagcaaggcgttaccgcgtttgtaggaaacaatggtgcgggaaagaccgcaatttttgcggccttaaacaaaatgtttggcacgaccgtagctcagcgacaggtccgcaaacgggactttcatgtcggagcgcatattcgggaaatagcgtccggcgcgaccctctccattgactgtgtgtttggattcccggacgtcgattgggacgacgacgatgcaatcccggaagtgttcaataatatgtcaatcggtggcgagggtgaaccactgaaggtgcgcatccgatttgaggcaacctggacggatgacggaactccggagggttttgtcgatgagcagatgcgttggatccacacgctggaagacgattttgattgggccggaagtccgagagtgcaggcggtcgagaggaacttcatccagcttgtctacgttcccgcaacgcgaaacgcgttcgatcaggttacaagtttgctaaaggggcgtctttggaaagcggcccaatggtcacccgaactcgctgaggcggtttcgcgagggtccgaacgaatccagcagcggttcgatcgtgaactccctgcaagatttattgccgaacgtttgacacggcgctggcaccaagttgatcggggcgacacaaactccagtcctgcattgaggctacttgaccaccaaatgagtgatctcgtgcgccgagcagaatttgtatttgagggtgaggatcaatcttacacgttagggctcgaagaactaagtgatgggcagcgctcattgttccatattgcgctcaccgcagcgacgcttgagatcgaacgagacgccctcgcggcaggtggtggcgctccctttgagcacgaacggcttcgcagaactcatctgacacttttggttgttgaagagcccgagaatagcctgtcgcccttctttctttctcgcatcatgctacaggccagagaaattggcggagcgagcaacgcgcaagtcgccatcgcaagtcatagccccagtattctggccaggatagaggcacatgaggtccgatattgccgcctcgatgatggcacccgtcaatcgtcggtgcgtgaaatagttcttccacctgaagggaccgaggccgatgcgtatgttcgcttggccgttaaagcttacccagaactctattttgcaagattcgttattttggctgagggtgattccgaggcgcttgttttacccagactcgccgaagcaatgggatttccaatcgatccgtctttcgtgcctgtcgttccattgggcggacgtttcgttcgacacttctggcggctgttaaacggtttgaaaattccacatgcgacgctgctcgatcttgacctcggacgcaagcatggtggtgcgaatgctatccgatcgatcgttggcgaactgtccagggtcggcaggaacatggcgcgaaacgagtacgtccgaagtggcgaaatcgaccctcgcgatatggatggcctcagtgatgcagagttgctcgaacaagatcaggagcacatttggctcagggcactgcggggggagaacgtatacttctcaagcccgatagatctggactttgccatgcttcagttgttcgcgcaagactatcagatcgtccgttctggcggacgaggtccgagacgaggccggcagcacctggaaaggaagcgggcgataacgctcaagacggatgggaatccgcagctctatgaggatttcggcgatgactttgacgcctcttttatctggtatccctacttgtttctctcaagcagcaaaccagaatcccatattatggcgttgtcaacggtcgacgccgcgcggctacgtcgcgatgcgccaagtgaactccgaagccttctaaacaaggtagccaggaccatactgccatga

SEQ ID NO: 72925 - DNA, 1869 bp, Sinorhizobium meliloti Rm41
atgacgcttgtgcgaccggacgactggtggccgcaaggtattgatgaacttgaggacagagcatgggaggccgtgcgcgagaccgaccgaaatgttgccgtcactgccggtgctggcgcgggcaaaacggagtttctcgcgcagaaagcggcgtatcttctgcagacgggcctttgcccagcgccgaaacgcattcttgccattagctttaagcgggatgctgcggagaccttatccaaacgcgtcgagcggcgctgctcagaggcacaggcgcgccggttcaactcgcttacattcgattcattcacgaaaggactggtggatcaatttcgtatggcgatcccggctgaccaccgtccgcccgcgaactacgagatcacctttccgacggcggcgatcatcaatgactttcttcgtcgagcgaatgtccggcggataaatgcaaaacagatgacaagctttatcgaacgcgctcgtcttccgattgcaacactaaacactcgtgaatatgtaaagctcgcgctcgagagatactgggatgagcaatattccggtcctactacctttttgacttttgcaatgcttaaccggctcgctgattatctcgtcaggtccaatgcgcagatcgcaagtgccttgcgcaagacgtatccattcgtttttctggacgagttccaggatgccacgcccgcgcagttcggcattctaatgaatgcgtttgacccgaacgccacgatttttaccgcagttggcgatggaaagcagcgtatcatggggttcgcaggggcgctgccggatgcgttcgctacatttgcccagagctgcaatccgcgcgaaatacagctactctccaattggcgctcgcatgaggatcttgtgaccgttcagcatcgtgttgcgcggcagatcaacccaaatgtcgaaagagtggcggcgaggcgcgcccgcgtggtggacggcaacgtcagcgcgatctgggtttttgacaacagggcagtcgagatcacaacgctcgctgcgtggctcgccaaggaaatcatcgaccgtgaactcccagctgagcggtttgcagtcttggtgaggatgctggcggacaacgttgagaacgaattgcgacccgcccttgctgaacacgggcttatattgcgcaacctcgctcgaaatctcggcggagttcccattcaggatacgcttgtggagccgcttacccagctacttcttccgcttattaaacttggcgccgttcggagagatcgggatgcttggtcgaaaacgttgaagaacttgaggcggctgagcggcgctatcgatgacgatgaggccgcgctgcaacgtctcaacgcgcgggctgaaactctcatcaagagtacacggcgattcatgcgagaaaatccggcgaacgcggaactggctgatgcgatcgttgcccgcctgatcaacgaagtgggggagcaagagatcaagacgctttcggcttcctatcagcgtgaacgtgacttcgaccgtatcaaggagggcctagtggcgttgttccgagagagccttgaaaacgcaaggagttggtctgaggtgatcgaccgcttgcaaggcaaggatcagatcgcgctgatgacggtgcacaagagcaagggcatggaatttcatacaatgatcttcttcgggcttgacgatcgaagctggcgaagccttgaacaggccagccctgaagaactgaacgccttctacgttgcattgacacgcgctcagcagcgagctttttttacgacttgcgccgcgcgcggtcatcgaatcgagtggcttgaagacatgttgggagacgacgttgtgcgggtggatggcgaaaccattctggatgttgaagacttgtga

SEQ ID NO: 72926 - DNA, 1671 bp, Acinetobacter baumannii IS-251; identical to SEQ ID NO: 71826

SEQ ID NO: 72927 - DNA, 1782 bp, Acinetobacter baumannii IS-251; identical to SEQ ID NO: 71827

SEQ ID NO: 72928 - DNA, 2118 bp, Acinetobacter baumannii Naval-72
atgaaattaaaaaagattactatccaaaattttagaagattagaaaatgtaacaatagatattgaagataaagaaactatttttgttggtccaaacaatagtggaaaaacatctgcaactgcaatttttaagtgttttctaggaggcactgatttcaaaatttatgatatttcagctagtagagttgctgatttcgaatcttttttacacagtaatgatccttctttattaccagaaattatacttgacctttggttttcaatagaccccaacacaattgcttttgggcgagtttttaccctactaccccatctttctgactttactgaagttggattaagaatgtcttatacaattgaaaaccccattaaattaagagaggactatgaagcagcctatcctattgaacaaactggtaatcgggcgaaatcattgtttcaatttttagcaattgataaaaaattaaatcattatttttctacaaactattattcattagaaaaagacgaaaatgagaatagtgaaattatagaaactgctacacttttagatcgtaatgatgcaaaaaaattagttagtcagttaataaaagttgaatttgtagatgctcaaagaaatatcaatgatgatgacagcaaccgcagcaatcgtctttcaactgcatttgcatctttttataagaaaaatcttgaacaatcaaattatgctgctgaagcacatgaggttatcaataataataataaacaattaactgctcattatgaaactcaattttcgcctttaatgaccttaattaaaggcttaggaattccatcagttaatgatagagaacttcgaattatctcttcattaagtcccgaatctgctctacgaggtaatacagaacttatatatgttgatccgaaccaaggccatgatttacctgaactttataatggattaggttttaagaatctaatatatatggcgattcaagcaagacatttccactcccaatggttaataacacctgtaaatcggcctttatgtttacttatttttattgaagaaccagaagtacaccttcatgctcaagttcagcaatcatttataactaacatatggaacgtaattaatgaatctattgcatcaccagatcaagcacatttagtgcctcaaatagttgtaaccactcattcatcgcatattattgatgcaattgattttgaaaaagtcaggtacttccaacgatcttatacaacgagacaaacagaccaaacaggcattcaaaatgtttctaatgtgatgagtctaagatcattccaacctcaaattattacaccagaagaaggagtccaaatttctccagaggaatctattgcattccttaaaaaatatctgcggctaacccattgcgatttattcttttcagatgctgcaattttaatagaaggtgcggctgaaaagcttcttttaccatcgattattgagtcttctgcccatagattaaaatccacatatttaacaatacttgaagtcggaggcgcttatgctcatcgatttgaaggactactagagtttttaaagataccttatctcgtcataactgatattgattctataaaaccagatggacgctcagcctgtcgtgccaatatcgaaggtgctagaacatcaaatgcatctttaaaacatttttatggaattgaaacaattgcagatttaatggcaattttacctgacaacaagatacataaagaaagagatagatgtgtagctttccaaacagaaattttagttaatcacaataataatcaaaaaaatatgcttcctcgtactttagaagaagctattgcatatgaaaattttgggttacttcattccggtggattgtcaattggaattgatattccagactgtcttgattcagcatatgatcaaatttataaacggatttgtagcgatagtttcaaaaaaacagattttgctatggatctattagctcgtagctctgtttggatgccaccaaagtatatagttgatggtttattgtggcttgaaactagactttgcgggccaacacaaattttagaaatagaacaaaatacagttacgttggccgaggttgaacaagcatga

SEQ ID NO: 72929 - DNA, 1836 bp, Acinetobacter baumannii Naval-72
atgataactagaattgaaactacagccgataatgaaattaaagcttgtttagccaataatcagaactttgctctaatcgctggtgcaggttcaggaaaaactagttctctagtagatgctttaaaacaaatacgtgaaaatgaaggtaaaaaccttcgtcaaaatggacagtttattgcatgtattacttatacaaaacgagctgtagaagtaatcaagtcacgtttagggtttgatgatctttacactatatcgaccttacatagctttttatggaatcttataaaaacttttcaatctgatatacgtaaggtacttaaagaagtttatttacctatattaatagcaaaaaataagtcaaaagataatggtggtgacagccaaacggctataaaagccagagcaaaagcttataaacttgaattagaattatcaaaaattgatacagttaaaaactttaattattctgataatcagttcagcgactatagtaaaggccaattaagccacgatgatattattgaaatctcaattattcttttaaaacaaaatcagacttttaggaaaatattaggacttagatttccatatatttttatagatgaagcccaagatacttatttaggtattattgaaggtcttaatttggtatgtgccgaagatggtttgccaatagttgggtattttggtgatccatggcaacaaatttatgatgatagtgcaggaaatttctcacctccagccaatggtaaaatcatcaaaaaaacagagaatttccgcagttcaaaaagtgttattcgccttttaaactcttttcgtaaagatgtttctcaatatccagctggagaaaataaagaaatagaaggaagcgtgatttttcgactaatccaaactgaacctcctgaaatgccaaaaaacaaatattctgaggatcaaatttcccgagctttattaaagatggatagtgctcttgaagaatggggttggagcaaacaaaatgatgtgattaaattatttctagtaaggcaaatgattgcaagaaggatgggattttccgaactaaataaattgtttaatggacctttttcttcatctcgatctgaagatgcgtttgaagccggtgagcactttgcattaaaacccataatttcaacaatttaccctttaattactgctaaaaataatcacaattaccgtgacgtaatcgatatccttagaaataacagccctgcattttctattgatgggttaaatgcatcacggagcttaaaagtaatgatcgatcactctaattcattaattttagaattagaaaaccattggaactcttctaatataaaaaaagttctagaattctgtgtctcggcaaaaattattaatatttctgaaaggctaatggaacatttggaacgcccccctagaacagaaatatatgatgaaaaaattcatgagcaagaaaaagaagattggttgatggatcaattatttcaaatgaatacaaatgaaataggagcatatgcaacttttattgctaaaaattcatcttatagtacccaacatggggttaaaggtgaggaataccccaaagttttggtagtctatgacgatattgaagcaagttggaataattacaattttggaaaattattaacaccgactgtctcaggtatccctacatcaggtcaacaagctaggggtgaaaaactagcatatgtagcattttctagggctatagaagacttaagagttatttttttcacacccaatcctgaaatggcgaaaaatgaacttatttcaagaggtttgctgtcagaagaacaaattcagcttgcctag

SEQ ID NO: 72930 - DNA, 1671 bp, Acinetobacter baumannii IS-235; identical to SEQ ID NO: 71826

SEQ ID NO: 72931 - DNA, 1782 bp, Acinetobacter baumannii IS-235; identical to SEQ ID NO: 71827

SEQ ID NO: 72932 - DNA, 1905 bp, Acinetobacter baumannii OIFC110
atgaaattagatacattaagaattagcaactttcaatcatttgggaaagaaccaacagaaatttcattagatgatattagttatttaattgggccgaacggttcgggtaaaacttctactctacaagctatttctagactcttctgctttgatccaagcttaagaagaattcagaagactgattttcatattgatccaaatgaagaaatcccccctccacaaagagagctttggattgaagcaaatttttctttccctgaattattagaagatggagagcactcaactattccagaattttttaatcaaatgcgattagatcaagaagaagaaattcctagagtacgttatagattgatagcatccatgggcattgatggggatatagaagaaaatctttattacattttagatgtagatgaaaacaatgaacctattaataaaactttagtaccccgttctgaccgcaatcaaatacaagctcattatcttccagccagacgagatccttcaaatcatattagttttggaacaaatgctttactaggtagattattacgtgcaataaattggaccagtgaaagagctgatataaactcactgtcagagcaaataaactcctgtattacaggaaactcatcaatttcctccctttgcgctaagttagatgaaagttggaaatatttacatacaggaaatttttttacaaaccctaaaatttcatttggaaactccgaggttgaagctttactaaaacacatgtctatttcattttcacctggacatggtgaaacaaatgttgactattccagattaagtgatgggcaaaaatccatgctttatctttcattagtcttatcttctataacactaaatcgggctgtaatttcaggcgaagaaacagcatttgatatagataagctaaatccacctgcattcagtctaattctaatagaagagcctgaaaatagtttatctcctcattatttaggaagaataagtaatgtgctaaaaaaattattaggtaaagatacacaggctttaattgctactcatgcaccatccatattaagacgtgtcgctccagagaaaattagatatttacgtttaaattcagaatctcgttcaactaatattaagactataacgcttcctgaaaaaacaggtgatgcgcacaaatttgttcgagaagctgttcaggcttttcctgaaatatactttgcacgtctagtcgtactaggtgaaggagatagtgaagaaatcgtattgcctaaactatttgaagcacttgacttacctgttgatgaatctgctatatgtattacgccattaggaggaaggcatgtaaatcacttttggcgcttattatcaacattagaaataccatatgtaacattactagatctagatatagcccgatatcaaggtggttggggaagaattaaatacgctaatgatcaacttaaacagcacaaaccttcatctatacttcctaaagatcacactatcccaaagtggaataacaaagaatatttagtaagagattttcagaattatcttgatgaattagaagagagaaatatttttttctcagctcctctagatttagatttttcgatgcttttagctttcccaaatgcttataaagtaaaaaaagagactccaaatgaagaaactattaaatctgttctaggaaaaagtcattttggttcaaatcaatattctaaggaagaaaaggaattatttgatacttatcactctcattttaaagttggtagtaagccagctgcacatattgacggattatcaaatatcaatgatgaagacctaaaatccaatatgcctcaagcttataaagatttggcaactaaagtaaaagagatgttggagagcattccagaatga

SEQ ID NO: 72933 - DNA, 1644 bp, Acinetobacter baumannii OIFC110
atgattaaaccagatttatgggttccagcagataatcttactttggaacccaatgctttacttgcagctaaagaacaaacttgctcacttgcattgacagctgggccgggagctgggaaaacagaaatgctagcacaaaaggctgattttctattacgtgctggcgtctgcccttaccctaaacgaatattggcaatatcctttaaaaaggatgctagtaaaaatttaaaacaaagggttcaacttagatgcggctcaaatttagctcgccgatttgatagttttactttccacgcttttgctaaaagaataatagataagtacagagttttactaactggcttagatgaactagaacccaattactcaatcggaacacaacgaataggtaagactcaaattgattttgagtctcttgtacctctagcaatacaaattgtaaatagttcaagtattgtacgtaactccatattacaaacttattcagatgtatttttagatgagtttcaagattgtacggataagcaatacgaacttattaaaactatttttcacaattcaaatattaaactaaccgctgtgggtgatactaaacaaaaaattatgggttgggctggagcactagaaggtatatttttaagttttgcagctgattttaatgcacaggcctttaacatgtatcgaaactttcgatctaagccaaaattattacgcttacaaaacgaaattatcaggaatttagattcgaatgctgtaatggccactgagttaactactggagatgaaggctatatatcacatataacatttaataatagtttggaagaagcagagtatttatcagatttaattaaaacatggattatagaagaaaatattcctccctctgaaattgctatattagtagcaaaacagattgaacattatgcatttgacttaatggctgcactaaaaaataaagaaattccctttagaaatgaacaaaggatgcaagatatctcggaagagcctgtggtaagattaattatcgattatttactatgtttatatgggccaagaaatccaaaagcatgggcaaaaataaataatttattattacctttcgatattgatgaccaaaaaactaattctattctgagaaattttaataatttttttaaactgcaaaagaaaaaatttttagcaccagattatcaaccacctattgattcttggcgagatgctattcaagctttgtttaaaaatttaggtatatctactctaattgctctttcaccagaatatgaatctctaacatacttaaacgaggttattgaggagtttaaaaaaagaataaatgattttttaagtcaagaagcagatcttttaaaagcacttaactcttttggacatgatgatacagttaaaattttgactattcataaaagtaaagggctagaatttcattccgtcatactattaggtgttgaaaatgaagctttttggggaaatgatgcgagaagtgttttctttgttggagtttctcgagcaaaagatagactagtacttactgaaagcaaaacacgtccattagactccccaccatatagatggaaagaaaatacgactactcacgaagaattttttaattatagagttgattaa

SEQ ID NO: 72934 - DNA, 1671 bp, Acinetobacter baumannii Naval-83; identical to SEQ ID NO: 71826

SEQ ID NO: 72935 - DNA, 1782 bp, Acinetobacter baumannii Naval-83; identical to SEQ ID NO: 71827

SEQ ID NO: 72936 - DNA, 2211 bp, Vibrio sp. HENC-03
atgcacattaccaaactatccttagtcaactatagaaactttaataatgttaagcttctgtttaataagggaataaacacaataattggtgagaacgggtctggtaagactaacttattccgagcgatgagattgctgcttgatagctcaatgcctcgcttcgcgacgaaattagcagaaggtgatttttgtagagcacttggcgactggcgtggtcattggattatcattagtcttgagtttgatgatattgctggtgatgaagccagtcagtctttattcctccatggtgttggaaatgcggaagatgaagttgtctctagagcaacgtacaatcttatttttaggcctaaggcgtacgttagacaggctttagcacaactcccaataggggagctagccgcattagaaagctacttgggtactataactatcgatgactatgaaaccgtcctaacaggcaaaagtgtcgctaattttaatgatcccagtgtctacaagagcatagttggtgactttgaaagggtagattttcctactgcgttaaataatccagctgttggtatacgcttaccaaatatccttaatatgcccaatgaagtttcgtttaccttcatcaaggcactaagagatgtagtatcggactttaatagtaatagaaccaatcctctgctcactctactaaaaagtaaatcgggtgatattactcagtctgatttccaacctattgcagatctaattggaacactgaacaatgaaattgaagggctacctgacatctgtgcaattcgtgatgatattgtaactacggtaggagatacggtcggcgatacatattctcccaattcaatctctattcgatcaagtttgactgatgagtcagaccaacttttccagtcattaaagctttttgtctctgagtctagtgatggttatgaaggtgctatccatgaaatgagcttaggcggtgcaaacttgctgtatctcacattgaagctactagagttcaagtaccaaaaggctaaccaatcaattgcaaatttcttgttgattgaagaacctgaagcacacatacatactcatattcaaaagtcgcttttcgacaacattaactacgaaaacactcagattatctattcaacccactcttcacatatttcagaagtaagtaatatcaacaacatgaacatcattggtcttgtcaatggtgtttgtgaggtatttcagccgtcatcggggctttgtgatgaacaaattggctttgtacaacgatatctagatgcgatacgaagcaacttactattcgcacgaagtgtcgtgctagtcgagggtgatgctgaagagattcttattcctattctactgaaaaaggtactaggtttaagtttagacgaaattggtatcagtttagttaatattcggagcactggcttcgagaatattgcaatgttatttgacaatgaaagaatcaaaaaacgttgcagcattatcacagatctagatgacaccttctttgatactactatttatcctacagatagtgacgcagataaaaagaagaaagaaaaagccctcggctctaaagaaactggctttgctcgtaaaggaagacttgatgatttctgtcaaaataacccttggatttcgattttttatgcaaaacatacttttgaggttgatttcatacaatcatccaacagcgattacctcgagagaattgtcagagatgtgtacaccaagccggctactgtgaatgctgctacaacagagctatcttctactgatattgctatctcaggctcaagagcattaaaaatggcgaactatcaaggtaaaggttggtttgcccttacgcttagtaaagtgattgactttaaagtagctattcctgagtacattttcgatgctatcaagtttgcgcatggtgacttcaatgcagaactcactttcaaaatactcaaacaccgttacgaatcagttattgaacatgtcaaatatggtctagacataattgagcgtttagatgaagaaggcgacgttagcctaaaacaagagtgggaagcatacttggccccatatgaaagtggcttagcaacatttactcctaaatgggaagcttttaacccattagatggcaatataaatgttctaaaggctcaactgattaacgacctgcctactgaaaacaatgacattttagaaaggatctga

SEQ ID NO: 72937 - DNA, 1791 bp, Vibrio sp. HENC-03
atgtttgtgtgggatgaggaagacctaaacgatgagcaagtagcggcgattagtgagccgaataatgtgtttttggtagcatgtccgggaagtggtaaaactcgaactcttacctacaaaattgctcttgagctttcgaggttagacactatcaacaaatgggtcattgctattacttatacgcatagagctgctgatgagatacgtgagcgcattgaaactcttggggtagatacatcacaactgtggataggtacaattcacgcattttgtttagagtggatattgaagccatacagtctataccatgacaagctgaagcacggatttaaaataatcaactcttatgactctgaagaaataatttcccgaatatgttctaacatacgtaccgaacgtattcattatggagagtgtagtcattactacacaccaaggggcttagagctgacttgcgcaggaaataagacttcactagttaggcaggtattaggtgactatcaccttcatcttgaagaaaatagtcagatcgattttgagcagattctatatttctcttatgagatactgtctaataattcagcgatcgctaagatagtagctaatctattctcgaatgttcttattgatgagtaccaagacaccaaagagatacagtattcaattgttgctagcgttataaaagctagccgaggtggtgtaaaaacgttcattgttggagacccaaatcaagctatttacggctcactcggggggtacgcaataacacaacaggaacttgagcaaataaccgaagtatcatttacatcaatggctttagataagaattatagaagctcaagcaggattattgattactacagcaattataatgtgattcctagcgcaactgttgctgaaggtaagcataaagaccatctgagtattattacttatgatcaggttactcataaggattatttagttgagcaagttagtaggcatattgagcatagtgttgagaatttgggtatcttggaaaaagagatttgtgttatagcaccttggtggatgcacttggctgcgctaacccgtaacttagtaaaccgattaccgcaatatagctttgatggtccgggtctagttccattctcaagagatattgataacttttggtttaagctgactcaaatcattctaacagagccatcaccgaacatgtatgttaagcgtcttcggtgggcatctgatatcttatttgacatggaacttgcacaggtagatgtcaactcgataacctcaaaacagctacttaaaaccatcaactctatttcaatagatgaagatgatggtttgacttatctacgttcattttttgatgaattactacatgctctgggaatagactttgcactatatccaatgttaaaggaacatcatgattcattctttaatagttcacaaaatcgaattgaacggctgaggaacgaaagtgcactatttgctacagatatagaggcatttcgcagagcatttaaacctagaactggtattaaagtgtcaacgatacatggggtaaaaggtggtgaatatgatgtcgtcatctcttttggtctgttacaaggtttagtgccaaatttcaatgattcttccgtagaaagttcaaagaaactgctatacgtgataggttctagagctagaaaaaatctgcaccttatttctgaaaaaggaagaatgtttggctttggtcgacatagaagcgagcgtcagcctacagaagtcttgtgcaacttagcctacacatacgattaa

SEQ ID NO: 72938 - DNA, 2121 bp, Dehalobacter sp. DCA
atgaaattaactaatgcgaaaatacgcaattatcgattgttagaaaattgtgctattcggattgatgaagaaaccacaattttagtaggaaaaaacaattccggtaaaacatcgttttcatatctttttgaaacttttttgaagaataccaaagagtttacatttaatgatttttcgattgcttgtcaagaaaaatttataagtgcatataatgaatatttatctgtaaaggataaagaagacttactggaagattatttcacaaatattgatgacaagctgcctgcaattgaactggagctagatattgaatatggaaaagacgataattggagcaatatcagacctcttttaactacattagataataataatatcttacatattctgtttgcatttaaaattaaagagccaaaaaaattctttgattcattgactaatacaatttcaaagttatctactaaaaagcaaaataaaaaacaatgtattttgggagaaatatcaaaaacgattaatgatttttatggttgtgttataaaaccaatttaccaagatatatatacagatgaggtaaagtatacagacattcaaaaaataataagtagttactttatagcagcacaaaggcaggttgaagacagtaattcaaaaacaaattctaaattagcaccagtttttcagcgtgaatataaaaactgtgaaaagtcaaaagaaaatgagacattacctgaattagaaaaattacgcgatactatggagaaagctaatggtgatatagatacaaaattagcatcattctttagggattttacagcttcattttctacttttggatatcctaatgtggaaggttcagatcttatattaaaatcaaatgtaactctaacaaatttatttagtggaatacaattattttacaaagatcaggaacacttacttccagaaagatataatggattaggatatagcaatttaatctatatcatatccgaaatgctttgttttaggtcgcaaattaaagaacttaattctgatttaaatctaatattcatagaagaacctgaagctcatatgcacccacagctacagaagacctttattacaaagttaagtgagtttatggaacaaaatggaataaatgttcagattgttatatccacgcattctcctcatatagtttcaaatgcaaaatttgaaaatattaggtatttcaatagaaatgagtattctgtaactgtaaaggatttattggaatttgaaatcgatactaaaaagaaagtaactcatgatgaaccttttgatgacggcacaattgagtttctaaagcaatatattacacttgtaaaatgtgatatgtttttcgcagataaaatcattttagttgaaggtttatgtgaacgtcttttaatgccattgtttcttataaaaatagataatctaataaagtcgcagcctgagtaccagaaactgcgtgtactttctgagcaatatattgcaataatagaaattggtggagcttatatgtataagttcaaggagttccttgagtttttggggataaaaactcttattattacagatgtggatagttgtctatctgagcaagaaatggacaaggatggtaatcttgtttttttgaaagatggtaaaacacctaaaatgactcgtgataaaaagaaagaaatcaaatcagattatatatcacagttggtaacctcaaatcagaccttaataaaatggcaacctgggaagaaaaagattaaagagctgattttcaataagtttaatcagaatagtaagcaattagttaatgtgtcgtttcaaagaaatatatacgacacaaaagcaaatatcaaatgcgggcgctcctttgaagaagcatttattattgataattggctgtatatgtttaacatgaaagaccggttagaaagtgtcaaaagtaatattagtgattataaggacgcagatgagatcctaaataattcttataatatatacgaatatattgatacaaataataaaaaatctgattttacatttgacttaatgtatgtctcatcgaagggctggtctgttccgacttatattaaggagggattgatatggctagcaaagtag

SEQ ID NO: 72939 - DNA, 1719 bp, Dehalobacter sp. DCA
atggctagcaaagtagaacatcttatcatgaggtgtattgacaataatgaaagctttattgttgaggctggtgccggaagcggcaaaacttggagcttggtacaagccctgttttatattctacaagttaaaggaaatcaattaaaagtagcaaacagaaaaatagcatgtattacatatacgaatgttgctaaagaagaaattattgatagaattcaagcaaatgagttgatagatgttaaaactattcatgatttcttgtggaatataataaagccttttcaaagagaattaaagcttgaattgatagaaattttaaaaacacaatatactaaaaacacagatatcttaaggacctcaaaaacaacaacaaagaaatatgctgaagctaaagaaaaagctgataaatacaaactgacattagacgaattagataaattcaaaggaaaaatcgaatacaaagattactatgatcgtaaaaaaggaattgtctctcacgacgatattcttaaattggcaactgcactgctaggaaagtataataaaatttataaaataattcaggatacataccctattattttcattgatgaatatcaggataccaatcaagaaattgcagaggtattattaaataacgtcaagaacaactcttcgattttgttcgggttgtttggtgactataatcagcagatttatgtaaaaacaattggcaaagtagatgataccaaattcagtttaaaaaagattcccaaagacgaaaattataggtgctctttggaggtaattagtctactgaacaaattgcgaagtgatatagaacaacggcaatcaggtgaggaaaagcatggaagatgtgtttgctattatgtaaatgacaccgaattagatactgaggaatttatttcaagtaaaatatatcgtgaattaaacataacagaagagatggagattaaacgactttatttagtaaccaaatccattgctaaaagaaatggctatcttggacttcacgatttatatgacgaagaaaacaaggacgtaactaaccgcagggcaaagaataaagatgaattactcaagaataaagataatagagattgtccattcgctaattttctatttgaaatagaagaattgattgagctatatcaaaacaacaagatacagagattattagcaaaaacatcttatgagctaatatgtatggaagacaaaacaaaattggataacctgatgcagaaacttattaaactggcaagtaaaagtagcatacaggagatctttgagtttgtttggaataataatttattgaaaaagccaagtaaaatcaagtatatctacgataataaagaactgcatgatgattttattattgctttgatgaaaatggaatacaagcaatttcaaaatttatattataccgtaaaaaagacatcgcctttctctaccgatcatggtactaagggtgctgaatttgataatgttgtttgttttgttgatgataacgattggaagacaagctataatttcagtaattattttgatggaaccgatgccggcacacctagatttgataagacaaaaaatatgttgtacgtaatttgttcaagggctaggtataatttggctattgtgtttttatcaaaattaagtgataactcacaaaaaaaggtcgagctgctatttggagagagaaattattttcctgaaaaatga

SEQ ID NO: 72940 - DNA, 1896 bp, Dehalobacter sp. CF
atgccaatatccttaacaaatattagagtgaataacttcagatcattggaaaacattgatttaacaatcaataaaaccaatattatcataggacagaataattgtggaaaatccaacctgctcaaagcaataaatattgcttttggtaacgttcgagatatttctgaatctgatatttttatttcatcagaggaaagaatttcaagcactaaaacagcaacaatagatattttattgaagccagtagacttagaaggtacttttcaaaaaacattttctgatttctggataagtgtatttacagattcttggattacacctgacgaaaccaacggagattacgtcggaattagaactgtccttcaatacgatataagaaaagatgactatattattgtcaaaaagcctattcaggaatggaatgattctattgaaacatcagttgttggtgcaaagaaaagctttggaaatgatatggttgattcattgacatctttttatatggatgctcatcgtgatgctgttgaagatatcaaaaacagaaaatcattttttggtaaagctacgtctcaaagtgatttatcagatcagctaacttcggaattagaaggacagctaaactatataaattcagaaattgttcgaaatatacctgcgctgcaacaaacaaatagaagaatgtcttctataggtaaaacaatgggttcatcatcaggtactgtggaaattgaacctctcgctagaaaaatttctgatttgcacaaaggaatggacattatatataaagacggcgtagctgctcagttttccatatcacaacacggaatgggaacacgaagttggatatcttttttaacactaggtgcttatgtagattggcacaacgaaaaacttaagcaagatgatgaagatgctgaaaattatacaatgttgacaatggaagaacctgaggcgcatttacaccctcaagctcaacgtcaactgtactttcaaataagtgaatttgatgggcagaaaattattagcactcactctcctagcgttcttgctcaggcagacctaagggatattatttatattaataagcagcaaggtaaaactagtgtgaagcgttttaatgtaggtcaatttactccggaagaattgaatcgaatagagcgagaagttatcaatacaagaggtgaattgctgttctctaatgctattgttctatgtgaagggataaccgaagaacaagccttacctatatacttcaaagaatacttcggagttgaagcaatttgtagcggtataaatataatcggaattggcggtcagaattacaaaacatttctaaatttaattaaagaccttgatatcccttggtttattttcagcgatggtgaaactgaaaccaaaaagactgttaaaaaagccgtcggcgttgaaaatattgaagaattgaacagcatgtcaaacattgttattttagacaacgaaaatgattatgaaaaatatttaatatctgatggttatagggacattattatttctgcaataaatgagtgcgaaaatgatgaagaatattttgctaactatattcttactaaaaatcatacatctatgggtagagaacgtactaatgatcctgcgtgtggtacttgtcagcaacatatatataaggacgttttaagggatttcgatggtgaaggtggattggaacgtgcattatatgattgttgtaccggaaaaaaagcgaaagcgaaatatgctacatatgtggctgaaaaaatagtgtcacagcaagacgttaccaaacgaattccatcgaaaattaatactcttttaaaagaaattgggcgtcttttagatttaacagaaaaggaggattacagaactcatgaagttatcgaataa

SEQ ID NO: 72941 - DNA, 1848 bp, Dehalobacter sp. CF
atgaagttatcgaataagcaagaacaaattgttaagcatgtggaaggggctattctagtcaaagcaggaccgggaagcggaaaaacaagagtcctcatagaacggattaaacatcttcttctatccaaaaaacgttgtaaaattttagcactgacatttagtaacctcgctgctgatgaaatgaaaaatagacttaaggaagatactttaatcagtgatttagctgaaaatgttaccgtaggcactatccattcgttttgtttagatttagtgcaaagcagaggcaacttaattggcttaggaaaagaactgatgatttttgaaagcaattcagatcagctttcaatattgcgagatgttttctccagcgatcctcaactaatgacaatattaaagtcaaaagaaaagcctaccgcttttctacaaaaatgcttatctctaatttccgaacaaaaaaagaaattcatttcgcctgaaatgtgtgaaatgaacgaaccatttccagtaatctatcgtgaatataatgaacgtttattgagccaaaatgctttagattttgatgacatactgttttttgcatacaaaattcttaccgaaaatccttccgttgtgaacttatatacttcgctatataagtttgtatgtgtagacgaagcacaggatttaaattttgcgcaatatcaagttatcaaagcactctgtggagataagtgcaaaaatataatgcttgtaggagacgaaaatcagtcgatatatgggttcaatgggtcagatagcactttaatgtctgaaaagtttgttaaggacttcaagcccactatttacttgttgaatgaaaactatagatctgcaaaaacgattgtaaattttgcgaataaattaggaaattacgatagcgtctccaattatgtttattcaggagaattaaaggcatattctttttcggatgaaaaagatgaagcccaatttgtattagatagaattaaggaattactagccagcggtcatcccgacatagaaaatggtttaagttatgattctttttcagttattgcacgaaacaaatatgtactctcacctttggaaactattttttcagaacttaatattccatttgtttataaaaaaagctctaatggacttgagaacgaatcagactacatgaaagtatttgaattaggaatcagaatattgttaaatccgaaagatattgttcatttaagagagttgtgcaaaattactgaccgaaaatcatctgaaattgttagtgatgataattcaatagcaatcctaacgcaagctatagaaaatacggtattcactgacttgctcccttgttttcaatcgttaaataaagaggaaatgaatttctctaaggctttgctacaacttaaagaacaacttcctgcaagcatgtcggacgaagagagatatttaattattaacgatattgagcaatgggataagcattggaaaaagtactctggtcaagtacagcgtgaaaataggacactactctcttttagaaattatatatcccttgggaaaacccaggatacctcttcttccaaaggggtttccttgctgaccgcacatatgtctaagggtttacaatatgatgtggtttttgttatcggattgtctgaaggaacatttccagactatcgtgcagttagcgccggtggttcagaaatggaacaagaaaaaaacaacatgtacgttgccgtgacaagagccaaacgtctatgctatctttcctatcctagaagcaaaaaaatgccttggggcgataataaatggcaaactccgtcaagattcttgaaagatatagatattcttgattcatag

SEQ ID NO: 72942 - DNA, 1048 bp, Acidocella sp. MX-AZ02
gctaaagaaagccgctgatttgatccccctgggggcgggggagccagtgacgatcgaggccctgccgaccaaaatctttgatatactctcaaggacacaaattagcctttcttcaaagtccggcgcgcgcattccgattacccgtcacggcaacggcgcacaaagccttgcagtgatctgcctattcgacgcattcctgcaaagccggttggaatcgtcatacggtgaacatgccgaaccattactggcgctggaagagccggaggctcatctgcacccgtctgccgcgaaagcagtaggtacgatgctgcagacgctatcgggccaaaagatcatcacgacccactcgggcgatctgcttgccggagtaccgctcaccaagattcggcggctatctcgccgaaacggtgaaatccgtgtccatcagatcggcgaaggcgtcttcacaaaggaagagctccgcaagctcgattaccaagtcagattgtcgcggggaagcttactattttcccgctgctggctgcttgtcgaaggcgagacagaaggcactttgctgccggaatgcgctcgaatcctgggctgcgacttggacgccgagggaatttcgtgcatcgagttttctcaggtcggggttgagaaaattattaaattggctgatcaactcggaattgcatggtttgtggtggctgataatgatcaagctggcttgagctatgaaacgtcggcaaagtcccagctcgacggccggcctgcatccgatcatattaaggttctcgatcatggtgacatggaagtatttctctgcattgaagggttcgggtcgatctatgaggccagtgttgcttcgcagaaatcgtcacaggtgaaagcaaccaagggaacgtcgttgtattggaaacaagtcaccgacgcgcagagtaagaatgctaagccacgaaacgcgctggctgtggtcgatgagatggcgaagcagggaaaagccggcgttcccactcttttgtccaacataattggccagactcaaacccttgcgcggagcaacggctga

SEQ ID NO: 72943 - DNA, 1917 bp, Acidocella sp. MX-AZ02
atggcgctcaatctccacacgctcaacgaaaaccagcttgccgcagtccagtggcaggagggtccgcttctggtgcttgctggccctgggtccggaaaaacgcgtgtcctgactttccgtattgcccggttgatcgaatcttctcccggtagacatttcaaaatcctcggcctgacgttcaccaataaggccgccgcagagatgcgggaacggatcgagattctcgtgcccgatgcgagcgaacgcacgcagctcactacctttcattcgtttgcagccgacattctacgccagcacggtcaccacctcggtctaaggccggattttacgcttctttcgcaggatacggatcgccactccctgctagatgaggcgatttctgatgtggacctatcgcaatcgcggttgaacgtcaccggcgaaagactgctgcccctcgtgaatcggttgattgagaatgacatcgcaccggatatggcggcggatgcactgtcgcgtggctcgctggatgagcctgaaacgctggctgcgatatacgcgaaataccgatcgctcatgattgctaacaacacgttggatttcgcaggcttgatcgcagaggcgctcaatctctttcgttcaaggagcggcgttcaacggcagattcaacgtgtttatgcctatatctgcgtcgatgaatttcaggatactaacctgacgcaggcgaagatattgcagctgctggttaatccgacgacaaaaaatttgtttgttgtcgccgacgacgaccagattatttaccagtggaatggcgccagccctgagaggctttgggcactgcgttgcgagttcgacatgcagctgctgcagctgccgcaaaattatcgttgcccaccggcggttgtggaattggccaacaaactaattgcgcataatttcagtcgttcgtccgagaaaatggcacttgtagctcacaagactacggtttctggtgacatgatacgcgtgcgtcaattcgatatggtggatgaagaaattgtgtggattgcttccgatattgctgcccggccggcgccggcccgttcgcgttgtgtgatactggcgcgaacgcgcaagctgctcgatctcgctgtcgaagctctgacagccagtggcctaccaggatttcttgcgatacggaaaacagaatttgaaagcgcatcgcttcgatggcttcatgccattctgcggctcgcgaacgccccaagcagccgcgagcagcttagccgggtctgtaagagtttctattctttggaaggtatcaacatcgccgctagcgatgtcgtcgcgcatgccagcgcgggagatggaaattatcttcgcggctgggcggatgtcgtgctggcacgggaagggctgtcctctgatgctcgtatcctcgtcaaagacctgatcagcaagctcgttgatcgcctggacttctgggcgttccttaaggatgcgttcgcttggctagacgggttaccggacacgaaacctgacccggatggcgtatttaacgaataccacgaagagaaggcgacctggcatgacctcgtgggagatgtgtgcgcccaatacgggcgcccagaagtgacattgcatctgctgttgcaggaattcgacctgcgctcaaagtcgccgccgccgccgatgaatggtatcccctgctatacgatccattccgctaagggcatggaattccaccacgtctacgtcatgggcttagtcgaggaccagttgccgagttgggctgcaatcaagaagggagatgacagccgcgatatgcaggaagagcgccggaactgtttcgtcgcaattacgcgttcgcaagaaactctgacgttaacttactctcgtagggtcagcggctgggcaaaaaccccatccaggttccttcgtgaaatgcagcttatttga

SEQ ID NO: 72944 - DNA, 2142 bp, Desulfobacula toluolica Tol2
atgtttatatcaaaaatagaaattaaaaattttagaaattttgaaaattcggaaattgattttaatgagggaacaaatgttatcattgggcacaataatgcgggcaaatcaaatttacttaaagccctttctcttatttttaatcctgaaagcggtcgaaaacttaaagttgatgatttttacaagaagataaatacagactcatattttgaacaagatgcaaatggtgacctaaagataaagagccctcctaaaatagtaatatccgcgtttatctctcaatcaataaatgataacagcaccaatgaaatacagccggatgacaataatacgatttatgaatggcgtattcaaacatctccttattacatcgcaagattaacgtatgaattttttcttccagagggtgatgaaacaaaagagtatattgatagtattaccaaattgattgacaaggggataaaaacaaaagattcgtactggaatttgattcatcgaaaatttatccataaatatatttcaagaatttatggtggtatagccaagctaaaaaatagagcagatagtgaccaattaagaaaatttgattttcaatttcttgatgcaattagagacgttgaaaaagagttgtttactggtaagaacactcttttaaaagatgtcttaaaatattttcttgaccataaaataactatagataccaatttgtccgaagagcaaaaacaggaaaacaaagaatcaaaacatgaagagtttgccaccaagtcgtcagaagtgataatgcaattgaaacaacggataaatacagacccaatacttgaatactcaaaagatgtaggagcctcaattggaggtgagcctgattttgaaggaagtattgatgaggttgaattgttttcgactttacggctgattgtagaaaaggaaacagggataaaattacccgccacacacaacggcttagggtataataatcttttattcatatctgtattattagctaaaatgcaaatgagtagatccgattatgtcagccaagatgacaaaaaagtttttccaatgttgattatagaagaaccagaagcacatttgcatccatcaatgcagtttaagtttcttaaatttttaaaagagaatttaaaaaccaaaaacgaggtcagacaaatattcatcacaactcattccactcatataacgtcagcagttgaattagatgaaattatttgtctgaatgtagatgatgaaaataatttacaaatagcttaccctggaaaagtttttgattcagacaaagctgaagataaaaagtcgaaagcatacgtaaaacgatttttagatgcaacaaaatcagatatgttatttgcaaaaaccgtcctccttgttgaaggtgttgcagagcaattactaattcattgcttggcagattatgaaaataaaagcttagaagataaccatgttgctgttgtaaatgtgaacggtcgatacttcaaccatttcctgaaactgtttgattttgatagcaacgatacatttaaaaaacatgctattcagcggaaagtcagttgtataacagatgctgatcctgttcagaaagatacttcagggaagaaaccaaagtttaaaaaatgttttcccttcgaactgaatattgatactgcgaaatttgaatacaaaaaaatatccgaaatactaagttcattacaggctaaatatgctggaaattcatatataaaaatttcaagcagagttgatggaaaagggaaaacatttgaatatgaactcgcttacaataatgcgtctacagatttactaataacagatgagatagctaacatccaagaattaaaagatttaataaacgccattaaagctaataaaccgttctctgacattttaagcatacttaaaaatcaaaacattcaggagagtattgaactgtctaattggactgaagaggaaaaaaaatcagccattattgcagccagatatttacaatcaatcgaaaacagttcttgggcaggaaaaggcgagcatgccttaaacttagacatgaaattacgggataatttaaaaaacggaaatcctgttaattttagtgtccctgaatatattaaagaagcaataaatcatgtatgctcatag

SEQ ID NO: 72945 - DNA, 1728 bp, Desulfobacula toluolica Tol2
atgattgaaataaattcgagtactctaatttcaacagaaacgccttttaagattttcgccggaccaggtgcaggaaaaacttattggctgatcaaccatatcgaaaatgtattgcacaactctaaacgattaaccacaactactaaaatcgcttctatcacatacacaaatatcgccgttgaagaaattcaaagcagacttggtgacagtgatgatagagtatatgtatctacgattcacaactttctttataaatttattgtaaaaccctacggttttttacttaaagataattctggcgcaaatcttatcaatttacgaaaccttgacggtcacgatgaacacatacccaattccagattcgtctatgattggaaaactcaaaacaagttaaattacattaaagacgacaaaaaaatatatgaatgcctacaggatttagattggcatcttaatgcagactcaagcattgatctgggaccgagacatacttggaaaagaaaaattggtaggtactggattaaaaaagagttatttgtggactataaaaaaaggtactggagaattgggacaatacatcatgaagatgttttatattttgcatataaaatcatatctgaaaatccagaagtcctagagtacgtgaacctcatgttcccttacatgttcattgatgaatttcaagatacaaatccaattcaaacagagatcgtaaaactcatttcaaaaaataatactattgttggggtgattggagatgcagagcaatctatttacaaatttcagggtgccactcgtcaagattttgttgattttaagatatcagggataaacaattaccagattaagggaaacagaagaagcacaaataaaattatcaatgtattagacaacattaggtacgatagagtcaaacaaactcccataagaaatatagaaggcaatatgccaacgatttatgttggcgacaaaatgaaagttattgaatatttaacaaaatcataccctgaaatatcaattctaacaaggaataatgaaacagttggccagattaaaaatgataataataaaaatattggaaatctgtgggattcttcacgaggtttagatagtaactacgaaaggcagaaacttttatataattcgatttatgcagcagaattatgcttgctggggtattacaaagatgctgtgaggttaacatcaaagatattctacaaatacaaggatggaactaaaatacagaaagttaagaagcgcgagttggcaatagttttgattgatttacttgtgtcccaaaaacaaaataatagttcaaaaacactttttgatttctacaattcattatttgaatatttcttgactaattatcaaattaaaattggttcaaaaatcacaagaggaaaatataaggaattttccgaaaacaacatttatgctgatttggttcaggctttgcgaattaaagatgatacaagtcggattaaaactatacataaagcaaagggcgctgaatatgagaatgtattagttgtaatggaaaatagcatagaattacaatatgttctcaaccctgaaaaacatcaaaatgaagatgatagcagaatttattatgttgcttttagtagggcaaaagataatttatttattactgtcccaaaagaatttacaaagacggataaagaaaaattcgaaatgatagggttccatatcaagaatgaactgtaa

SEQ ID NO: 72946 - DNA, 2076 bp, Parabacteroides johnsonii CL02T12C29
atgtatatatcaaaagtttcattagtcaactatcgtaattttgagaattctttttttctcttcaataaaggtatcaatacgataattggagaaaatgcatccggcaaaactaatttattccgggcaatccgtcttatattagatgataacctattatcatcagcatataaacttaatgaaaatgactttaatcgcaatttaagtaattggaaaggcaaatggattataatcagtttggagtttagcgaaatttctgcagatgaagctattcaagctttatttgttcatggaggtggcaatgtagaaggtgatattaccgaaagagctacctataatctatttttcaggcccaaacctcaaataagaaagctactttctgaattaaaagcgggtgataaagatggtttaggaaaaatattagataaagtaactattgatgactatgagacattttttacgggaaagagcacggttaatttcaacgataaaaatgttcagcgtgaattaatgggagattttgaaaaggtagaatttaattttgatatagatgaatcaaaatttggtagtcgtattccgcaccaattatctataagcaaagaggtatcttttacttttattaaagcattgagagatgtcgtgtctgactttcaggacaatagaaagaatccattattgaccctatttaaaagtaaaagtgaagatataaagaaaaaagatttcagttctatttcaggacaagttgaagagttaaatcaatctatagagaaactagaagatatacaggaaattacagataatatttccaatactataaaagaggctgtaggaactacctattctccatcttctttatctattaaatccaatgtccctagtgacgttgaaaaattattccaatcattgaaattgtttattggggagcctgaagaagattatgaaggcggtgttcatgaattaagtctgggtggggcaaatctcatatttctgacattaaagctacttgaatataagtatagaaaagagaaagataaaatagctaatttccttttaatagaagagccagaagctcatatccatacgcatatacaaaaggcattatttgataaaatagattatcctgatacacaaattatttattcaacgcattcaacacatatatctgaggtagccaatatctcaaatatgaatattataagtagatttagaaattattcagaagtatatcagccgtttgtaggattgagcgaagatcaaattgtaaaaatacaaaggttccttgatgctattagatgtaatcttttatttgctaaaagtgttatattggtagaaggagacgcagaagaaataatcattcctattatggtaaagaaaacattgggggttagtttggatgagttaggaataagcctgataaatgtaaggagtacaggatttgaaaatttagctcaattattccataatcacagaattaaaaagaagtgtgctattattactgatttagatgcatctattacgggagaaaatacaaaggctgcaaaaatagggattagccgaaaagaaaaattggaagcattaaaaaagaaaagtaagtggataaaagctttttatgcatcacatacatttgaaattgatttctttcaagctggtaactttgatgaaattttgtcaacaatttcagaagtatatgtggataaaaaagcaattaaacaatctaaagaagatattaaatctggagatattaaaaaatatgggaaacgaatcttgacaatagcgaataatatggggaaaggatggtatgcaatacttttaagtaatcaaattacaccttctacacatattcccaattatatattagaagctattctatttgctaaatcagaattttccaaagaacttctatcacaaattctaacatatgtattgagtacttatgaaccgagtgataaaatagagaagctgaataaagaattacttgcttataaaaatgatgaaattactttagatggtttaaaaaaagatttggaaaaggtaatagataatacagaacccattttatacatattaaatcgactctaa

SEQ ID NO: 72947 - DNA, 1779 bp, Parabacteroides johnsonii CL02T12C29
atgtttgtttggagaaagaatgatttaaatccggaacaagaaaacgctatatcgaatgaaggtagtgttttattgattgcttgtcctggcagcggtaaaacaagaactctgacttataagattgctcttgaattatccaaattacaatccaagaagcaatatattatagccattacctatacaaatcgtgcagccgacgaaataaaggaacgcatcgaattgttagggatagatacaaagcaattatggatcgggactattcattctttttgtgtagaatggatactgaagccttatcatatgtatatcgaagaacttaaatatggatatactattattaatgcccatgataccgaatcctatttaagttctttatgtaacttgtatgcatctgcaaagcctaaaattacatattgggattgtttatgttactattttacatcagaaggattaattattaactgtactaaacctcaaaaaaaggacatagtagaatcaattattcatgattatttccaaaatttgaaagacaacagagaaattgattttgaattgattctatattattcatatcttcttttaaaagagaaccaaagtatctgcaaaatattatcaaatatattcgcttatatattagttgacgaatatcaagacacgaaagaattgcaatatatgattttgggtgcaattctgaaagcaagaaataatagcaaggcgtttatagttggtgatcccaatcaatctatatttggtaatttgggcgggttccctatgaataaagttgaattggagaaagtttcaggaatccattataatgaattgtcattaacaaaaaactataggtcttcatcccttctcgtatcgtattttgattatttcaaaacatatgataacatgatagaagctgttggtaagacgaaagatgatcagagtattatttattacaaccagaatatttctattgaaagtctagtagatgaaattatccgtataatcaaatataacattgaggtatgtggaatttttccaagtgaaatatgcatacttgcaccacaatggattcacttatcggctttaaccagaactttaatggtaaggttgccggaatatagttttgatggaccaggtatggctccttttgcaagagatatagataacttttggtacaaattttcacgcattgtattgaccgatgcatctccttctctctatataagaagactatgctgggcaaatgaactcataaatgttttgtcatcaattggaattgaaaccaatatatctgcaaaaacattattatacatctgtaatagtatctcagtagatgaagaagacggcttagaatatttgaaacaattttttcagaattttctcggcaaattgaatatagatatacatcaatataaatatttagaaatgcattataatgctttttttgaaagttcaaacaagcgtatagaaagattgaagaaagaaggaattgaatctatttcacacattaattcttttaaaagggtttttcgacaaaaagatgggattacaatttctaccaatcatggaattaaaggagcggaatttgacactgtaatagcttttggacttttggaagattacgttccacattttagtgagtctaataaagaagaaagtgctaaacggattttgtatgtcatagcttccagagctagaaaaaatttgtatttaatatcagaacaaggtagaaataaaatcccaacaaatgtacttaataactataaatatgaatacacagtcgtataa

SEQ ID NO: 72948 - DNA, 1419 bp, Parabacteroides distasonis CL09T03C24; identical to SEQ ID NO: 72124

SEQ ID NO: 72949 - DNA, 1704 bp, Parabacteroides distasonis CL09T03C24; identical to SEQ ID NO: 72125

SEQ ID NO: 72950 - DNA, 2370 bp, Pseudomonas viridiflava UASWS0038
atgactacgcaagggttttctgttccctctcctctcgtcaactcaaccgccagtcccgctccaggcgcgcccgcggtaccatccaacgaagcaattgcacctctgagcaccgctccgatccgtctagcctgcgtcgaagcttccaacttccgccgcctcgcaaaaacccgtctcgagcttgatgagaccacgacaatcctggttggcgccaacaacagcggcaaaaccgcccttctcactgtccttcgtaacttcctgggcgagtcgcctggcattcgcgccttcgacatcagtctctcgcagtgggcgaagttgcgagaattgggccaactctgggagacgctcgaagacgacccaacgacggattctagcgatgccgaaaaatggcaggaacagtatcgacagctccaggcttgcatgccattcatcgacctttggttcgatgcaaaggaaggcgcgtacaaccacgttgctcccttcatcacttcactaaagtggtcgggtggcgcggttggcgtaagggttcggctcgaacccgcagcagatgccaacgaactccgtaagctagcttggcgctaccgtgaggcacgctctcccgtacgagaccttccaaaggatggccacgcctggccgatggatttacttgactactggctacggcactccacggatctgcgccgtatcgcagcttaccgcctggaccctttgaagggccctcttgcagacaagaaacgctgtgacctgcaggagctgccgcccaatccgcaacctgtcgagttgcaatttttgcgcaagctcattcgggtggacttcgtcccagctcaacgaggacttggcaccgaggaggacgaggtacgatccgagtccgcaaacacccgccctggcttattctccagccaattattgaaattcgctcgacagcacctgaatgttgcgccatccgggcacggacatagagaagacttggtgaaggctatcgcgaatgcgcaagccgacctcgacaaatcgatttacaaggcgctcaaaccagcgatggaggatgtagagattttggggtatccaggcctacatgatccgcaacagtttcactttcgtaccagaatccaaacagccgatctccttgcccatagcacggccgttcagtacaccctggacgaaacttctgtcgacgagtcccttcctgagcactctatcggccttggctatcaaaacttgcaatcgctgagcttcatgctcgtgtcgtttcgtaccgcacgcctcacccctcctcaaggcaccccggcagcagttcatcttgtgatgattgaggagcccgaagcccatttacacgttcaggttcaacgcaacttctcatcaaacgctcacgacctcattcgtccaaaggaagcggtgcatagcaacctccgtagccaattgctcatcagcacgcactccagccatatggcccatggggacagctttacccgcctgagatatgtgaagcgggtagcaagtactggtgctggtaccaaacctaccaccgaggtaatcaatcttggagatgcctttggtaaagacattcaaaccaggacattcgccgagcgttactttcaggtccaacacacagaccttctttttgctgatgcggccattttcgtagaaggcactgctgagcggatgctggtaccgctttttattgagcgagacttccccaaacttgccaagaaatacgtgtcctttcttgacattggaggcagtcatgcacaccgcctgagaccattggtggagaggttggggataccagctatcgttatcaccgacttggaccccgtggtgccaacgaagaatgcaaagggccgcgtagtgcgagcggcggtgcacattgcagggcaagcagaacttgaatgtgggaacgacacattgagttcctggcatccgaagctgaccaatttccaagcgtacggtaagcccaccccggccgacctggaatggaccgccgactcgggcgccaaagtaagattcgcttggcagcttcccattgcggccgcaagcgaacaatggcccagctcatttgaggactccctcgttctctccaacaccgattggttcaaggcgttagataaagagacggatcccatcacaggcaagaaagaggttcatcgcggaacattggcgaaagtgattggtattgtactcgacaaccctgaccataccgatctgctcaaggaactccacgcgatgctgcgcggtaacttcagcaagggtgactttgcagcaaccttgttcgaacgcctgaacgcgggtcaagctttgcaatgtcccgcctacattagtgacgcactaacttggctaagcagccagctaaacgtcacagcaggagaaaccccttga

SEQ ID NO: 72951 - DNA, 1983 bp, Pseudomonas viridiflava UASWS0038
ttgagctcagaactgcaatcactgggaaacgagcgtgatgctcatatcgtagaagacatctgcggctacatcactgccgtccctccccgtagcttcttcctctttgctggcgcgggttcagggaaaactcgaacgttagttgaagtcttgcgcagaattaccggcgtggttcagcacgaagcaggaagccaatatgcgcagaaacttcgctctcggggccagtctgttagcgtcattacctacaccaaaaacgcaacagcagttgtcactagtcgactaggtgagaactacctgacggcggtttcaaccattcactctttctgctgggaactcatcaaaggcttcgacgaagacatcaaagatgcgttgctggcacgctgtgccaaaaaactggaagatgccaaggcctatgcagcaggcaaggtaaggggagagtcggacaccgaccgaaggaagtacgccgaaattgaggcgcaagttgatgaaatccgcggcactgatgcgttcatctaccatccggaccgcaacacctacggagcaggtgcgttatcccacacagaggttttggaagcgaccgcgtggctcattcgtgagcgcccaacgctacagcgcattctggaggataggcaccctttgatactcatcgatgagtcacaagacacgatgaagaatgtgctggacgcactgttcgagctcacacagaaccgcccctgtcagattacgctcggactattgggcgaccatcgacagcgcatctatcctgatggtcacgacgacctcccctcacatgtacccgagggctgggcccggcccgcactacagatgaaccatcgtagtcagcagcgcatcgttgaccttatcaacaagatttgggatgcagacattgaaggtcgaactcagccaaaaaccggcgtcccccaacattcgcgtacggagaagaacggcggtaccgttcatatctttatcggcgataccaaagtcagtaccgcagagaaaatcttaaaggaagccgagtgcgcactggtaatggctgagcaatcatcctacgccgcctggagagataacgcgcgcggttacaaaactctcgcgcttgagcacaagctggctgccaagcgaggcgacttcttcgaggcatattacgcaatggatctgctggacaaggatgccgcgacgcccaagagcaacggtgagcggtcggggccgtcgatggttagacccctccttggcccgatgcttgagctagccaagtgtgtacaactggatgggtcgataaacgaattttccactatggaggttctacgtcgtaatggtgcacttgcaaacgtgccacagaccaatgccgagcgtcagtctttgctgggtaacattcaggccgcagtgatgaagttcgccgctgccacctccaaacctgacgcgactgtccggcaagttttggaaccggtccttgagggagagctttttgaagcggatttccgcctggtacatgcatacgaggattcttcaccacctccgcccgatcctaagcctagggccaaggaagccaaagaggaccgacgcaagcgcggatggcacgcgttcttcaatacaccctggcaacagatttctcgatatagtgcgtaccttggcggagaaacagaactcgcgacgcaccaggtcgtcaagggatctgagttcaagcacgtattggttgtcatggatgatgaagaagccggcggcacgctattctcctatgacaagctcttcggtgctgaaggcttgagcccggctgacttggagaatgttagcgaaggcaatgagaccgctattgaccgaaccttacgactgctctatgtcacttgcagccgggctgaagaaagcctcgctttggttctttgggctaaggaccccaatgcagcgttggttgcaatcaggcgcagtgaatggtttaccacggatgaagtgactgctttgaaccgtcctcccgtgaccgttctccccgaatga

SEQ ID NO: 72952 - DNA, 2301 bp, Bacillus azotoformans LMG 9581
atgcacatcaagtttgttgaaatccaaaattttagaaagttaaaatcatgtcgggttgaatttactaatgaaacaactttatttgttggggctaacaatagtgggaaaacaactgcaatggatgctctaataaaatttttagatgtaaaagattttactattaatgacgttacattatcaaattggttagggataaacaaaataggtgaaagatggttaaaatgtaatggggaaaatcttgaacttgataaagatgaaattggaaactttttaccgactatggatatatggttacatgtacaagatgatcaaattcattatgtaactcatctaataccttctctagattggtctggaggattgctaggagttagattaacgcttgaacccaaagatatagaatctctttacaaggattttcttaattctgttaaatcaacacaaggaattttattagcagtgaacccgaataataaagagaacgacatatcattatggcctaaagatttaagggattatttgagcagaaaatttcaaaaccatcttgcaattaagtcttatttacttgatccaactaagtgtttaccgataaataaaggacaagctcagccccaaatattaccgattggaaatgagcctattgatggagatccttttaaaagtttatttttagtacatcatattaatgcccaacgagggttctctgatcctgctaataaaaaaactgacgatgatgaatcagcaaaaagaatagttggtaatctctctacacagctaagaaaatattataatacacatttaaatccaacaaagtctcctgatccaactgacatagatgcattacaggctatagaaaaagctcaaagtacgtttgatataaaacttcgtgaaggttttaaaaatgcattagatgaactggagaatttagggtaccctggattttctaatcctaaaataagtatttccactagattagaacctatggacgggcttaatcatgaatcagcagtccaatttgacttaattgatggatataatgggaacgaattaagattacctgaacagtataatggcttgggttatcaaaatttaatatctataatctttaaattaatgagatttagagatgaatggatgaaggtagggaaagtagcaaagaatgcccctaaaaaccaagaggattttatcattcctccattgcatatagtgttagtagaggaaccagaagcacatcttcatatacaagttcaacaggtctttatccgtaaagcttatgaagtattatgtaatcatcccaatctaaaaaaacaaacgaattttacaactcaattaattgttagtacacattcaggtcacattgcccatgaaatgccattttcatctttaaggtattttcgaagaatacctcctaaaaacaaaggtgaagttccaacttctattgttgtaaatctatcagatgtgtttgggcaaggggatgaaacagagcgttttgtaaccagatatcttcaatctacacattgtgatttattttttgcggatgctgctattctcgttgaaggaccagctgaaagaatgttggttccgcattttattcgtcataaattttctgatttaaataataagtatatttcattattggagattggtggtagtcacgctcatactttaaagcccttaatagattatttaggattaacgagtttaataattactgatttagattcagtcgatcccaataataataatactgcaattccacctgcaagaaaccaaagctatgttactggaaactacacattaaaaacatggttacctaataagaaaaatattgatgatttattaaatttacaagaagaagataaagttaagacatctgaagaacatttttattcagttagagttgcatatcaaagcccaataaaagtaaaaattgtgaatgatggtttagaagaggaggcgcttccatatacttttgaagatgcattggtatttcaaaatttaaatctttttaaaaatattgaaggaaatgggttagtaaagaaatttagaaatgctattaatgagaaaggtacaatgacggagttaggtaagcaattttttgaagctttaaggaatggaaaaaaggccgaatttgctcttgaactcatttttaaaattgaccctaatgagcttgaagtaccaaagtatatttatgagggtctacattggttagaggaacaattacaggtgaagcccagttttaatgttgatgcaggtgaaaccataggtgaaacagtggatgaaacggcgggtgtcctatga

SEQ ID NO: 72953 - DNA, 1890 bp, Bacillus azotoformans LMG 9581
atgattgatattgaaaaatgtaatgatgatcatatagatgaccatgtagatgaagagatatttaattgcttaaaccttaaaaacctaaaaagttttttcttatttgcaggcgctggatccggtaaaaccagaacgttagtttcagttttagaaagatttcgagatcaaaattatcaacagttacaactgaatggtcaaaggatagctattattacttttactaatgcagcatgtgaagaaatacagcgtcgacttgactatgatccattattctctgtatctacaattcattcgtttatatgggagttaattagagaattcgataaagatattagagaatggttagatgctaatctgaataatcaaatagatgatttaaaattacagctttcaaaagggcgtaaaggaaccaaaacttatgtcgatagagtgaagagtttagaaataaaggaaaaacgaattaataatctagaaaatattaaacatttcacatataatccatctgggcttaatcaaagtaaagaatcattaagtcatagtgaggtaataagtatcggagcatattttttaactaataagcctttgatgggaaaaatattagttagaaaatttcctattcttttgatcgatgagagccaggacacgaataaagaattaattaatgctttttttgaagttgaaaggaagaacaacaatattttctcattaggattattcggagacacaatgcaaagaatttattctgatggtgaagtaaacttggggaatagtttaccggacagctggtcaaaaccagtaaaaaaaatgaatcatcgatgtcccccccgagttattaagttaattaataaaattcgctctactgtcgatggtcaagaacagagagaaagaactgataagaatgagggatttgtacatatgtttatccttcattctaaaacggataaaagaaatgcagaaaagaaagttgtacaacgaatggctgaaattactggtgatccaaagtgggaaattgtagatgctgattatacaacacttattcttgagcaccatatggctgcaaatagactaggcttcattgatatgttcgaacccctatacaaaaatgataaattaaaaacaggattattagatggctcactttcaggattgcagttttttacgaggataatattaccaatagtagaagccgatgaaattggagataagttaaagattaccaatattacaagggagtattctaatttattaaaattccagaaaggtgaaagagaccaactattaagaattagtaaggcccgtggtgcagtagataagttattatcactatgggatgattccaaagatccaacttgtattgatatattacaatgcgtagcagaattaaatttatttgaaataccggatagtatttttcctctttcagtaaaagaaaaaaaagaggaattaattagtgaggaaataactgcggatgggaaaagtgatgtattaattgcttggtttgaatcattaaatgcaccatttagccaaattagagcttatgattcatatattaatgataaatcaaggtttatgacacatcagggagtaaaaggacttgaatttccaagagtgatggttattattgatgacagcgaagcacgtggattcttatttagctatgagaagttgtttggtgtaaaagacaaaactgaagcagataaaaagaatgaaaatgaaggaaaagatacaagtatagatcgaacaagacgtttattttatgtcacgtgtagccgtgcagaagagagtttagccatagtagcttattcaacagaaccagaattagttaaaaaacatgttatacaagaaggatggtttaatgaatcagaggtagaaatattaaatgtccaatga

SEQ ID NO: 72954 - DNA, 1971 bp, Acinetobacter baumannii OIFC065; identical to SEQ ID NO: 72888

SEQ ID NO: 72955 - DNA, 2094 bp, Acinetobacter baumannii OIFC065; identical to SEQ ID NO: 72889

SEQ ID NO: 72956 - DNA, 1926 bp, Acinetobacter baumannii OIFC111
ttgcagttacaaagccttcgtatatcaaattttcaatcgtttggtgccactcctacagagctttcacttgaacagattacatatctaattggtccaaatggttcaggtaaaaccgcctctttacaggctctatgccgcctatttgcatttgacccatcattacgtcgtattactcgctcagatttccatgttccttataatgaagagacaccaccagaagaaagacacttatggatcgaagcaaactttacctttcctgaactacaaaatgatacggacaactgtaccgttgcccctcactttgggcatatgcgtttagatgataaagacggaatttcaagagttcgtttccgcttaaacgctacaatggggcttgatggagacattgaagagaatctcgtatatgtattagatcttaaccctgatggtacaccactcaatacagcaatagttccaagaacagaacgtaatcatattcatgtccactatttaccagctcaaagggatcccgctgatcatattgcttatagcactaatgcattattagggcgaatgcttcgcgctattaattgggagaatgagcgggatactattagaagcttgaccgatcaaataagcgataatctcaaagctaatccctctattgatgctttcagtattagtttaaagaagatatgggaaaagcttcataaaggtagtttttttacagatccaaaaatcacatttgtggcatctgagattgaagcacttcttagacacatgtctatctctttttcacctggccatgatgaaactcttgtcgatttttcacgactgagtgatggtcaaaagtcaatgctttatctatcgcttgtattatcatctcagtctattggacgttcagtattagccgaagaaaataaatcctttaatcctcttaaacttcgtcccccagtctttacattaattgcattagaagaacctgaaaatagtctctctccactctatcttggtaggattgtgaatgccattcattcagcagtgggaaaaggagatgctcaagcactcattgctactcacgcaccatctatgattaaacggataccaccagaacatatccgctacctaaggctctcaacagatcgatgtaccaaagtagcaaagattatccttccagaagagttagatgatggacacaaatttgtacgggaagcagtacaagctttccctgaaatatatttctctagattagtcgtccttgttgaaggtgatagcgaagaaattgtgctaccacgtatttttcaagccaaagacgcacctgttgatgaatctgcagtaaccattgcacctttaggggggagacacgttaaccacttttggcggttactctcagctcttgaaattccatatctaactttgcttgatcttgatatagctcgctatggagctggatgggggcgtattaaatatgttaatgatcaacttataaaatttgaacccacaaaagcacttccaattgattcacctcttcctaaatggaatacaacggatacccctatccgtacacatcatttctatgaaaatgggaaaaaagatctttttacagaattggagtgtcgaggaatattcttttcttttcccatggatctagatttctctatgcttttatcatatccattagcatatgagatcacactagaagtacctaatgatggcactatcaaagccgttctcggtaaaaaccatcacgactcatctcaatatacaacggatgaacttgcttttttcaatacctatcatcaactcttcaaaattggtagcaaacctactgctcatataaacgcattagcccaattagataatgcaatgttattggacaatatacccgcgtctcttgaccgattagccaatactgtcattgctaaacttgaggaacttcctgagtga

SEQ ID NO: 72957 - DNA, 1659 bp, Acinetobacter baumannii OIFC111
gtgataactgtagacttatggcaacctgctgatgggctaatacttgagccaaatgctttacgagcaacaaaagaattagaaaggtgtcttgccttaactgccggacctggcgcaggaaaaacagaaatgcttgctcaaaaagctgacttcctgttaagaacaaattcatgcgcctatcctaaacgcattcttgctatctcattcaaagttgatgccagtaaaaatctaaaagaacgtgttcatcgtcgatgtggtactgatctagcatctcgatttgatagttatacttttcacgcttttgctaaacgaattattgataggttccggccagttctaactggtgaagatactttagaagcagactacaaaatcagtgaacgcagaaatgggcgctctcacaaccaaatcagctatgaagacttagttccgttagctatacagattttaaagcaatccgacattgctcgaaatgctatccgtcaaacctattgttatgtctttttagatgagtttcaagattgtactgataaacaatatgaactcgttagattagcctttcagggtactcatattcgtttaacagcagtaggtgatgtcaagcaaaagatcatgggatgggcaggtgcattagatggcatcttcaaaactttttctatggactttaatgctattccactcaccttataccgtaactttcgttcaaagccacttcttcttagaatgcagaacgaaattatccgtgtacttgaccctctatctgtaatgcctgacgagcaacttgcaggaaatgaaggagaggcacatgaaattcgatttagaaatagtcgagaagaagctgagtatttaaccgatttaatcaccgcatggataaataaccaacagataccaccctctgaaatcgcaatacttatttccaaacagccagaacattatgggcatcatctaatagccttattggaagagaaaaatattccttatcggaatgaacaacaaatgcaggatattacagtagaaccagccgcaagacttattgtggactatttatcttgtctatatagccaatgtaaacctaaggcatggattcgattgacaaacctattaatcccatttgcagaggagtatattcaactcgatatacagagggatattaaccaacttattaaagaacaccgaaaaaatatagcaaaccaacccattgaagccccatattcaaactggtgggattgtgtatctgaatttataaagaaaattggtaaggaaactctaatagcattatctcctgaatatgaatctattgatcatttaaaagaaatcataagcagtacaaagactcgaatagaagaacttcttaaagttgaacccaatctagtaaaagccctagcacatttttctgatgatcaagcagtccgtattttaacaattcataaaagtaaaggcttagagtttgattcggtgattatattaggagttgagcatcaaacattctggggaaaaatagatgaggagcgctgttctttctttgtgggagtttctagagccaaacaccgcctgattatgacatcctgtatagaacgagaacgtccaccctcttatactaatcgatgggaaacgcaaagaacacctcatatagagtttttgagttacttaccaaaaacatag

SEQ ID NO: 72958 - DNA, 1671 bp, Acinetobacter baumannii Canada BC1; identical to SEQ ID NO: 71826

SEQ ID NO: 72959 - DNA, 1782 bp, Acinetobacter baumannii Canada BC1; identical to SEQ ID NO: 71827

SEQ ID NO: 72960 - DNA, 2109 bp, Lactobacillus casei 21/1
atgaaactaacaaagctgataatagatggctttcgctcctatggagaatcgacaaccatcgattttgataatattacaacactgattggtagtaacggggccggaaagaccactgctttgattgcattaaacaaaatgttctcagttaatgccaacgatcgcattatttcccccacggacttctttgttgcaactcaagacaatggcgagttacagtcatcgacgaagttgacctgcgaagcagtgtttgagtttgagcaagaggatgactctgcaagccaaaaacacgcggatgccctgttactgaaacatttgtgtgttaaaggacctggcgaggcattgattttgcgtattcggttggttgccacactcgaggatgatgggaccgctgatggagcaatcgattcacatatttattacgtgccgactctgggagtctgcaaggatgaagacttggtattagcttcaagacgtgagttgcagcatatccggctgatttatgtacctgcagtgcgaaatcccgatacgcagctcggaactacatccaaaagcttgctagcaaacttagttcgtcacattaattggggcaacgagactaagcacttagttgacgcgcaattagattcgctcaatgatacgattctcaattctaagggagtcaaactcattggagacagcctttctgcggactggaatatgttccatgaaaatgaccgatttgcagacgtgcggctcaatattgaatcgacgagtttaggcgatcttgcaaaaaggatgcgacctgtatttcaatcgtcaatcagccatcgcacttttcaacccgaagaaatgggtgatggtactcggtcactattttatatttccaatgtcgcaagtgtcttggaagttgagcggaagttattagaggcggaagaacagttttcaaaggatgaaactacaggtgagggacatgcccgattgatcgatcatcaaccaccggtactcactattttagcgattgaagaacctgaaaatcacatttcaccgcatctgttaggtaaacttgttaatcaactaaaagcgatggcagattatccaaatgcccaagttgtattgacttcacactctcccgccatagtaaagcgggtaaccccagaatgtattagatacgtatggatgaataaagacacagatgtcagttctgtgcaatcgctggaaattccgaatcaagaagacgaacttgaagcatatcgttacgttaaaatggcggtagagttgtatccagaactctattttgcccagctcgtcatcttaggtgaaggagcaagcgaagaaattcttctcccaaagttcttggaacttagtggaaagcctctggatgaatcgggaatttcctttgttccgcttgcaggaagatttgttcattacatttggcatctattgacccagcttcaaataccttacatttcgttgcttgatctggatcgtgaacgttcgggtggcggatggggccgggtcagctatgtacttaaagagttaagtcaaaatagtatagatgtcaacgcgtatcctgacggaatcacagacctttcagaggcaagtcttcagcaactttctgaaagaaaaaccgaggacagcgtatccgccaatcagttagatcagtacttgaaatatttgcagaagtacaatgtgtttttctcagcgccgttggatattgacttcgtaatgttgtcttcttataagaacaattacctaggccttgttcaaggaaaacaaggtcctacgctgaaggtagatggtaaacgctggttgataagtgaatacccgaaacaggatgagaacgattcgtcatatgccttacgcgtagaaaaagctcgtaaagatgctttgaagaaagataattcaaaactgggtcctagctcaggaaattcgtattcatttcaagatcgggaattaatgatttggtacgtatacttcttccttggccgtgggaagacaaccactcatatacaagcattaactcaaatgaatgatgatgcactgaaagccggcatgccttctctatttagtgaaatcgccgcgaaggcctcgcaattattgggaaaggagcccgtcagtcatgatgagtag

SEQ ID NO: 72961 - DNA, 1851 bp, Lactobacillus casei 21/1
atgatgagtagttctggttgggaaccttctgagggaatcattctagagcgcgaagcggaaaatgcaatcaaatccacgagaaatcagcttgttgttgctggccccggtactgggaaaacggaaatgttggcgcagaaagccgattacttgtttcaaactggcatttgtgcagatccgtttaaaattctggctattagtttcaagaaggattcggcaacgaacttaaaaaaacgagttgataagcgatctccccaattttcgaaataccggtttgactcaatgacatttgatggttttgccaaacaaattctggatcaatttagaatgggattgcctgaagacctcagaccgaatgccgactatttggtagagaatacccaacttctagatcgaatgtcacgcgatagttttacgaacagaacgcctagtaagaaggaaatcacatcctcttggaaaaatatccagattcaacaaaatcagcttcttgaacgtgatcgctatctccagaatgaaatgttgaccgggaccgaagatttgccagcttgcttgccataccacgctattatgcgacttgcccaaatgatactaaggctaaatccggcagttcaacaagcagttcgtaacgcctatccatttgtttttatcgatgaattccaagatactacaacgtctcaactggtgttggtacgacgactttttgaaaattccggatctgcaatcactgcggttggagatgacaagcaacgtataatgatctgggcgggagcaagaaagacggcattcgaagacttctgtagtatatttgccgcagaaacacgtgagctatcaattaatcatcgatctgcccctgcaatcgtcggcttgcagaggcaaatgtacgcttccctgaatgcaaattcgtcaacggcaattattaccgagccctcttggaaccccgacgacggagacatagaactactggagtccgataatgaaaaagaggaagctgagctactcgcacgaagagtgaagctgttgattgatgatggaatttcacctaataagattgctgttttgttgaagcaaaaagtctcggattatgcacctttactgatttccagttttgccagcgaagggattaaaactcgcaaggaggccgagtaccaagaactactgaatgaatcattggtacagcttgtcatccaaacaataaatattaatctgggaaagaacactctagctgaatgggaaagctacatgtcttcatttattgtttcgcgtggtatcgagaatgaaggagccgcatatgtgaaagcagaacgggagctgaataattttctaaaatcgaccacgacactcctgcagaagccggcaaacatgcaactggtgatgaagattattgatcaagtaacacatttttggacatatgattaccttgtcggcactgatgagacgtattcaaaccaagagcgctttagtcaacttcgagagacactcgcgacacgtctactcgaagaatacgaaaccaccaataattggatcgaggtgattgataattttgaagggaagcattctgttccaatcatgacgatccataaaagcaagggattgcaattcgaggctgtgtttattgtggcactagacgacaatgcattttggtccatgacaaaggatgccgacgagactagaagagcattcttcgttgctatttcccgtgccaagcgctatttaggtttcaccttttcgcatcatcggcatcatggcgacattatgacacacaacgatatacaggagttctatgatctgatttcttcgactgcaattcgtgtgaatctagctaatgtgaagagtgagttaaaatcgaccgattga

SEQ ID NO: 72962 - DNA, 2055 bp, Clostridium sp. Maddingley MBC34-26
atggttatggaaataaataaaataaaattaaaaagcttcagatgttttggccctacggaaacggttattagattaaatgatttaacggcatttattgggacaaacagtagcgggaaaacagctgtacttcaatcattattaaaactgtttggaactaacacaaaagatagagaaatagtaaagagtgattttcatatacccaaagggatatcccctgaagaagtaaatactaatagtttatccatagaggctatattggaatttcctgaattgctagaggatactgataaaagtattgcagttccagtattctttaatagaatggttataaaagaacctggcgtaactccttacgtaagaattagattagaatcagattggatgataggaagtactcctgaaggagacatagaaactaatttatggtatatatttttacctgaagatagtaatgaagaagaacaggaaggcgttaataaaatcaaggttccaagtcaagaacgctcaagtatccaagttatttatgtgccggcagttagggagccttctgtccagttaaaaaatgcagctggtacaatattatggcgtataatgagaatgataaaatggcctgaagatattgatttgaaattaaaagataaagtagatgaagtggatgtattatttgatgatcagcctgctgttaaatacataaaaaaggtaattaacaaggaatggaaaaactatcacagggatattcgatatacagaagcaaacattaagtttaatagtgccgaacttgaagacatattaaaaaagatggaaattgaatttctgccaagtgtaacaaataaaggctataaaatagattctcttggagacgggttgagatctttattctatttatcactggtaaattctttgttagagatagaaaaaaaggccagtgaagatacagatagacatgagtttaataacacaacatcagctgcattaacagtacttgcagtagaagagcctgaaaatcatgtttcgccgcatctacttggcaggataattaacaacttaaattcaattgctgaaaaagctaatgctcagattttaattacttcccatactccagctataataaaaagaattgcccctgaatcaatacgccatttaagaatcagtaaggaacaattctctacagtattaaatgagattaaactacctgagaaaactgatgaagcatataagtatattaaagaagcagtgagagcatatccagagctttattttgcaagattagttattctcggtgagggtgacagtgaagaaattgttattcctaagctgttggagttgcttggacctaaaatagataatagtggaatctcaattgttcctcttggaggcaggcatgttaatcacttttggaagttgttgagctctttaaaaattccatatattacattgcttgatttagacactgagagagaaggaggggcatggggtagaataaaatatgctataaaacagcttcttaaaaatggacataacaaatatgagcttcttttgttaagagataatactatattggatgatgacagtcttgaaaaaatgcatacatgggaacttgattcagaaagattaaattcttggattgtacgcttaaataagtataatgtatttttttcttcaccattagatattgattttatgatgttagaaacatttccagatgaatataaacaaactgctcctaaaaatggaggaccacgaattcctgacaagttaaccaatttaggtgagtttaataaaaaagtagaaagtgcggtaagagcaactttaaaggattatggtggagatggcaaaagctacagtgaggaacaaagggaactaatgatatggtacaactatcttttcttgcagcgtcaaaagccaagtacgcacataatggcattatctaatatagataataagaaattaaaggataacatgccagaaccattaaaaaaattagtagtagccatctatagcaatttaaaagatgatccattttctgaattaggagtaggtgacgttaatttatga

SEQ ID NO: 72963 - DNA, 798 bp, Clostridium sp. Maddingley MBC34-26
atgataagatatactaattgtgataaatggtttccatcagatggaattgagttagaagatgccgcgtatgattctgtgaaaacagatactaattgtattgtaatagcaggtcctggagcaggtaaaacagagctgcttgcacaaaaggcatgttatttactgcagactaataaatgtccaaatccacagaaaatattagcaataagctttaaaaaagacgcagctaggaatttggctgaacgtgtagaaaaaagatgtggaaaagatctggctaaaagatttgtatcaaggacttacgattcttttgctaagcatttagtggatcattttaggatgagtataccagaaaattatagaccaccagcagaatataatattgcatcacatgatgatattgaacgcttgattagacaatatgatctaccttctgatatagagaatgtttatggaattcatgaagtaagtacagcagagtttattagattctatcttacccaaaatatgcttcctataagcaaagattataataatataaatgaatggctaattgggaaggtatggcattctcttataaatggagaaagctggttgacgccatcgttaacatttccaatgatatcaaggcttgctgaatatttattgaggttcaatccaagtattagaaaagctttaaggatgacttacaaatatgtttttcttgatgagtttcaagatactactgaggtacaatatgatttggttaagacagcttttttaggttctaattccatattaactgctgtaggcgatgataaataa

SEQ ID NO: 72964 - DNA, 2088 bp, Clostridium sp. Maddingley MBC34-26
atgtatatttcagaattaaaattgactaatttcaggggatttaaagattcaactaaaatcctttttactgaaggtactaatgtaataatagggcacaataattcagggaaaactactgtcataaaagcattagaattattgtttgacagtgagaagaataagagattatgtatagatgattttagtaaaaatatatcgattgaggagctaaaaagtaatccacccaaaataacaataacagcaaaacttgttgaatctcaaaatgaagaagattattcagatgatttagtaacagtatcaacatggcttacgaagattgaaaagccatatgaagctttaattacatatgagttttttcttccagaaaaagaaattgatgattataaaaatattattgaaaacattaaaagtgatgatgtcaatgattattggtatgaaattgattataattgtctaagaaaatatacgtataaaatttatgtaggaaatcctgaacataaaaatgttatagatggagaaacactaaaaaaatttgattttcaatttctaacagcaataagagatgtagaaagggatatgtttacaggaaagaattccttacttaaagaggttatagatttctttatagattatgaagtgaaaatagatgagaaattaaaggacaatgaaaaaagagatgtgattatcgaaagaaaaaaagaattttctaagaatgcaaaaattcttattaattcgcttgaaaataggatgagtgcaggaaaaaagcatatgcttaaatatgcagaggaaacaggagcttcgtttgaaaaactaacaccatcatttgaaggtagaattcttgatactgaactttattcggctcttaaattgatagttgaaaatgaaactggaataaagctacctgcaaatcaaaatggattgggatataataatctaatttatatttcattactgcttgctcgaatgcagaaaaatgcttcaggagagtatttaggtactaatgctaaagtgttttctatgcttgcaatagaagaaccagaagcacatttgcaccctaatatgcaatataagtttttaaaattcttaaatgaaaataaggaaacagaagtacgccaaatttttattacatctcattcacctaatattgcagcagctgttaatttggatgatattattgtgttgtataaagataatgatgaagtgaaagtagcttatccaggtaaagtatttacagatacaaaagaagataaaatatctaaaaactatgttcaaaggtttatagatgtgacaaaagcagatatgttttttgctaagagtttaatttttgtagaggggatagcagaacaattacttgtaccagagtttgccaagatatcagattgtgacttaacagatgcacatgtttcaataattaatattggtggaaaatattttgaccattttctaaaattatttgatacatctaaaagcaattatgcgataaagaaaaaagtagcctgcataacggatttagatccatcaagaaagaaaaaagagaaaaatagtaaatgggaagtgtgtttgcctattgctattgactgtgaaaaagataaatatgattataatccttgttctaataatgttgtagataagtactgtggaagaaatggagaagatgttataagagtgtattctcaagaaaagtatataggttgcacttttgagtatgatttaatattatgtaacccgacaatcaaagaattacttacagattctgtaagtaattctagtgagatagaattattaatggagggattagaacaaaataaagatattgattactttataaatatcttaaatgagggtgcatataaagatgaaatttgtgtagctttagataaaagtaatcttaaaactaaggataaaataattcatattatagcaggaagatatttaaaatcaataaaaaaaggtgtagttgcacaggagttagcatatacaatatcagagaattataaagagcaagaatccgcagataaggaatcttttgaattagttataccaaagtatattagtgaggcgataagatggatttctctacagcactaa

SEQ ID NO: 72965 - DNA, 1707 bp, Clostridium sp. Maddingley MBC34-26
atggatttctctacagcactaaagttgaaagatagtgatgaattaattgatattgaaactaactttaaattatgtgctggtcctggtgctggaaaaacgagatttttaataaatcatattaataacattattttaacttcagagagaatttctaaagttagaaaaattgcgtgcattacatatactaacgtaggtgtagatacaataataagtaggcttgaagatttcattgattatgtagaggtaggtactatacatagttttttatataaaaatattattaagccatatttatggggtttaaatgacgagtttagtttccctttaaatgctattgatggacatgatgagtttgtacctacatatagcattctaaaagaatggaaagaaagtacaaaacagcaaagagtcagagatgataaagcacttgccaaagctttaatgagtttaaaatggaatctaaaagataacggaaatgtagaactgggattcaaatatagtagtagtggaaagattgatggatataacattaaaaaagcatcttatatagaatataaaaaaatatgctggaaacaaggattaataagtcatgatgatgttctatttttaagttataagatacttgaaaaacaaccacgaatatatgatattttacgtgctaagtttccttatgttttaattgatgaatttcaggatacaagccctattcagtctaaaattatagaaatgattgctgaaaaagaagctgtagtcggagttataggagatgcatgtcaatcaatttattcatttcaaggtgcggatgttcaaagatttattgattttactttgcatgatatgaaattatatatgattaataataattacagaagcactcagcaaattattaatgtattaaatgatgtaagaaatgaaaaaacttttaaacagaatagtcctgataacaaagatggtaaaaaaccagttctgttagtaggagggttcttagacgcttataataaagcaattcaaatatgtaatgctaaatcagtatgtactttagcatttagaaatgatatgtctaatattttaaaatatgggtttgaagattatttttcgacagatgcctcagatgaattgattttttcagattccgatagagggaaaatgattttttatgttataaatagcttagaatattgcaggcaaaacaaaattaaggatgctattaaatatatgaaaaaagcctacaggaagtataaagaatttggtgataaagaagcggttttgaatataaaaagattaatgaataattatgataaatttaaagaaataagtatcaaggatttttataatagttatttatttggttttaatgggactaaggggaaaatatcttcagggaatattagtcagtattatagccaattgacatataataaggtatcagtggcagttaacatagctgatgataatagtatgcataggactattcataaagctaaaggagatgaatttgacaatgtacttttgctaatgcaaccaaaagaaaattacgatgagaataaggaattaagttttttattaaatccagatatagatatagaagcaaatagagtttattatgttgcattaagtagagctaaaaataatttattcataaatgttcctcaattatcggatgaaaataaaaataaacttaataaattcgatattatttacctttag

SEQ ID NO: 72966 - DNA, 1926 bp, Alteromonas mediterranea DE1
atgaaactgcacagtattcgggtttcaaattttcagagttttggtgctgaaccaacagaactgacactggaaaatattacctatctgattggccccaacgggtcaggcaagactgctgcactccaggctttgtgccgactgtttgcatttgatccatcattacgccgtattcagcgctcagacttccatgtcccgcacgatgaacaagaagcgcccgaagaaaggcagttatggattgaggcggacttcgtgttccccgagttggaggatgaagaagataactcgaccgttgctccccatttcagtcacatgcgccttgatgaccctgacggaattcctagggtacgatatcgcctaagtgccactatgggcctggatggggatattgatgagacttttgtgtatgtgcttgaagctggcccggatggttcgcctctaaatcctcaaacggttccaaggtctgaacgaaatcacatacaagtccactatctgcccgcaagaagagatccgactgaccacatagcatatggaacgaacgcgctgcttggccgcttgctacgggcagtgaactgggaaaatgaacgggaggaagtcaaagggttcaccgaccagattagtgagagtttggctgctaatccatcggtcaatgcttttagtgcccacctgaagaaaacttggggcacccttcataaaggcagctactttacagatcccaagattacttttgtggcatctgagatcgaggcgttgcttcgtcatttgtccgtatcattctcgcctggacatgatgaacatcttgtcgatttttccagactcagtgacggccagaagtcgatgctctatctgtcattggttctttcatctcaagcaattgggcgtgctgtccttgccggtgaggacggctcttttgacccagaaaaattgcgtccgccagtctttactttgattgcccttgaggaaccagagaacagcctctcgcctcactatctggggcggattgtcagcgctctgaactccatgacgagcaacgaggatgctcaggccctaatcgctacgcatgctccgtcaatgttacgacgtgtcgatccggaacatattcgatatcttcgacttaccgaaacccggcaatcaagaattacgaaaatccaattacccgctaaaaccgatgaagcgcacaagtttgtacgcgaggctgtccaggcattccctgagatttacttctcacgtttggttgtgttgggtgaaggggatagcgaagaaattgtactaccgcgccttttccaagcaaagggtgcgccagttgatgaatcagcggttacgattgctccgcttggaggtaggcatgtcaatcatttttggcgcctgttatcagcactgcaaatcccatttttgacccttctcgatttagatgtgggcagatatcaagcgggctggggaagaataaagtatgtaaataaccaacttggcttatatcaacctgaaaaagttctgccaaatactttttctttatcagattggaatgatgacaaagtacctgttcgtacccaccacttctttgaaaacggcactaagagtgtatttgcagagctggaaatgcgtggtgtgtttttctcatttccaatggatttagatttttcaatgctccttgctttcccagatgcttacggtgttcagcaggaagttccggatgactcaacaattaaagccgtgttaggcaagagccatcatgacccatcccaatatagctatgacgagttaaatcttttctctacgtatcacaagctttttaaactgggcagcaagcccgctgctcatatcgaagctctcgctcaactaagcgacgaggatttgctggcgaacatgcctgaatcatttggacgactcactgatgccgtgatcgccaagcttgcggaactgcccgagtga

SEQ ID NO: 72967 - DNA, 1677 bp, Alteromonas mediterranea DE1
gtgattgctgtagatgcatggctgccttcggatgggctaactcttgaacccaatgcactgcgggctgcgaaggaacaagcgcgctgtcttgcactgacggcggggccgggcgcgggcaagacggaaatgcttgcacaaagagctgacttcctcctacgaaccggaacctgccgttatccgaagagaatactcgctatctctttcaaagttgacgccagcaaaaacttgaaggagcgaatccagcaacgctgtggacaagaattggcttcccgttttgatagctacacatttcatgcgtttgcaaagcgtattattgatcgcttccgagtagtgcttactggtaatgatgctcttgatctggattattcgattggcgaaagaaaagtcacaaaaaggcaaattacatttcatgatcttgtaccgctagcaattcaaattcttaaggcctccactgtcgcaagaaatgccatacgccaaacttacagcgatgttttcttggatgaattccaggactgcacggatcagcagtatgaactcgtgaaggtagccttccaaggtacgagcattcgtctcactgctgtcggtgataccaagcagaaaatcatgggatgggcaggtgcattggacggaattttccaaacgttcgctagggatttttcagcggtcccattaaacatgtaccgaaactttcgttcaaaaccacgcctgcttcggatgcagaacgagataattcgcgtgctcgatccggcttccgtcatgccagatcaccaacttgctggtgaagagggagaggtcttcgcgtggcaattcgagaatgcccagggtgaagctgagtacttggccgatttgattgccgggtggataagaaatgaacaggttccgttatccgaaatcgccgtattagtgtccaaacaactagatctttacgccaatcacctgatggtggcattggaagttaggggaataccgtaccggaatgagcaggagatgcaggatattactgtcgaacctgccgcaaggctcgttgttgactatttgtcctgtctctatggccagcgagagcccaaagcctggattcggctgatgaatcaattgattccctttgccgatgacgaggtgcagtctagcgtcaggcaaaatttccaaagcttcttcaaggaacagcgaaaaatcatcgccatggccgagttgttggatgaaccgttttcgggatggtgggattctgtgtgtagatttttgaagaaaataggaatggagactcttgttgctctctcgcctgactatgagtcacatgccagattaggtgaagttgtgggagataccaaagcgcgcattgaagaattgcttgaacttacccccgacttgcctcaagccttgactcgtttctctgatgatcaggctgtgcgtattctgactatccataagagcaaaggattggagttcgactcaacgataattttggccgttgagaacgaaatattttttggggatcaagattctaatctgtgtgctttctttgttggtgtatcccgtgccaagcgtcggcttgttcttacatacgctaaacaacgcgacaggccccttaactatgctaaaagatgggatgtaattcgaactccacaacaggaatatcttcaatatgcagcacagtttattaccgatttaacgcacatttaa

SEQ ID NO: 72968 - DNA, 1989 bp, Pseudoalteromonas sp. Bsw20308
atgcatattagtaaaattcgaattcagaattttaggttactcaaagatacaacattagatttagaggatgaagaaaataatgatttatcgcttttgataggtaagaacaattctggaaaaacatctttcatagttttatttgaaaaatttcttaaatctaaaaagttctactttgctgattttccactttcactccgtcaagatatccttaaactaagccatcaaacagatgtgtactcgttagcgataagattatcattagatataacgtataatgaaaaagatagcttacataacctttcagattttattgtagatcttgatacggaatgtaatttggctcgaatctcgattgaagcgactattaataaatcaaaactcttaaaagatcttgaagcagttataaatacaagagaagagttcatcaaaaagaatcttttcgaatatattcaggttaattactatatttttgatgattatagtgattttgagtcaaagcatcgctctaaattaattcaaaaagaagctgcagatgtcaatagcttaatcaatttgaaaataattaaagcaaatagaaatgtaacgagttctgatgcaaaacctcatgaacggaaaatactctcacatttaacaactttgtattataacagtaaagtcaaaatgtctcatgatgaactcgccgctattaattcatcaattattgaagcagatagagagcttagtgataattataaaactttttttgagcctttccttaaaaatggtaagtcttttctgggcctcacagacttaaacgttgtttcggacttgcaatcaaaagaagtaatggcaagtcattccaagataacgtacggaaaggatgataccgagttgcctgaacatcaaaatggtttagggcacatgaatatactctatttacttcttaacatagaaattgaaaagcaagactttttagaggccaatcgagatatcaaccttttatttattgaagagccagaagctcatactcatcctcagctacaatatatatttattgataaaataaaagacactttaaatgagataaaaggtcttcaaactttcatttccacccattctgctcatatcgtcaaaaagtgcaattttaaggatattcgctactttcggactctcaaaaaagaactgaatacagaggttctgaacttctacttagagctacagaaaatgtatgtagatgagtccaatgatgaagaagataaaatagagaaggaaaactttaagtttcttaaacagtatttaacaattgagtcttcagagttattttttgcagagaagatcatctttatcgaaggcacttctgaaaaaatactcctgccatacttcatagaccaatttgataaagaaagagttggtgatgaaggagatattgcacttacttctcaaaatatttcgatacttgaagtcggagcgaatgctaaagcatttaagcacttccttaatttccttcaaataaagacacttatcatcacagacctagatactacaaggtggagtgaaagtagttataaagcatgtcccgttaaagaagggacacatacgagtaatgctactattaggcattactttaattcacccgagtttaaggaaaaagactttcctatatggatggataaattaaaaaaacatcaacacagagatccatcgtcactgatcaaggtagcatatcaagatactgaaaatagttaccaaggaagaagctttgaagagtcttttgtcagtgtaaatatgaaaataattggtcgcaatatcgatgacattagtgggctcaaaaacaaaaagaggtttgaagagtgcaagtctgatcctgacaaatttgtagatataattcttgatagtaagggaaagtctagttttgcttcatccatactcttccttgctctttcaaaagacaatttaaagtggaacactccctcgtatatcaaggagggattaaaatggatagccaaataa

SEQ ID NO: 72969 - DNA, 2028 bp, Pseudoalteromonas sp. Bsw20308
atggatagccaaataacaccacagcaacaaattcaaaaatgtatagctgaaagcatgagttttgttttacagggaggtgcggggtctgggaagactgaaacgctaaaacatactctgcagtttctatcacaagattactctaagaatagggttgcgtgtattacacacactaacttggcagttaatgaaattattgaccgtgttggagatggctataaagtgtccactatacactcatttcttgcggccttaattaagaatcatacaaaagcgattcagcaggttatacatgaaatttttatagtttctaacgtagaatttgaaactgaggaaaattcagacctagctggtaatgaactaaaaaaagctaaccatgataactacaagaggacttataaaaaatacgcaaagctaaaatatatagttaaaggcgaaacttctgccaaagaaataggtaaaagagaatatgataaagctcctgctgagcataattatgaactgaatttaaaaatagctgaattgaatgctgaagtctgtaatgttatcaaagataaagatcatcgaaatatcaaatacaatgattcacgctttgataggtttaaagatctatcatttgggcatgacagtttactcaaagttgccgctctactctttaaacgtttcccaaaactaggaaggattttaagtgataagtatgactttgttttaattgatgaatatcaagacacgaatgaagaaattattgaagtgtttttaaagtaccttccaaaagaaagaaaaacgactgttggcttatttggtgattctatgcaaagtatttactctgatggtattggagatgttcgcgcatacattgattcagatcagattgtcgagatagcaaaagaagataatttcagatgttcagagcaggtaattgactttgttaactacttgagaatagatgctctcaaccaaaaactagcattcaaaattaaacaagatggcatcaaagaaatattaaaagataggcaaggacatgttagcttgctttatgctgtctgggataatgtcaagcctcactctaagagctcccctgaaacaaaacaggcatacctagatttcatcgataaattaatagattttgcagatggtgaagagcgatcccataaaaagttaatgcttacaaataagtcaatagcaggcaaagttggctttgctggtttgtacaaagtgttttctgatagatatacggatgtcaaagatgagatcgaaaaagtactttcaagcattcaagtgcttgatctcgcagagttatgtaatgcctatagtggttcggaaaaaaggtataactttatattatctgaacttaaaaagtcagggtttgtacttaaaaccctgagagaaaaagagaggatagtggccgcattcgaaaaaataactagaggaaaccttagtataaataaaactcttgaagtggcttttaaagaaaatattcttgctaagtcagaagctcatctggcttatgttgatcgtaaagaagcttttttatctgaattgaaaaatgatgaagagtatcaacagctcaaaatgattttcaatgcaggatctaatagcttaaccaaaatggtcaagcaagtacctgaattaactgaagaagctttcaatgagttccatagtaacttcaaacgagaaaggttttatcatgatctgttctctgaagagatcagttttagtgagataaacagatattacaaatatctaaatgaggagtgtgatttcattacaatgcataaaactaaaggctcaggtattgagaacgttttagttgtcttagatgagtacttttggaataagtacagttttaagttcagtgatgatagtacagaaacctccagtgtatttacaccccctaacatgaagttgttttatgtagcgtgttctcgaacgataaaaaaccttacagttgtaaaagtggtaacaaaggaagaaaaggagcatctattaaaagtatttcctgaatttgaagaggttccaataaatgaatga

SEQ ID NO: 72970 - DNA, 2310 bp, Thauera linaloolentis 47Lol = DSM 12138
atgccagacgcagcccccgctaccccggaatccggaggcattaagcttcgatttctggaactctgccagtttcgccggctcggcaaggtccaactagacatcgatagaaagaccaccatccttgtcggcgcaaataacagcgggaaaacctcggttcttgttgctcttcgccacttccttgcggatggagcccccttcggcgctttcgacatcagtctctcgcagtggccaaaactccgagctcttggcaaatcttgggaagcgctgacggaagacccaacaacggtggccgggtccgaagattcatggaaagagcaactccagacacttcttgcggccatgccgacgttagatctctggttcgatgcagaggctggcatgtaccactatgtcgtacccttcctttccaggttcagttggaaaggaggcgccgtcggtgttcgcttacgactggagccagccgccagcgttgatgaactgaagcaactggcctggacgtatcacactgcgcgctcaccggtaaaggatatgggggctgactcgctagcgtggcccatcgaccttcttgatttctggttgcgtgagccatcgaagctcggccaagttcgcgcatacaagctagatgcagataacaacccggtaacggatttcgcgacctacgttactcagccgctcgctgcggatgccagcccaattgagcgtaagcacctgtcgagattgatacgcgttgattttgttgcggcccagcgtgggctcggaagcgaagaggcagatttacggtctgcctcgggaccgcatcgggtcggcatgttttcaaaccagcttctcaagtttgcccgacagcacttgaacgttgccagcaccgggcacggccaccgtgcagaccttatcaaggccgtggctgaggcacagagagacttggacaagaagattcacgaagccatcgccgattctgttgaggaagtgaaggaactcggctatccgggtctgcatgacccccaagagattcgattccgcacgcgcatccagacggctgacttgctcgaccatgggactgctgtccagtacagtatgcaaaaggagtcactcgaagatctcctgcctgaatattccatcgggctcggctaccagaatctccagtccctcagctaccaactggtttcctttaaagcagcccggctcaagcctgaaaaaggttctcctgcacccgttcaccttgtgatgattgaggagcctgaggcgcaccttcatgttcaggtgcagcgcatcttccccgacaaggcacacaagctcattagcccgactgagaaagacgcgtcagccctcaaaagccagctactcatcagtacccattcgagccatcttgctcatgcggagagctttgatcggcttcgatacgttcgccgcatcgcgaagagcgcggcgaaccccatgccgacgactgaagtggtcaatcttggacaggtttttggtgatgacaaaaagacccgccagttcgcggaacgctacttccgcgttcagcacacagacctgctgtttgccaatgcagccattttcgttgagggcgttgcagagcgaatgctggtaccgctcttcattgagcgcgacttcaagacactgaacagccgctacgtgtcatttctggatatcggagggagccatgcccaccgactcaaaccacttgtcgagaagctccggattcctacggtcatcattaccgacatcgacccctccgaagaaaaggaaggcaagtccaagaagaatggtgagccgaccaagaaactcgtcgcggttgcgaacacggggcaagctggacttcactgcggcaaccccactcttcgcggctggcatccgaagctgcagcaactcgatgatttcaagaacccaactgacgctcagttggtatggaacgagaccgcagattgccttgtgcgattcgcttggcagttgcctgtcgccgaagctgacggcaactggccaagcacgtttgaagactcactcgttctcacgaatgtgccctggttcaagggcctgatggatgagaaggtcgatgaggatggcgtggagattgaagcaccaacaggggcacttggctctgtcgcaaaaagggttgctgaggccggaagtgttccagaattgctgggtgcgcttcacacactcatgcacagttcgttcgataaaggggacttcgccgcgagcattttcgaaatggtctcgtcggatgagcccgttgtatgcccaaagtacatcgcggacgccctggcctggctgcaggcgcagcttgagccaaaccaggagtcgatggtatga

SEQ ID NO: 72971 - DNA, 1950 bp, Thauera linaloolentis 47Lol = DSM 12138
atgagcgcggtccctatctttgccgataacgaccgtgatgctggggttgtcgaagaaatctgtggctatctcactgaggatcctccgcgctgctatttcctattcgccggcgcaggctccggaaagacgcgtactctcgtagaggtgctacgtcgaatgacaggcgtcgtggagcacgagaagggcagggggcttgcccgacgcctgcggatgtacgggcgctcgatacgtgtggtcacgtacacgaagaacgcggtcgcggtcatcaatgggcgcctcggggataacgacttggtggaggtctctaccatccacgcattctgctgggaactcatcagcggattcaacgatgacattcgcgcagcgctcatagccgtcaaggaagctcaacttgaaaaggaaacggcggaagcgctagcaaagccgaagggaatcacggcggcaaagcagcgggatctggatcaaatcaaggaggacatagaggcgttcagagggacgggtgtgttcatctaccatccggaccgcgagacgtatggccctggtgcgcttgcccacaagcacgtcctcgacgtaacggcctggctcctcaagaacagccctacgcttcagactatcctcaaagaccggcaccccatcgtgctcatcgatgagtcacaggacacgatgaagagtatgttggatgccttgatggaccttgcggagccaagggggagcggcctgactctcggactgctcggcgaccatcggcaacgcatctataccgacgggcattcggaccttccaagtttggtaccaccgaactgggcgacgccggaactgcaaatgaaccatcgcagccagcgccggatcgttgctctcattaacagaatctgggaagcagaactcgagggtcggacccaacctgcgaatggtgtggaacagcatccaagagccgagaacacaggtgggttggttcggctctacgtcggtgacgcatcgctttctccagaagataaggttctcggcgaacgttggtgcgcagaccagatgcgggaggcgagcggggcaaccgcctggagtcacggcgattaccagttgcttgctttggaacataagctcgtcgcgacgcgtggctcgtttctcgatgcatatagtgccatggttctgcttgacccgaatgctgccgcacctactgggagcggcgaaaacaaggggccggctgcagtacagattttattgaacgaacttgcccaactagaggcgtgcgttggtgccgatggtgctctggatgagttcaaggccacagaagttttccggcgccacggccgcctcgatgacatgcccgaggacacggcggcgcgagcaagccgcgtcgacgaaatgcttcaagccattggagttttggccgccgcttgtgcaaatccgatttcaacagtggaagaggtgcttgaaccagtcttgagggcaaagctgtttgaggttgaccatcgtctctcggcggcatacgcggacaagtcgcccccacctccggcgcccggtagaggcgacgaggagtccaaacaggaccggatgcgccgtggctggtgcgcgctgttcgcttccccttggaatcagctgcaaaagtaccgcacctacctcgctgggaattcagtgctggccacccatcaggttgtcaagggctctgaattcctccatgtcatggttgtgatggacgacaaatcggctgccggcaaccagatttcctacgacaagatttttggtggcacggaactcagcaaagcggatagagagaatgtagagaaaggcaaggaaacgactatcgaccgtacgttgcgcctcctttacgtcacctgcagccgcgcccaggagtcgctggctcttgtgctctggtcgtccgaccccgcagcggcactagcgcgagtcaagggcagcggctggtttgctgacggcgaagttgggtcgattccgtag

SEQ ID NO: 72972 - DNA, 1755 bp, Streptococcus agalactiae FSL S3-586; identical to SEQ ID NO: 72440

SEQ ID NO: 72973 - DNA, 1542 bp, Streptococcus agalactiae FSL S3-586; identical to SEQ ID NO: 72441

SEQ ID NO: 72974 - DNA, 2241 bp, Streptococcus agalactiae CCUG 44110; identical to SEQ ID NO: 72338

SEQ ID NO: 72975 - DNA, 2019 bp, Streptococcus agalactiae CCUG 44110; identical to SEQ ID NO: 72339

SEQ ID NO: 72976 - DNA, 2241 bp, Streptococcus agalactiae MRI Z1-035; identical to SEQ ID NO: 72338

SEQ ID NO: 72977 - DNA, 2019 bp, Streptococcus agalactiae MRI Z1-035; identical to SEQ ID NO: 72339

SEQ ID NO: 72978 - DNA, 2241 bp, Streptococcus agalactiae LMG 15081
atgtatttaaaaagtttatcaataaaaaattatagaaaatatggcgaagaagttcagactattaactttgcccatagtaaatggtcagaaatgtcaggtgctgaagatgaatcggaaaagataaatagaacagaagagtatatatcaaaaagttcatcattaattgtagggaaaaataattctggtaaaagtacaattgttaaattattaaatacactacaaaataccaagtcaggtagtagaaatattttcaagtatacagattttaatctaaaaatgttatcagattggtatcgttttaatattgataataaatctaaagaagatatagaaagtattgataaatctgactttcctaaactagagtttcagttgatattaggaattgatgatgaaaatgatttgatttcaagtttcgaagatatattaattttaggtggtatagaaacagttggaactcatgaaaatcaagaggttgcagaagtaactatcgatgttaaatatgaagttgctgatgttcagtctttcttagaagaacttgttaaaattaaaagtagccctcgagagaagattgaacaatatgatcaaggatatcaaaaagaacttcgataccggaaatttttaagtttatttagtagtaattactttgtattaaatttttatcctataagaagagatgaaccagccaaagaattttctctatcttcattactaaaagtagcgacaattgaggcaaatacggtaaaaaatgacaagacactttcacaagcttataataaaatagtttcaacttatataaaaaataatgatattgtggaaattgatagtttagttggtgatattaattatcaagtaaaggacatggttgataccaatataaaggatattcttcaaagtgcagtatctagcatcgagtcaactaagaatttaaaaatgaatttacatccagatgtaactttagagaagatttttgcaaatagcattatttatgagtaccaagagggaaataataacatacctgaaagccagtttggtatgggatatacaaatttgatggttattattgcaaagattgttgactatattgagttatatagtgagaaggatattaatggttcagtaaacattctctgcattgaagaaccagaatcatttatgcaccctcagatgcaggaattatttataaagaatatttcaaaagcaatagctaccttactaggtaaaaaacagcaactagatacatttcaaattatcataacgactcactcaacacatattttaaatagcaagattcaatcaggaaatactcttaacaatattagttatctaggtcaagtaggtgtaaataatataataaaaaatgtaagtgatgataaaattgcatctggtagagatattgataaaaaagcttatgaatatatcaaaaaatatttaagactagagatcacagatattttctttgctgatgcggttgttttagttgagggagtttctgaagaaacttatcttagatacgaaattgataggcattccattttgaaaaatcatcatgttaaagtttataggattgatggtgcatatgcacaccagtttattagtttgttagatttgttaggagtcagaactgttatttttacagatttagatttaaaaagatcggaatctgaaaagaaagttgatataaaggataatgctgaacctgatgttattccatctaatattcctgatttagaagaaaaatatggaggtgtagcaagttctttgactaccaatggaactatacagtattttgtaaaaaaattgttgaatgatgacaaagccaaatacgataaaataaatagtaagataattgaaatactgactgataaagaagaattggttgttgagtataataatatttccatgtattctcaatgtaaaataaataaatattatgctactagctttgaggaagcgattgttttaacgaatgcaggaaacgaagatgaaaataaatacaagaaatccttgattaaagcactacaatatgtccatcctaatatgaggtattttggtgatattgatgaaacatcagaaatagccgataaatcttatatgtatcaagttaaattatctgatgggaaatcaaaattttctactgggattgtatatttatcgataaccgataaagagtttagtctcaagcgacctcaatatgttgaatcaggtttgaatttactttgtggttattttgaggagtaa

SEQ ID NO: 72979 - DNA, 2019 bp, Streptococcus agalactiae LMG 15081
atgacatatacaattagtacagagaataaacaattagagttagacattcagaaagatattaatgagtgtttagataactttgagagcttttgttttgatgccggtgctggtgcagggaaaacctatgcattacaaaagtcaattgaacatattttgaagacggagggagaaaatttaaaattacgaaatcaaaaaatcttatgtatcacttacactaatgctgctaaagatgagattcttagtcggattggtaaaaattctgcaatactggcctctacaatccatgaatttctatgggggtttatttctattcagcaagagttactgactatagaacatgagaaaaaaattaaagaggaacttaacggaattgaacaaaagataattgataatcctctttttggcagtgttaatctggttgatttccataatgcgattagtgatgaagaatttctgaaagtattctatagtacaccaattagtcctgcaggagattttaaatctatgattaaagggtacagtgaatactttagcccctatctaagtaatgttaataagtttagcagtttagttaagaatgttgataagaagtacaaacttgaagaaacattgaaagaaattaagaataagaaatctaaaaaaatcatctataatcctattcgaaaccgtgataaacttgaaaattatgtcattagccatgatacgttattgctttactgtaggaatatcattacgagtcagaatttattaaagagattgttttcagatagatatccatatgtcttagttgatgagtatcaggatacggatgaaaaagttgtcgatataatagatagtattagaaaatttacaatttgtaaaaaaaactttgtggtaggtttttttggtgatactctacaaaatatttatagttccggagtgggaaaacttccaaataaagaagaatataagagtataactaaaatttttaatcgtagatcgtcgaaccaaattgtagagttgattgaaaagattagaaatgataattttggtcaacaatctatatatactgattttgataacggatcctataatttttatatagctgatgacgattttgacttagatatttttttacaggaaaaaaacttagttagtaatactgcttgccttttaaagaagaatgatgatattgttagggtacgcggattcgatgtattattagcaattataaaaaaatttcctagatttggtggcaataactttgataatgtgaataatgaatttttgcagaaaaatttgcagcatatgggatggtttttaagagagattcttactttcatagactttattcaaaagtcatcagattataactcaactgttaaggaaattgttcagtttataggaccgtctaaatcaacaataacattcggagagatgaaacagtttattagtagtttgagaggaattaacttgtcaacattgacaattgatgaatgtattaataaaattgctaatatccaagaacgaatatcaggtgaagatattttaagaaaaatattctcgatagatgatactactgaaaatattttattgaacattaaaaatcgtgcctatgattatttttactatttgcaggattcggaggagtattccgaaagagaaatgatagttattgataatttttttaggttagatgttactcaatttatcaagtggtataaatatatttttgatgacttaaaaaatgaggaaattagttattatacattgcatggttcaaagggattagaatttgataatgtagttgttgtattacaagataactttgctgggaagagaaattattgtaaatatttttttgaaaattataataatttaactgattctgatttacaatttcaagaagttcgcaatcttctttatgtagcatgttcaagagcaaaaataaaactttgtgtaatctacatttctgatacactggaagatgcgttaaagaatattgaaagtatttttggtgagattcaatatttagcataa

SEQ ID NO: 72980 - DNA, 1755 bp, Streptococcus agalactiae MRI Z1-217; identical to SEQ ID NO: 72440

SEQ ID NO: 72981 - DNA, 1266 bp, Streptococcus agalactiae MRI Z1-217; identical to SEQ ID NO: 72799

SEQ ID NO: 72982 - DNA, 2241 bp, Streptococcus agalactiae BSU260; identical to SEQ ID NO: 72338

SEQ ID NO: 72983 - DNA, 2019 bp, Streptococcus agalactiae BSU260; identical to SEQ ID NO: 72339

SEQ ID NO: 72984 - DNA, 1791 bp, Rhizobium mesoamericanum STM3625
atgcggctcagtaaactaagcatcaggaatttcagaaacttcaaattcgtcgatatcccgctgcacggcaatatcgtgctgcttggggaaaatcgcgtcggaaagaccaatcttctgtttgcgatccgcctgatcctggacccggcacttccggatgcagcgcggcaactgcggctgtcggatttctgggacggatgcccggccgacttcagccaaccgatcgaggtccatctcgatatagctgatttcgcgggcgacccggccctcgttgcgctcctgacagattttcgcgttgctcacgacccgagcattgcgaggctcagctacgtctttcgaaagaaggccgaggttaccggcccagcgcagtccagcgaggattgcgaatttctggtgtatggcgggggtgtcgagactcgcaccgttccgggcaaagtccgtcggcgcatagcgatcgatgtcctggatgccttgcgggacgccgaggggcagctcgctacttggcggacgtcgccgatccggcatcttcttgaggaagcggtcgctggcatcagccgcgccgatctcgatgtcgttgcggcggaactcgacaaagctacaaagagcctcgaggcatttcccacgatcaaggcgctcgaggatgaactccgcgccggtatccttcacctttcaggcaaggcgcatgatgtcgatgcgcgacttcgatttgctccgtccgacccgttgcggctctttcgggcgatcgcgatgttcatcgacggcggcaagcgcggaattgccgaagctagcctcggttcagccaacgtcgcgttactggcgctgaagcttgcagagtttgcctggcgcaggcgaaagaacgagcgaaacttctcgctgctctgtatcgaggagccggaggcccatctgcatccgcaattgcagcgatccgttttcaagaagctgctgaacgaggccagcgcggcccaaaccatggtcgtcacgagccattcgcccaccctcgcggccgtgacaccattgcgatcgatcattcagctacgaacgcgggaccgcgccacgcaggcctactcgctcgccaatcttccggtgacgccggaggaactggatgatctggaaaactaccttgatgcgacgcgggcggaaatgctgttcgcccgcggcgtcattcatgtcgagggggatgccgaggaagcgcttgtcccggtgttcgccgcatcgctcggatttaatctggacgacctcggcatcacggtctgcaacgtggcgggtacgaatttcggcccctatgtcaaactcacagaggcgctcggggtcccctggtcggtgatcaccgactgggatccgctggacggctcgaagccccctaagcccccgctgggccggaagagggtcatcgacctctggcaggacatactggcggtgcgaggaaacgcaccaatgacggcagaggcacgcgctacgtgggaagcgaagccctatgcagatctcgcgtcgacagctgcaggatcagggatcttcctgaacgagcagacgttcgaggtgtcggtcgccaacacgccggggcttctcacccccctcctcgatatcctcagtgagcagggcttcggctcaattcggacgaagcgtattgccaattggcgctcgggcaaccccgtcgatccggcgcaactgcttgcgatggtcgccgatatcggaaaagggcgattgagctcgcgattggcaaagaaatccgctggtctggcgccgccgccatacatcgaaaacgcaattcggaacgtggtcggccgtgtccagtag

SEQ ID NO: 72985 - DNA, 1782 bp, Rhizobium mesoamericanum STM3625
gtgtccagtagccaggtcctccttcaggcaatcgaggagctcagagccaatccggagcaatcgaaggccgttctggagaccggacattgcgtcgtcctcgctggtcctggaagcgggaagaccaagaccctgacgactgcgatggcgcggacgctctcggaagatgtcgtcgatccgcgtggtgtcgcctgcatcacctacaacaatgaatgtgccattgagcttgagacgcggcttgccaagctgggcatcgcgcccggcgatcgggcgttcatcgggacggttcacagcttcgcgctaagccaggttatcgcgccttacgctcgctgcgtctcgattggccttcccgcggagctgaaaatagcgacgaaggcacaggctcgggcagcggtggaggccgcgtacgagtcagccataaaggggggcgagaatccccatgaccgctggggtttcgcatccgagaagcgaaagcgagatgttgaccggacacggcccgagtggttgggccgcaacccggaactcgtgaccttcatcgaacactatgagagggaacttcgtggccagggattgatcgatttcgacgacatgccgctcctcgcctaccgcatgatcaaggaaaatacctggatccgggaggcaatctgggcccgttttccggtgctgtttgttgatgagtaccaggatctcgggcatgccctgcatgagctagtgctcctgctttgctttggcggcgggattcggctttttgcggttggcgacgcggatcagtcgatctacacgttcgccggcgctaatccggcacttctcgaaagcctaacacagcgaccggacgttgagaccatcaagctgcgattcaactaccgatcgggcggaatgctcatcaaggcctcgctgggtgcactcggcgaggagagagactatcgggaagtggctggagcgcccgaaggagaaatctccttctggggggctccgatggggctcgatactcaggccgacatgatcgcgacaagcgtcatcccgcatcttatctcaaaggggacagctcatggcgagattgccgtgctctaccgagctgcctggctcggggacaaggttgcggaagctctgaaacaggcaggtattcccttcgtccgcacggatacgaaggcgctggtgcgtagaagctcacggctggcgcggtttatcgaagattgcgccaggtgggcgaccggggggtggcatgatgccgatccgcccttctctcgcctcctgtcccaggcatcggcgctgatgtttggtagccacgtgagcgaagccgaacaggacgctttatcgcggcagctcattctgttccttgaaagctctatcggctcgccggcgaccacgcacacgtggcttcagcggttcgatcgcgaacttatcactccctggcgagcacttgcacgcaatacagagcaagagtgggagatctgcgccgaaatgatatccggcacagacccgacgaaggatctcgatcttccccttgcgcagttcgcaggacgcgcggatagcgccggccgcgtgacgctgagcaccctacatagcgccaagggccgcgaattcgacgctgtcatcatgtacggcgtcaacaatggcgactttcccaacaaacgggatcgcaagacggagttggggatgcgtgaggcgcgtcggtcgttctacgtaggcgtcactcggccacggaaagaactatgcctcgtgtttcaggagcaccatcattcgccctgggtgcaagaactgtacgaccggacccaacgagaatag

SEQ ID NO: 72986 - DNA, 2190 bp, Staphylococcus aureus CN79; identical to SEQ ID NO: 71904

SEQ ID NO: 72987 - DNA, 1794 bp, Staphylococcus aureus CN79; identical to SEQ ID NO: 71697

SEQ ID NO: 72988 - DNA, 1857 bp, Acinetobacter sp. WC-487
ttgggcatattattagatacagttagaattagtggttttcgtggtatttcgaatcttgaaatgactttatctaaagtcacggtactcttaggacaaaataatgctggtaaaacttcggtaattaaagcactacagttagcactaggggattattctcgttttttgtcggatgaagactttcatataaatcaaaatataagtgatcaaaaacaaataattattgatgtgagatttatcccgtttgaagaagaaaaaaaagagaacttttctgaagattggcagcaagcttttgaggataagatacaatcacaagcagatggtcagcaatttgtagttattcgaaccatagccaaacctgacttaattaaaggtgggtatactcttgaaagatatcatctagataattggccgagctatgatagttggcagatcacaaacgtaaatattagtaataaattaaagaaaaaactagattttattccatttatttcgattgatgctcaacgtgatattcacagcgaactaaaagaaaagtcgtcttttatcggtcgtattcttactagtatagaatacagtcgagcagatgttgcatcactagaacaaatgataactacggtaaataatacagctatcgaaaaaagtgatccattacaaaaattaaaaaatcatttagatgcattaaaccaatctttaaacagtcaggggactacagaattaacaccgtttccgaaaaagatacgagatttttcaaaaaggtttagtgtgcattatggtagctcagccgatagttcattttctatggaataccatgggatggggacaagaagttgggcatctatgctttctgttaaagccttttctgaattattagtggataaacataccgaagaaatggagccattatttccaatcatggcagcagaagagcctgaagcacatttacatccaaatgctcaaaggacactctataaacaactaattaattcacacggacaagtaattattagttctcactcaccttatattgcaggattggcagaagttgatgagattcgatacttaaaaataattgaggattcggtaaaagtatttaaattgcgagaaaattttgaaggggataatttaagaaaaataaaacgggaagtgatccattctagaggggaattgctattttcaagggctattgtactttccgagggagagacagaagatcaagtgttacccttgttatttgagacttattgtggaaaaactacttttgagctaggcataaattttgttgcagtgaatggctcaggagctaaatatcttccctttcttatattagccaaagattttgacatacctgtattcatattttctgatggagaatctaaaacagtacaagaattaaaaactaattatgaaaaagtattcggatcagttgacttgatgagctgtaataatattactatcttaaataatacagactttgaaggatatttattggaacagaattatacagcattgatagaacactctattaaactggtgaatggtgaaaattttatagaaaattggatagagcgtaaaaatggtactccattaaaacctaaaaagtcagctagaccaccatgtacattatgtaatcagcctatatttgaatctctacttagagattacagtggagatgaaggtagaaagcgagcgattcttgaaattttagactcaagtaaacctcagtatgcaaaggctattgctgaaagtttattatctttaactgctgatgaattgccacaaaaactaaaagatctttttcaacaaataactactggaattggatatgaatctctcacaaatacaacttcagatagttga

SEQ ID NO: 72989 - DNA, 1902 bp, Acinetobacter sp. WC-487
atgaatctctcacaaatacaacttcagatagttgagtctcctttggatgtacctattcaggtcttagcatctgctggtgcaggaaagactcgggttttaactgagcgtataaaatatatcttagcgaataccaaaaagaatggagtgatagctctaacatttactaataaagctgctgatgaaatgttgatgcgattatctttcgaggaaaatattcaagaaagaacatggattacgactattcattcaatgggtcaaaggattcttgaaaaatatggtcatactgttggtttacctactgatcttcatgtttatgaaagagatcaggataaaatggaaatttttatgcaatctttacgtgaagatggcatagatgttgatgaatatcttaatgtggtagattcgagagagttaaaaaacagagaaaagcagttacagaaatatttagatgtgtttgctcagattaaaagagagctacttacagagtttgatattcttgaagagtatccaaataaaaatgtatggaaaatatatgaagcttatcaagactccatgatccgtagtggaggaattgattatgatgatattttaatttacgcacatagaatattgataacacatgattggattgccaaaatttacagagctaaatataaacatatttgtgttgatgaggctcaagatcttaacaaaatacagtatgaatttatcaaagctttttgtggcgatacattaaaaagtgtttttatggttggtgaccctaatcagatgatttatggttttaatgggtcatctaatagatatctatgtgatgaatttgtaagggattttttaccaaaaaaatatgatttaaaagataactatagaagtactagagaagttattcaagttgtgaataagctaaaatcggattctcaggttgtaagtgagtatgctctgaaggggcaggtacattttaatgagtatgaggacgaaatagaggaagctaaggggattttagctcagatacaaaatttacttcaaatgagaatacatgatgaaattgaaggtgaaattacacttgataagatggtagttatagcgagaaatcgttttgtatttagtagtttggaggaggtgcttagagataataatattgtctattctctcaaaaaaggggaaagattacttgaaccatcaactaaatttgctaaaatcttagatttttctattcgaattaagttgaatccaaaggattgggttaatggtaaaaaattatgtcaactactccaattagaggaacctctaaattggaataatgatgtgttattggaattagcggataaaataaatatttcaagtgatcctaatcgacaactcttatcagaattattaattgctgtttatagtttggaagttgataatcctaaaatacctaaattaatcaaatactttcgtgataaattcactatttggattggaagacaatcaaatatttcagataccaaatatgaagatattagattgagtatccaagaactagatgagtttaatcacacatggacaatctttaaaagaaaagggataggcgactctctgacggcttttaggaatgcattggtgctaggacagctttctgaaaataactcagagaaaggtttgaccttaagtacagttcatactatgaagggattagagaaagatattgttttcttaatgggcatgtgtgaaggggtattcccagattatcgagcactttcaaaagagcaattcgaagatgagagaaatagtgctttcgttgcagtgactagggcaaaaagatggttatatgtttcttatcctaaatatagaaaaatgccttggggtgattttaagaagcagaaaaaatctagatttatgttagagatggaaaaggattattaa

SEQ ID NO: 72990 - DNA, 2046 bp, Streptococcus urinalis FB127-CNA-2; identical to SEQ ID NO: 72292

SEQ ID NO: 72991 - DNA, 1857 bp, Streptococcus urinalis FB127-CNA-2; identical to SEQ ID NO: 72293

SEQ ID NO: 72992 - DNA, 2139 bp, Providencia alcalifaciens Dmel2
atgcatatttccaaactgaccctggtcaactacaggaacttcaagaacacatctctgcagtttcacaagggagtaaacaccattatcggggaaaacggttccggtaaatctaacatcctgcgagctatccgcctcctgcttgacgacaccatggtgcgtgctgcctatcgcctagatgagtctgatttcagccgctcactcggccaatggcagggccactggattatcatcagcatggagttcgaggagatcactaccgatgaatctgttcaggcactcttcctccatggaacagctccagtggatgatgggccgattcataaggccacctataacctaatcttccggcctaaaaaagaaattaggttgaagctggcatccttgggaacgtttgaggatgaacaactctcggagatccgtgacgcaatcacgatcgatgattacgaaacgattttcacaggacggagctgggccgacttcagcaatcctgcggtatataaaagcatcgttggcgattttgatatttgtgacttctcaccagagacggagtttccagaaatcggggcaaaggtacccggcttcctttccgttacgaaagaggtatcgctgactttcatccaagccttgcgcgatgttgtttctgagttccacaacaatcgcaccaaccctttactcactctgcttaaaagcaagagtggagagatcaatccagcgactatggagccaatcaccgaaatggtccgcgaactcaatacctcgatcgaaggcctagaggatgtccagtcagttcgcaatcacattcgtgagaccatcaaggatgccgcaggtgaaacctactcgccagcctcactctcgatcaaatccgatcttcccgaagaatccgataagcttttccagtctctccgacttttcgtgggtgaatcagaggaagggtacgaaggtgcaattcatgagctgagcctaggtggagccaaccttatctatctgacgctcaaactactggagttcaagtatcagcgcgaaaagctgaccatggccaatttcctcctgatcgaggagccggaagcgcacatccatacacacattcaaaaaaccctattcgatcgcatcacatacagtgacgcgcagatcatctacactactcactctactcacatctctgaagtcagcaatgtaagcaatgttaacatcttaggccgtcatggatcgttctgcgaggcctatcagcctgccagaggtcttgagctcactcagatcaacagcatccagcgttacctggatgcggtgcgcagcaatctgctcttcgccaaaagcgtgatactcgtcgaaggtgatgtggaggaaattctgataccaattctaattaagctagtattgggagtaagcgttgatgagttgggcatcagtgtcatcaatattcgcagcacaggctttaagaatgttgcggttctcttccatgacctccgcattaagaaacgatgcgccatcatcactgatttggaccaggccttctttgatatcacggtacagacaactgatacggaaggtgtggctaaaataaagtccaaagccgctgggtcccagaaagccggtttagaacggcaggcagatctgactgagttcactgcagaaaatccatggattgtaaccttctacgccaaacatacctttgaggtcgactttgtcgcagccggtaaccatgaggccattgtccaaaccattccaaaagtttacaaggacgagggaactagggacgaggcaaagcagcaactccaatcccgagacctgcgacaaatgggccgtcgtacgctgactatggctaagcaagagggtaagggttggttcgctctcttgctcgcagagtaccttactccccaagtccagatcccaacctacatcatgcaggccattcattttgcacatggcacatttcctctcccccttatagccagaattctccaacatcgcgccgaataccgatacggttccgatgtattgaattcgccagcgaagcaggcatttcttctggtaattgagcattttgtgcaaggggatattggcttggctgaactcaggatagcaatcggacacatgctaccgggagatgctattgatgcattcttagcggagatacagtga

SEQ ID NO: 72993 - DNA, 1782 bp, Providencia alcalifaciens Dmel2
atgttcacttgggacccaagagacctaaatcctgagcaggcggcggcagtgatcgagccatcaagcatctttctgatcgcctgccctggcagcggtaaaacccgcaccctgacctacaaaattgcctacgaactatctcgtcgtactgacaagcggatcgttgtagccattacctacacccaccgcgctgcagatgagattcaagagcgtattgaggatctaggagtcgatacttcgggtctatggattggtacgatccatgcgttctgtctagagtggatactcaagccatacggcatctattccccagaacttgctcacggttaccgcgtgatcgacccgcatgatcgtgaacgcctattggagaggctatgcgctccgtataaaggtgtcactcattgggattgcgattactacattactgaaacggggtatcagcttggctgtgtagacatgggaaaacaccatatcatacatgaggttttgaaggcgtacttcgacgagctttcagcgaacagacagatcgacttcgaacttatcctttggcatgcctacagcttgatgcgggacagagcccaaatcgcagtgctgctctcacgtgtgttttcccacatccttgtggatgagtatcaggacaccaaacagatccagtacactattgtgacttccatacttcgtgcaggcagcggacagaccaaaatactcatcgttggcgatccgaatcaagctatctatggctcactgggtggctacgctatgccagtggatgaattccgtgcccgcgccgggatctcgattaaggagtttgtgctcagcctaaactaccgctccagtgagcgaattatcagctacttttcgaactacagcgttcatgcaacaaaaatcaacggcgctgggaaacatgctaagtttcccagccgggtgacctacaatcaaaacgtaacatgcagtgatgtgcatgatgagattgtaaggttgatttgtgcgagtctcgccaacggccactctcccgaaaacatctgcgttctcgctccacagtgggttttgcttgcatccacgacacgaaaactagtggcgatgttgcctgaccagcaatttgatggcccaggtctcgtccctttcagtaacaacttcgataatttctggtttaaggtctccaagattttactaacggactcctcacccagactgctcgtcaggcgaatgcgttgggcaaacgacgtaatcaaagacctcgatagcttcggcgttgacaccaaaacattgactccgcgcatcttgctgcgggaaattaacgcactcacaagcgatgaaacgaacggactccgctacctggaccaggccttcaacgctctgctcaagaggcttgatatctcccaggaaatccatcctgcgctcttgacccaccgagaggcatttttcagcagttcggcagcgcgaatagagcggctgcagaaggaaggggcgacgtacatcaatcaagtatcattcttcaaaaaagtttttcgcgagcgaaccggcatcacagtctccaccatccatggtgtcaagggcgccgagttcgatgtcgtcatcgcctttggcttattggagggcatggtaccgcacttcaatgaagcgaatggacatatcgccgcaagcaagctcctctatgtattgagctcccgtgctcgtaaaaaccttcacttgatctcggagtcaggacgacagagaggaagattcggtgtctatgcctcgaccgagttactcgcagcatgtcacttcagttataaccttgactaa

SEQ ID NO: 72994 - DNA, 1752 bp, Providencia sneebia DSM 19967
atgtatttagacagactaaacattttgcgatttcggtcttgtaatgatgtatctgttagtttttgcccagatttaactgtattggttggtgaaaataatggtggaaaatccaatgtcgtagacgcaatcagattgcttactttaccgttgagtggacgccgcgaacgatatccagaggatgaggatgtacgacgctattcgacagtcccaagttttcaaatcgaaggggctttccaaggtctaagcgatactctcaaaggtctattgatatctgcagttcccgaccctaccaagagcgaggctaccttcggctatcgatatgaatcgcgttctgaacatgctccccgtggtaagactaccgtatgggctggacgtttcgacactaatggaccagagcttggttcttctgagttgatcagacacgtttatctccctcctttaagggacgcacatcagatgctgggtactagcagcggcactagagtgatggcattgctgcgtaatttcttgccaaaagaacgggagcaggatttcctcgctggtgtcaggcgtgcggataatcggcctgagatcttaactacaatcaatacggatatcagtgctgctctcggactactcactaatggagtacgtccgcagatagcagcattggattttggtagcgaaaccttactcgatgtagctcgtgatttgagatttcgaatggccgatacaggtttgatacccgaagatattcgatcttctggtctggggtactcaaatttactctacatggccactgttgttgtagagctgactaaggccaaagaggcagacctcacgattttccttgttgaagaacccgaagcgcatttgcatccgcaattacaggtacttgtgcttgagttcctcttggatcaagcgcgccaatcagcatcacgtatcattgagccaggaaagcctgaaggtcgcatccaaattgttgtgacaacccattcccccaacttgacagcatgggtttctccacgtcacctagtggtcatgcgttcgcggcatcgtgaacaagacggaatagccatttcagaatcagttagtgtgcccattgccgaaatagggctaaagccaaagacattagataaaattagccgatatcttgacgtgactcgttccgctttgctgtttggtaacagagctatcttggtggaagggatcgcggaagcactattgttgcccgtgttagcacaaaagcttgtgctagcagatgatttagatgggtggcttaagttcaagggggctgtaattgtgcctatcgaaggtgtggacttccgtccatatgtagaggtactgctacggccatatggtgatgcacgtattgctgatcggctgatagtgatcactgatgcggacccaaccgtgttaggaaataggaaagttgatctggaaaatctggctgcaacgcatggagctccagatagtctgatcgttctaaccaatcagcatacattggagcacgaaatttttgtcgctggaaatgaaagtttccttaaaggcgtgtttcttcgtttgcatcgtaattcacgtagagactgggaagcgcagatagagagcattccagaacaagatcgtcccaatgcatttcttaaattaattggggcgaaaaaaactcgtaaaggcgatttggcacaagctatagcttcgcgcattgaggcaggtgaaccatttgttgttccgccttatctcattgacgcaattcgtggagcttcacgtatatga

SEQ ID NO: 72995 - DNA, 1776 bp, Providencia sneebia DSM 19967
atgactggcatccacaatctaaccccagagcaagagacatttgcttctcacattggcggagccttcgttaatgcttgtcctggagctggaaaaacgcggactatcattgctcggctagcgaggatcgctgctaagttgccttctcgtcagggcatagcgatactttcatttacaaactccgcggtagacgagttccgcgaacgatgccaggctgctgggctcgatacgcttttgaaatatcctagtttcatgggaacacttgatgctttcgtcaggcatttcgttatactgccaagttgtgcagtatcgagccaaactcggccgattatcctagatagttgggatacccttggtgtagaaattcgtttattaggtcaatttgcctttcgaggtgaatcggtaagcctagatttgtttgatccagaaaccaatattattgatcctgataggatcggacatgcaggtttgcaaaatcatgtacgtcaacatcagattcgatatcaacaagcagcagcaaatcggcgacgatctttgttacaagctggctatatgagtgcaggggacgcacgtgctcaaacattgcggttgattagagataatgtaattagtgagccacttgctcgcgcattggcatcacgttttcaagaggttatggttgatgaagggcaagattgcaatccactcgatctgcaaatactgacatggctcagagcacatggggtaaatgttacgttcgtttgtgatcctgaccaagcaatctacgaatttcgtaatggtaatcctcaaggaatacagacatttaaggatacataccctattgagtcgcataagggcttgacggggaattttcgtagtagtcccgcaatttgccagttagcagccaccctaaggcgagaaggtcaggttgatcggtcgcttggtgaaagtgcgaatgttgactatccaattttacttcttacctatggtggccggggaccaacggaaattattggtcaggcattccttagacgggttacggaactgggactggagtcaaccaaggcgattattttggctcactcaggcaaagttgcgttgcgggccgctggcgtcacctccagtaattcaaccggaaactcgcgaattgagtcgctggctcgtaaagtgtcagagttctggtcgcctgccgcaaccccaagaacgaaggagaatgtagtccagtcagtcgaaatattattactggatttaatgggtatgcgtcaaccagatgagcatctgattagagccatcgaacgtcttggtatggaccgacgtgctcatcggagatgtgccctaagttttctcattaatcttccaaaaatgtgcagagattctgatgaagagcggcttgcctggatagcctctgttcatgcggaactggagaagctgcatctgccactccctgctggggtaagcatacgtcgtttcttccgacagcctccgaatgcgcaatggtcaaagcatcttcgaatgcccgctgctctcggtttctcatgtggcaacatacatgaagttaaaggtcgtgagtatgatgcagtgtgcgtcgtagtccctgcgaatcgagcccctgaaaacagaattgaagcactctttgagtcatgggaagcgcgagtagatgctgaggcaaagcgcgtactctacgttggcctcacccgtgctcgtaattttgttgctcttgcgataccaaacgcctttgcagggcgttgcgttgatctgctggccacaggccaagtgccctacacaagagtggatttgtga

SEQ ID NO: 72996 - DNA, 1824 bp, Caenispirillum salinarum AK4
atgtatctgtcgcgaatcaggattgagaatttccgcaacttccgggacctcgacgttgcgcttggcggcaacatcgtcattgtcggcgagaaccgcgtcggaaagagcaatctgctctttggcctgcggctgatcttcgaccctgcgctgtccgatagcagccggcagctcggtctcgcggatttctgggacgggctggaggaaattactgccgagaccgccattactgtctcggtggagatcaaggatttcgaggaagatctggacgttctggcggtgctgaccgattatcgtcttgacgatgacccagacacagttcgtcttacatatcaattgcgtgctcagcccagcctcgatcacgccccggccaatgacgacgatttctcgttcgtctgcttcggcggcgaggatgaagccaagcgcttcggccatgatcttcgacgccgcatcacgctggacctgctgccggcgcttcgggacgccgagggcgatcttgcggcttggcgccggtcgccgcttcgtcctctcgtcgaggatgcgttcgtcggcatcgacaaggaggcgctaaaaggaatcagcgaaaagatcgcggaggcaaccgcagcggcgatcgacttcgacgaagtgaaggcgctggaagccagcatcgcagagctgtttctggcaatggccggatcaaagcaggatgtccatccatcgctcggattcagcgcgaccgacgccactcgcattaatcggcagatccgactgctgatcgacgaagggcggcgcggcgttgccgacgccagcctcggctcggcaaacctcatcttcctaacgctgaaactgctcgatcttcagcgcttgatcgcggccaacaaacgcgaccagtcattgctcgcgatcgaggagccggaggcgcacctccatccgcaccttcagcgtttggtctataagcatctttttgaggcgattgtcgatggcgaggacggtgccaatggcgacgttggcggggccgccgccgtgccgctctcggtcattctgactactcactcgccgcatatcgcaagcgtcgctccgctggagtcgctcctgcttctccggtcacactcgaacgagggaacgaagggatattcggtcgccgaagcagacttcactaaagccgacaccgaagatctcgagcgatatctcgatgtcacccgcgcggatatggtcttcgcccgcggcgtcatcctcgtagaaggagacgcggagcggtttctgatcccggcatttgcagaggatatgggcatctcgctcgacgagcatggcgtgtcggtctgctcggtcgccgggaccaacttccagccctatgcgaagttgctttgtgccctgggcatcccgttctctgtcatcaccgattacgacgaagtcgacgaaaccccccgcgcctacaatcgcgcgctcaagctcgttcggatcatcgatgaggcctctggcggtgacgacaccgacgcggtgatcaaaaccataacgaagaaaaagacctggggcgagacattcgccgaaatccagaagttcggcatctttgtgaactggagcacgctcgagaccgagctgttcgagggtgactacgctcaggagatgatcaatacccttcacgagcataactttagcgccaaacgcaaggcgacactgaacgcgttggcagcgaatccgactgatttcgacgctgacgaactgctaaagatgattgaacagatgggtaaaggccggttcgcgcaaagattggcgacgcgcgcaaccggcaagctcgtccccaaatatatcgaggaagcgatcaatcatgtcatcggcctcgtctga

SEQ ID NO: 72997 - DNA, 1797 bp, Caenispirillum salinarum AK4
atgtcatcggcctcgtctgaccattcgctgtatctcagggcagcagaggatctgcgctcaaatgagaggcagtggcaggcttatcagtcgaccggtcactgcgtgctgttagctggtcccggcagcggtaagacaaagacgctgacgatcaagcttgccagaatgctgaacgaggatgtcgatgagccgcgcggcatcgcgtgtatcacctacaataacgagtgtgcgcgcgagctagagaaccggttggaggcccttggcatcgcgcccggcgggcgcgtctttatcggaaccgtccattcattttcacttacacaaattctgctgccctacgccaaggtagctggactgggtctgcctgattcattcacagtggcgaatcgccagcaagctcgagctgccttggccgccgctcatgccaacgtcatcggtggcccggagaatccgcagaactgggagatgcggcttggccgtcatcggcgtcggttcctaaatcgggaactgccggaatggcagacgctcgatccgcagcttactgcgttcgtcgaggcgtatgaggccgaacttcgcgcagccgggctgattgactttgacgacatgccgctcctggcggtgcgtgcccttgccgagaacagatggcttcggacggcgatggtggcgaaatatccgatccttgcggtcgatgagtatcaggacttaggtcgcgcgctccaccgcatggtgatgggactctgcttcagcgcgggcatgcggttattcgcggtcggcgatgtcgatcagtcaatttatggcttcaccggcgcaacaccagagctgctgcggcggctgtccgaacgcgatgacgtcgagacgttgcgcctcggtctcaactatcgctgcggatcgcggattgtcagtgcgtctgaatatgtgctcggggaggagcgggggtacgaggcgcctcacgatgcccatgaagggacggtctattttcacccctgcacaggtggctatgccgagcaggcaagatatctcatcgaggagttgatcccggaaatccgcgagcgccggcccgacatcaatcttggtgagatcgctgcgctatatcccgcggcattcctcggcaatgaacttgccaacgcggcagcggaacatggctactcggtgatacggacggacggcaacgcgctgtatccgcgcggcagcaagctgatgcgatggctggaacaatgtgcgatgtggtgctgcggaggctggcgatcgggggcgccccggttgtctcgcgtggtgagtgaaggtgcgaggctctttcatgaagccataaccgatgaggatgagcggcttgccttccagcgcgacctcacagcagcgctatgggatcggcgggatgaaacggtcgaccttcacgattggctgacagctctgcacgatgacatcattcggtcgcgggtcagtctcacccgatcgctcgatgacgaatacgtcacgttgaacaacttcctcacgcgtatcggccccgccggcgacgtcgatgacttccctttagccgagttcgctggtatcggcagtgggctcgaccgcatcaatctttcgacgctgcacagcgcgaaggggcgcgaatttgatgtggtgatcctgttcggcgcggaggaaggtcggttgccgcgcaactacgctaccgagaacgacctccgcgaggcccgacgtctcttctatgtcggcttcacgcgcgcgaggcatgagatccatcttatgtacgggcagcacaatccgtcgcgcttcgtgactgaagtgcaggatcgccttgaaggtgaatga

SEQ ID NO: 72998 - DNA, 1854 bp, Kocuria palustris PEL
gtgagggtccgacagcttgagattgagaacttccgcggaattacagccgggcgggtgatcttccagcagcacaccttgctcgttggtggaaataacatcggtaagtccacggtttgcgaagcattggagctggtcttggggccagagcgcctctaccgtcgccccgttatagacgagcacgacttctcacacggtgattacctgggcgatgctggcgagccgcgcgagattcgtgttcgcgccgtgctcaccgacctctcggatgagcagctgcgccggttcttccagcacctccggcgctgggatgacgcggcgctctcgttcatcgacgaggaaccggacagcttccaatccgctgatcgcgatgggacctcctgggcgctccctgtcatcttcattggacgctacgaccgtgaggaagacgactttatcggggacacgtacttcgatcatccgctgcccgaacatgacgagctcgacgaagaccaacgcgcatcactcggctcgggccgcgcacagttcaaccgcgcgcacaagcgcctctgcggcttcatcttcctgcgagcactgcgcaccggatctcgtgcgctcagcttgcagcgcggttcgctgctcgacaccatcctccggctcggcggtgagggcgcagcggagatgtggcgggacgcacttggggcactgcaagaccttgatccggcgatcggagagatcgaacagctcaaggtcatccgcgagaacatccgcacgcgcctcggcaagttcgtcaacctggctccaggtgaggactcggcgtcgttcttcgcctcagacctgacgcgcgagcacctacgcgaggtcgtccggctcttcgtcgcgacgcaaccgagcaaccattcggtgccgttctccaagcagggcaccggctcgataaacctgctggtcttcgcgttgctgacgatcatcgcagatctcaaggaagaccagtcagtcatcttcgtgatggaggagccggagatcgcgcttcctccgcacactcagcggcgcgtgacgaagtacgtggtgcagcaaatgggacagtccatcgtcacctcccattcgccctatgtcatcgagcagttcgacccggagaacgtggtgatcctctctcgtgacggggacaccttctctggtgcaccaatcgacaccacgagcgttaagccgaagacctaccgcacgcagcgccgccagtttgccgaggcaatcctaagccgcgccgtgttcgtcctcgaaggacagacggagatggtcgctgtgcacgcggtctcatcggcgctcgaacaattccgggacgattactcgcacgtcgatctcactggcgtcaccctcttcaacgcgggtaacgaccgcgaagtgccgcggtacgccctgatattcaaggctcttggcaagcgggtctatggcatgcgggacaagctgaacgcccccgatgcagcgggcgcgacggagaacattaagtcgttcgacgatttttgggagtcgcaggaaacgggcatcgaacagatcctcgtgaagcaggttccgacgcgtgtgctgcggagctttctcgacgaagtcgtgcagcgcgacgactatccgacaagccatccctacgttgccgaacagattgcggacgatgacctggccgcactggcagcgaaggtactgaaagcccgcaagggtgatgcgttcggcttcgggtacaccggtacgctcatcgagcagtgccaggccgaggccgagttgcctgccttcatccgcgacgcgcttctcactatcaacgatcaactccaggacgagcctgagctgatactggacgacgctgcaccggcgaccggctccggagagaccgaggagtaa

SEQ ID NO: 72999 - DNA, 1728 bp, Kocuria palustris PEL
gtggaggtgcagctctccgagaccgcccagggagccctggatcacggctgccccgtcttggtgctcggcggtccaggctccggcaagaccacattgtctcttctgaaagcccagacgatgttcccagcgctgcaggccggccaggagatcctcttcctcagtttctcccgtgcggccgttcgtcaggttgagatccgctgccgcgacatcttgccttacgacgagcgtcgccagattgccgtgcgcacgtatcatgcgttcgcaatggacatcatgcgagcgcatggtcgcctgctcactgggcgcgcaccgcgtattatctatcctggcgaggagaacctcgctaaggccgccttcgacggcgactgggaggccgaggcagcgcgcctcgcgcgtgatgagggtcgctacgtattcggtcagttcgccgcagccgctgcccaactcgtcgctggcagcgcgtcaattgcttctctgctcgtcaacaagtaccccgtgatcatcctggatgagttccaggacaccgacgatgcacagtgggcgctggtcaaggcgctgtccgcgcgctcgaagaccatgttcatggccgacccggatcagcggatcttcgactacgacgcgcgggtggatccagagcgtctcaatcacctgcgcgcccacctcgcccctgccgagtttgatctcagcggggagaaccatcgaagcccggacgctggcatcctgcagtatgccaacgccgtattgacgaaccgacctctgccggacaccaaagacgtgatcacgcgcgcatactggccgaacgctttcgacagcactgtccacgctggcgtggtctggatgctgggctcgcttcgcaaggcgggcatcattcatccctccgtagtcgtgctggcgcgaacgaactcgctcgttggcaagctctcgacgatcctggggcaagagcacagcttcaacggccagacggtcatgccggtcgaacacgacgtgctctgggacgctgacctcactgcagcggccgccttggtggtggcctcgattctggagtggccgagtcactcaaaggacgatgcgctgggccagaccttcgatcgcatcgccgactacttcgataccaagaacgctgccagcgcgagcaacgccgcccggcaggccagcgagcgataccggacggccgcgggccgggcacgcagaggtgaggggcagcggctgaagagcaccaaggctctcactgcctcgtacgacagtggtctgacgcttcagggcgatccggcccgggattggctacgggcgcgtgatctgctcggtgctggaaacgacctatcagacttactggcgaacgccaagttcgtccgactcttccgcgcaaccgatgagatcggaagccgacttgcctcagcgtgggatctgcgcggcagttacggccgcgccattgacctggtacgccgtgcgctcgaggcaggcaggcttcaggctgaccagcgcgacccccgcggttgcgtactcatgaccatccacaaggccaagggcaaggagttcgatggcgtcctacttgtcgaggggcagtaccagggcagcttcttccgcgacaccgatacggaggcgcaacgcgccgcggcgcgccgtctgctgcgggtgggcatcacccgagcgcgacaccaggtggtgatcgttcggccgcaaggtgctccggcgcttgtgacctcagcgggtgcgtcccggtcggcatga

SEQ ID NO: 73000 - DNA, 1764 bp, Pseudomonas sp. UW4
atgtatctggctgaactgaatatccgcaactttcgaaaattgcgtgaactccagttgcgttttcaacctggtctgaatgttctggtgggtgctaataacgtaggcaagagtgctgcagtcgatgcactacgagctctgctggcaggttatgaagagccataccctcgattcggacctgaagatcggcacaggtctccggagcaggaacaggatggcgacattgagttccactacgtctttcgagagctgggacccgatgacgaggcggattttctggccgcgctcaagcccatggcaggtggccaagcagaagcacactttcatgtgtgttactcagatgccgatcaaggggggcgcttgcgagtacggcgctggtgtggcgattaccaagagctgtcgctgactgcggacatgattgaaaacctgcgaggggtctatctgcagcctcttcgtgatgcggcgcaagggatgcgtccagggcggaatagtcagctttcgcgcctgctgcacttgcttacagatgacgcgggtcgccaaggcataaatgaagcactacagcgattggacgatgagcttcggaatcacgcacctattctaggtacgcagacagcgattgctgatcgtcacaacgcgatgctcggaccgcagttgcgccaagcccttgccgtgggactgagtgcgtcagactttcaacgtctgtctaccaggttgacgctctctgtggatgatttcgagctcgagcacaacggcctgggcttcaacaacctgatcttcatggcggtggtactcagtgagcttgcccgaaactctgatgctgcataccgcggcctgattgtggaggagccggaagctcacctgcatccccaactgcaggcggtactgttgagatatctggcgagcttgcaagaggtagccggggagcagcctgttcaactcttcgtgacgagccattcacccaacttcgccagcaacgcaaatcttgattgcttggtttgcttggtagagtcggagggacgggtcgagacattctttccacgcgaagtaagatttgagaacggcaagcgggagaagctggagcgctatctcgacgtcactcgggcggagttgttctttgcccgccgggtcatttttgtcgagggggccgcagagatgatgctcgtcgatgccttggccacttcggcaggcttcgacttgcgtgggcatggcgtaagcttgatcagcgttgaggggctcaattttgattccttccttccgctgtttggcgagcgcgctctaaagattcctgtcgcattgattaccgacgccgacccatcaggagtagtggttctcgggcaaccggcccaaccgttgtatccagcattgggttccgcggttcaggtttccgacaacaccgcgaatatgctcgagcggcaggacagatacgtccgagttttccatggtgttaaaacattggaatacgacttggctctgcacccgaacaatcgcacagccatgttgagcgccttggctgaaatccacccgcagattgcccaggatcttgagggcgttgttaatgcagcccctgacgatgcagccaaggcgcgagcactgttctgtggaatgtttgaacgtccatccacccagaagaacgtgcagaaaggccgctttggtcaatccttggcctttgtaattggagagggcgccgcctgtgaggtcccaccttacatcctcgatgctattgctcatgtgtgcctggtaccggaggccggagcggaagcagaatga

SEQ ID NO: 73001 - DNA, 1734 bp, Pseudomonas sp. UW4
atgatggagccatcccccgaacagcaactcgtcatcgatgctcctctggagcctctagccgttacggcatgtgcgggaagtggcaagactgctactgcgatcctgcgtctagttgaaatgcgccggcgccttgctggggcgaaggggcgcatagcactgctgtcattctccaatgtggccgtagagacatttcgtcagggttaccaagagctttcgcagatactgcctcatggttccggtcgaaacagggttgatattgataccttggatggcttcattacgagccaaatcataaggactcatgctcatcgaactatgggggctaaccagacagcctttctagttaccggtggggagcctttcttggttgggttcaactgcccaacgcgggatcacccgatacctgtaagcgatatcaaggttcgattcaacgctggtcagccgcttttctactacacggtccatggtaacgagatgccgcttaaccagccggatgctagccgagtggttgctcgactggggcgagtgggcggctatacgcacgatctgggacgctattggtgttaccgcgtcctaagcgagcagcctgtggtacttagagcattggctcgacgctaccctcatatcatcgtcgatgaggcccaggacattggagtactgcatcaggagcttctggagcttctgatcggtgcgggcgtgcaggtgtcactgattggcgatccaaatcaggcgatctacgagttcgccgacgctaacggtctttttttgcggacctaccatgagcgagaaggtgttgttccctacaacctgactcgtaactatcgctccctgccctcgattctaagcgttgcaaaccacctttcgggaagggcagatgatcctgatcgtgatgacgagcccccacccttgggggcctacttcattggctatgacgagcaggcgcttccacatctgctggagtctttccatgcggagctcggacggcaaacaatcaaccctgatagagccgctgtcgtatgccgcgcggctgcaatggcctctaggctttcgggacaaagagatcctgatggccggggagcagtaaagctgtttgctgaagctgcagtacttcgagatcagcgctcagacttcctgggggcattcaggatggtcgcacgaggcattgtcagccagttagaaggtccacctccagggttgctcaacagactgagtggcgtcgcccatgaccgtgagttgcgcaagttgcgacgtcgactgtggttgttcactagagatgctgctcaaggtttaccagcttcgagtctgccggcctcaggccaatggcttcccctgctgcaagaacgagttgctcgtttgcttcgtgacattcagcgtgattttggcatggccgcattggatgggctgaatcgccgattaacacgcgccttactgcctgccgggccccttagaatggagcccgatgtggcggttgagcaggagcctaaggcccgtgttagaaccgttcaccaggttaagggcgaaagtatcgatgccgtcttgtatgtggccaatcgggcaaacatcgaagccatgttggctggtatggatactgaggttggccgtattggctatgttgcggtgactcgcgcccgcaatctactttggttggcggttcctgctgctgccttggttgtcttgcgaccgcaactggaacaggctggctttctcgaagcgatccatgctatcggtggttaa

SEQ ID NO: 73002 - DNA, 2331 bp, Pseudomonas sp. M1
atgcatgtacattctctcaccttcaaaaatttccggagattgaaggccgcacgcatcgatttcgccaatgacctgacgatcttcgtcggggccaataacagtggaaagacttcagccactcacgcgattgagcttttcctttcgggtggtaaggaaaagttcacggttcacgacttttgcgcgggctgctgggctgacttcgagagcttttcagccgaagacgcagctgacgcgaaggtcaaatttccggccatatctcttgatgtctggatcagcgtagacgcagacaatctctaccgagtggtcgagctgctgccccgcgccgcctgggaaggatcgctggttggacttcggatcgaattcgcggccaaggatgccgcgcagaccctagtgaatttcagggcgaaggcggccgaagcagccaagtttgcgaagaccaaggaaaaagacgggcaggattacaagccttggccgcgcaacatgcgtgactatctctcccgagagctgaagaacgaatatggcctgcgctacttcattctggatgaggcgcagctcaaggcggaaactgccgccgcggcctatacgcccaaagagattatcggtgatgctgagcgatccggacacaccgttatcaactcgctgatcaaagtcgacttccttagcgcgcagcgccacctgagcgacgggagcgctcaggcaagaacggaagacctctcgaaacggctgagccggttctacacccgtaatcagaaacaacgggaagaagatcacaacgcgctgggagcccttgcgctctccgaggaccagctcaccaaacactttgctgacgtattcagcgacacattcaagtcgctccgcaagcttggctatccgggcctggcaaaccccacccttgagatccgcgcggcgctcaagctggagcgcctcatgggcgaccagcaggcgaaagttcactacctcctcgaagaggcgactgccgaaggtgaagctctcgcgctccctgacagctataacgggcttgggttcaagaacctcatctatatgggcgttgaactcctagaccttcattcggcctggtccaccaccgaggagggggaggaagataagcgacagccgatccacctcattttcatcgaagagccggaggcgcatatgcatgcccagctccagcaggcattcgtgcgcaagctcactgacctgatttcccccacgggtgatgacggttatgcgacgcaatttgtgatcacgacacactcgccgcacattctttatgagcgcggcttccagccgatccgctactttcgacgctcgccggagaccggcgcgaagcagagctcagccattttcaacctctcggccttttacgatcaaaacgagttcgaccgagatttcctccagcgttacatgaagctgacgcattgcgacctcttcttcgcggatgcggccattctggttgaaggaaacgttgagcgtcttgtcctgccgctgatgattgagcagggtgccaagaggctcagctcggcctatctgagcatccttgaagtgggcggcgcttttgcctaccgattccgcaagctgatcgagtttctcggactaccgacactgatcgtgaccgacctcgacagcgtgcacccagcatcgtcgaagaaggaagaagaaacgacagcaggagatggcgcggccgccgaagcggcacaagtgttggacgatgctgaagaagaggacgacgatggggagcaagacgcacaagctgagaaaaagcccaagccaaagtcgaaatgtcccgccagcacgcccggcgcagtcacggcaaatcagaccctgcggcaatggcttccgggcaagtcattggtcgatgaactcctggctgcaccggctggcgacagacttcaagctcccacggcggatggcggcgcgcatgtgatggtcgcctatcagggccccgtgaatgcaacatggggcaaggatacgctcgagctcaagagtcgtacgcttgaggaggcgttcgcatatgaaaatctagtctggtgccaaaagaaggagcatcacgaggtcgggcttcgctggtccaaatcgtccacgatgtcgctcgaagagcttgccgcgaaaatccacaagcgggtgaagggtgaaagcttcaagaagacgaacttcgcgctagggcttcttgctagcagcgatgcaggctgggttgttccagcctatatccaggagggcctcgattggctcacgacgcatgtcgcgatcagtgacgacacgatcgggcgcgcgactgcgactctagagcctgctcctgaagcagccctcagtgctgttgaggctgagaaatga

SEQ ID NO: 73003 - DNA, 1890 bp, Pseudomonas sp. M1
atgacgagccgggcgggcaagccggatacgctggctgatatcgagcttcgggcacttcttgacgctgacgcttcgacgggcttcgtcatggtctcgggcgcgggttcggggaaaaccacttcgatcgtcaaggcactagatcacctacgaaaaacacgcgggccctacctacgccaacgggcaaagaagattgcctgcatcacctacacggaggttgctgtcggtgagatttggggcgacgtcgggaacgacacgctcttccacgtttcgaccattcatagttttctctgggctgccctcaagccttttcagacagacatcgcgagctgggtagaacgccggctcgatcagaagatcgctgccacggaagcgaagatcgcagccttcaccaaccggacgcaggaaaagacgcgggttcaggctgcggcggacatcgagcgctaccgcgaacagaagctaaagatcgtctctgttgaccgtttcacctacggtgttgggagtgactacccgaaagggatcttggggcatgatgacgtgatcagactgtccactgagctcatccgtactcaacctctcatcgctaaggtcgtcggccagaaattcccgttcgttttcgtggacgaaagccaggacactgctcccgatgtggttgaggcgctgaaggcaatttcggaaactctgggttcaaagttttgcctcggcttcattggcgatccaatgcagaaaatctatacagctggcgctggtgcgattgaacctctctccggatggaagaccatcgaaaagccggaaaacttccggtgccctgtggcagtcctgaacgtcatcaataacatcagagccggcggcgacggtctgacccagacaggcggtaagactgaactcgttggagaagagcgaaagcccgttcagggcacagcaaaacttctcattgttcccaaagatgaccggagcgagcggttggccgctgctcgtcaatggctagctgatcgacatgccgaccccctctggcttagcgatgagctggaagccgatgtcaaagtgttggtgatcgcgcaccgcatggccgccagtcgtctgggctttggcagtctctacgaggccttccacgacaaaacatctgaagggctgaaggatgggttcgatgatggctcgcattggtcggtacagcccttcctgaagtttctgatgccgctcgtgttggccaaaggaactgacgatcagttcgaggcgatgaatctgttgcgtcgcttcgctcctgcacttcagcgcgagcacgcacgcgcgaacgcgttgccggcgatcctcaaggagctggacgagcgggtgaatgccctcgccgagtcatgcaacgcgacctctaccgtcgctgcgttcgaagcactgaggcatcttcgggatggcaggatgtttaggctggatgatcgccttctggctgcgatggccgaatacgacccatccatttcacctacggaccccggcgacgcagcagctttgcaaaagctgcttcacactccgatgaaggagctatggggctaccggacctacattgaggagcagtcgcccttcgagacgcatcagggggtcaagggagccgagttcagccgagtcctgacagttctcgatgacgaagagggccgccacaaccagttctcatacgggaagctcttcggcatcacgccgccgtccgatacggaccggaccaacctgcgtgagggcaacgagacaactttcgaccgcacacggcgtctgctgtatgtatgctgctcacgcgcccgaaaagatctggctgtggttttcttcgcagacgatccggcggctgcgcatgctgctattgcagaacttggcctgttcccggtcgatgatgtccataatctggctatcgattga

SEQ ID NO: 73004 - DNA, 2097 bp, Cylindrospermum stagnale PCC 7417
atgaaaatagaatctataactcttaaagggtttcgctgttttggtgatacacccaagactgtaaaactatcagatggcatcacagcattaattggagccaatggttctggaaaaactgctttacttgaaggacttttgcgagtttttggcataacaggtaaacagcgaactattttgcgtactgatttctatacatctcctagtacaccagatgaagatagtagcacccgtgagttgtatatcgacattcgccttacttttccagaattgtcagaagatgcaccagtaacaaatccagcagtaccagcgtgtttccgtcacatggtagtagatcaaccaaatggtacaccctttgcgcgtgtgcgccttgaagcaaagtgggttgacgatagaacaggaggtgatggagatattgaacaaaatatttactgggttcttactgctaatgaattaccaacagacaaagacaaaagaccctgcgaaccaaccgaccgtggcaggattcaagtttattatgttccagctatacgtgatccctcatcacaacttatatctagtagtggtgcaatgatagggcgtttacttaaagccatagaatggacttcggaaacaaaggagtctattgaaactgcatcggcgcggattcgagaggtgttcggaaaagaattagcaataaatagtatcaatcagacaatagcaagtaggtggaaagaacttcacaacgatacctttgatgcagaagcggagttcaacgttgctagcagaaaatttgaagatataattcgcaaattcaatattgtattcagcccaaatgaatttaatggcgaacgtgatttagatgctttgagtgatggacaaaaatcgcttttttatttttcattggtagcttctatttttgaggtagaaagtaaatttattaatcaaaatattgctataaaaaatacaaagaaaatagatgatcaggaaaatcccgaaaatactgatgaagacaagccttcaagaacaggttttaattccaatcgaatccaaacaccgattttaacaatttttgcttttgaagaaccagaaaatcacttagccccttattttctgtcacgtattatcaaacaagttcagtctatagttaatgagtatcctgctcaagccatattaacaagtcattctcctgcgattttgggaagaattgagccagagcaaatacgacatttcaggcttgatattaaatcaagaaatgcaattatcaaagaaataacacttcctagtcaagcagaagaagaagctaaatatctacgtgaagcagtaaaagcatacccagaattgtattttgctaaatttgtgattctgggagaaggagattctgagcaaatagttctgccaaaattagcttcagcaatggaattagaagtagatcctgcatttgttgctatagtcccattaggaggacgccatgttaattacttctggaaactacttaatgaccttcaaatcccatacgctacacttttagatttagatattgaacgaaatggaggtggctggggtagaatcaagtacgctttaaaacaacttcttgagataggaatagatgcagcatatcttcttaaatttaaagttgcagaaggggatgagcaggaaatatctcatgcaagcctagaaacacttcacacaaataatgagccaattgacgaaaatcacccttcaatcaaaatacttgaaagctttggtgtattctactctgcaccacttgatttagatatgataatgttatcatcctttccggatgcttacaaagctattattgacaacagatctagaccaagaattcctgataaaaacaatgccaactataacgatgacatggatggagtaaaaaaagctgttcttggaaaagatgctaatttgtcaacatattcagaagaactacaggaattacttccttggtatagatatttatttcttagcaaaagcaaaccatcaacacatcttcaggcattgtgcaaaattgataacaaagacctaaaacaaaaaacgcctcctgtattagaaagactcttaaagcatacaactaaagaaattagtgcaaataaaacattatga

SEQ ID NO: 73005 - DNA, 1890 bp, Cylindrospermum stagnale PCC 7417
atgacttttattatccaaactaaaaagtgggttccagttggaaatatgacacttgaacgtaatgcttatgaagtagtgtgttcaaatagtaactattctataattgctgggccaggagcaggaaaaacggaactacttgctcaaagagcttgctatcttttccaaactggtttatgtcctgatccttatcgtattcttgcaatcagttttaaaacagattctgctaagaatttaaaggaaagagtagctgagagatgttctaagcaagatgctatgcgatttgattctctaacctttgctgcatttgcaaaaagtatgttagatcgatttatgggagcattgcctgaactttggcgaccaaagtataattatgaattatactttccgaaagattctgaatatcaagcttttttgatatctcttataaaagcagcaccaaaaaattttattaatttacaaaatttaaaacctaaagaatttgaaaaagattgggttctcggctcaacgctcccattagagggaatacaaacaacatgtatgagagctatagctgcaaaagaatggtggcatgcttgcttacaccttgggaaaaagtccaggcttactttccaaatgattgaaagattagtagaactactcctgaggacaaaccctcaaattactaatgcattgagagggacttattctcatgttttcatggatgagtttcaagacacaactcatactcaatatgaccttattaaaacatctttcctcaattcacaagccgtattgactgctgtcggtgacaacaagcagcaaattatgcggtgggctatggctatggatgatgcttttagcatctttgagaaagattttcaagcaaactcaatttccttaatttctaattatcgctcttctccagaacttgtacgaatacaggatctattagctataacaattgatcctaattatacgcaagtagaatcaaataaagagaagaacatagctgaagaggcttgtgtaatttgggattttgaaacacaaacattagaagcagaacatttagcaaaaaccatatctaacgctatcaatatttatcaattaaagccgaaagattttgtattagttgtcaacaaactcgcaagaagctatgaaccatgtttaacagaggcgttcaaaaaatatgatttaaaagtacgtttaacattaccaaatgatatccttgataaggagcttactgaaatttttattaacttcctgcgttttggttctaaagaaggtactaacccctactggtctgactgtaacaaaattctcacaagtatttatggtatagatccagaagatgttagaagtacaagagaattacaagataaactggactcattccacttatctttacaaaataaaatgactaacttagattttagcgacgatacacaagtaaattctatcctggcagatatcgaaaattttattggaaaagattatatcaagctttcttatccacaatatcagcaaggtgacgaatatgagaaagtaataaaagcaattagtaatcaacttcaaaccagtcatacaaacagtacagacaaagcatggaaatcaatattagacgattttgaagggattgattctgtgccattaatgaccattcataaaagtaaaggactggaatatcacactgtaattttcgttggacttgaagactcagcatggataaattttaaagaacaggctcaagaatcacgttctacattttttgtagccttctcgcgtgcaatgcaacgtgttatatttacttactgcaaacagcgtggtgctagggataatactagggatgatatttcttctctttatcaagtactacagggtgcaggagtgaaaactgagcaaattcaggtttaa

SEQ ID NO: 73006 - DNA, 1980 bp, Brevundimonas diminuta 470-4
atgtttattgaacggctcagtctaacgaatttccgttgcttcggacctgaagcgacaagcatcggcctcacctccggcctcaccacctttgtcggcgtgaatggcgcgggaaagacggccctcatgcagagcctgcagcggctcttcggggtgaccggcgatcagcgtcgccttcggcgtcaggatttccatgtccctgccgccgagctcgtcgccccgcttcagcgaagcttcgtgctggaggcgatcatcgctttcccggaactggacgccgacggctccggcggtgcagcgatcccggaattcttccaccagatggccgccgaagatggcgggaagctgaaatgccgcctgcggctcgaagcgaactggaccgatgacggctcgctcgacggagcgattgaacagaaatactgggccgtcaggacgttcggggatttcaccgacggcgattgcaccgagttgaaagccatcgaccgggcgcgaatccagatgatctacgtgccggcgacgcgggacggcgcctcccaggtgacggcttttctgcgcggccggctgtggcgcgccatcaactggtcgcagggtgtccgcggcacgttcacgaacgccggcgcggccttgaacggcgctttcgccggggagccggccgtagacgtaatcgccgcagcggtgacgcggcggtggcaggaagtctacaccgccggaaccgacacgacgccggtcttccgcccgctcgatctgcgcttcgagcatttcatccgcaaagttgaggtggtcttccgtcccgacgaagcgggacgggaacgagccctcgacgacctgagcgacggccagagatcactcttccacttggcgatgaccgcggcgacgctggatgttgaagccgggatcgtagcggatcccgccggggccggtttccaggccggcggcgtacccctaccagcgctcacgctcatcgcgatcgaagagcccgagaacaacctcgccccattctatctctcccgcatcgttcgacagattcaggacctgacgaagtcgccgcaagcgcaggccgtggtttccagccattccccgagcatcctcgcgcgggtggatccaacccaggtccggcacttccggctcgatccgcatgagcgatcggcccggatccgcccgatcaaccttcccgtgggcgaggaagaggcgtccaaattcatccgcgaggccgtacgcacctatcccgaactctacttcgcgcgcttcgtcgtgctgggagaaggcgcctcggaagaggtcgtgcttccgcgtctcgccgaggccatgggtctcgacatcgaccgatcgttcgtcgcggtcgttcccctgggcggtcgccatgtgaaccacctctggcggctgctgaccgatctcgacattccccatgccaccttgctggatctcgactggggccgagccggtggcggatgggggcgtatcaagaccgcctgcacccagttgctcgccaacaacgtcacgcctcaggcaatattcggacagcacctcgacccgcttggccctgcggcgaacctcgtggcattcgacggtttacccgtgggagacacggcgagtcttatccactggatgaactggctgcgtcagttcaacgttttcttctgcacgcctctcgatctcgactattccatgctttcggcctttcctcacgcctatcaggtcatcgaaccgggccgccaggggccatcgcccgccggcgagcctcgcacatccgttctgggcgacgacggccagcctcatctctacgatgcgagcaacgacgccctgatgcggtggtatcgctatctcttcttggggcgcggcaagcccagcacccacgtccgggtcctaagcgcccacgactcggccgccctcgcggtgggcgcgcccgaagagttgcgtgcgctcctcacttcgattgtcgcgcgtctgacgccgccgccgccgtcgttgccgcccgtaggcccgtga

SEQ ID NO: 73007 - DNA, 1884 bp, Brevundimonas diminuta 470-4
atgcgcctcgttcggccagaggactggcgccccagcggcatcgacgatctcgaaccggcggcgtggaacgccctgcgtcacgccggctcggcgtgcgtggtcgcgggccccggcgccggcaagaccgaattcctggcccagcgcgccgactatcttctcgagaccggtctctgccgagcgccgcaccgtgtgctggcgatttcgttcaagaccgacgcggccaacaatctcgcctcgcgagtccgccagcggtgcccgcccgagttcgcccgccggttcgtgtcggtcaccttcgacgccttcaccaagagcctcgtcgatcgctttctcaacgccatccccgcggattggcgtccgacccgaccttatgagatcgcctttccaaaacggaaggcggtggaaggcttcttgacgctcgcccgcctcaatgcgccgccgcaatggcaggccgagatcgccggctacagcgcggacgactttgaaaccaaaatcgtgggcagctatcgcttaccggtagggcccatcgtccctcagaacgccgccgagttcaccatcgcacgctggtgggcgacacaactgcggccaggacaaccttctctactcaccttcatcggcatcaatcggctcgcggagctgctgctccgggccaatccccacatccgccgggcgctcgtcgccacctaccccttcgtcttcgtcgatgagtttcaggacacgacctacgcgcaatacgactttctaaattcagcgttctcaggcgggcagaccatcatcaccggcgtcggcgatgacaagcagcggatcatggtcttcgccggggcgcgcaaggacgcctttcagcggctgcagaccgacttccaaggcgcccgctttcccctgctcttcaacttccgttcctcgcccgacctggtcgcgatccagcatgtcgtcgcacgcgccctcgatccgaacaccgtccagacggtcgcccagaccgtgcgccaagtgaatggggacgtggctcaggtttggtccagccagaccatggccggggaagccgcctatctggcgcaatggatcgccaacgacatggccgcgcgcagccgggcgccgcgcgactacgccctcctcgtgaagcagaagtccgatgactatgagcaggagctcgctgcagccttcgcgaatcagggtctgcggattcgtaacgagagccatgctctcgggaaaacctcgcttcaggatttgctctccgacgagttgagccggcttgggatcgcgatcttccggcttggcgcgtcccgccgggcgccggccgcttggcagctggtctcgtcgtccgttctggcgctacgcgccgtcgggcaagccgatgacgtccgcgcggccaaggtcgagacagagctgaccgccttcctcgccgcgctgcgcgctgacatggccgccacgcccccgtcggagcagagcgccgtcgacttcgcaatgagggtttttaactatctggacttggatgcgatcgcccggacctatgccgaatatggcgtcggcgatcagctccagatcatcctcgaagcgttctgcatccacttcttccgttgcgccgacggcgcgccggactggacctcatgcctcgacgttttcgaggggctcaatcagatcccgatgatgaccgtccataagagcaaggggctggaatacgacaccatcatctttgtcggcctcgatgaccgggcttggtggtctcacacccccggcgaccccgaaggagtcgctgcgtttttcgtcgccctctcaagggcgaagcagcgcgccatcttcgccttctgccaacaacgcggaaaccgaaacaatgtggctgaactctatcagctcctcacggccgccggcgtacccgagattgcggtgtaa

SEQ ID NO: 73008 - DNA, 1881 bp, Brachyspira pilosicoli WesB
atgtatataagagaattaattataacaaattataaaaatataaaaaatgtaaaaattgatttacaacatgaatattccatgatttacctaacaggtgaaaacggaataggaaaatcaaatatcatagacataatatttaaattatttacatacaaaaaaaatttatttgaaaaagaagacttctataaaaatgaagaaaaaattgaaatagaaataaaacttgaattatatactgatgaaatatttaaagattacatttataaagataatgataagtattttatgaaagtagtatataaacaatatagtagtaatgatgaatatgaatggttttataaaaatcttacagaagaatataagttacataataatatattaaccaattttatctgctataaatacagtccaagagaatttgataataatttcatgtttaacaaatcaaatagaataggaaaatttatatcaaaaataatagaaaatcaaataaaaaaatatcaaaatgatgataacgaattacaaaaattattaaaaaaaaattataaaaattgtaaaaatgaactaaacaaaatatttaaacctatatttaataaaccaaatcaagaattaaaattaaatattgaaattgatgatgaaataaagtttttattaaaattatttgaattagtacattatcataatggtgataataaattatatttaaatcaattaggaagaggaagaggatattatctatatccatttatagattttttggcatttttatatgataaaattaataatacaaaatctcaaggttttaatactaatattattattttatttgatgagccagaagtatttttatctccatttttacaacgtcaatttatggatcattggttatctatatttaataataatcaagactacaaaattattaataacattataaatataataactgatgataatgaggaaatagactataaaattactcctatattttttgtgtccacacattcagcacatataataccgcatttagaattaaataaaaaaaagaatatattatctatacaaagactttattatgatgaagaaaatactgttaaaattgcatctcttgataaaaaagataaattaaaacagtttataatttttgatagaaatatattagagggactttttgctaaaaaaattatactggtagagggtgatacagaagttggatttttaccttcttgtttaaattataatggtattaatattcatcaagaacatatatatattattaaagcggcaccaaataattttccaagtctagcaaaaatattctcaaaattgcaaataaaaacatatatacttacagatagagattgtaaaaataaagagataaaagagcaaagaaataacaaaatataccaaatatatataaatgaagaatatggatatgttaataaaagggtttatgatttatacgaaagtataaaaaattgtaataatgtaaaaatgtttgtgtcagattattgggattttgaggaaagtattttagtatgtctaaaaaatcattttcaaaaaatatatattagcattagtaaaagtaaaactaatgataaagataaacttattgaaaaagtacaagatgaaaattcagatgaagaatttactaaaaagttattatatatgagagataataataaaactatagatgataattataaattaatccaaaaaataataaaagaaaatttaaaactaaaacaaaatgaatataaaaacgtagaaaaaatagattgtggtaatatgaacaatgaagctatcaaaaatgttgctgaggaaaattataaacttcctaaatatataattaatttaataaaagaattaaaaaatgataaataa

SEQ ID NO: 73009 - DNA, 1608 bp, Brachyspira pilosicoli WesB
atgataaataatgataaaattaataaaatattagaaaaacacaaaaatgataaagaacagttagactttataaaatctacagaacaatctcttacaattgctcctgcgggatatggtaaaacagaaatgttaatctcaaaacttaactatatcatagaaagtaaacaaattaaatatccaaaaagaattttagttttaacattatctaatgtggcaaaacatactattgaaagcagattaaataataatcaatttgtagacatatataattttcataatttagcaagtagaattttaagacttcaaggtaaacaatatttaaatattgattatcaatatgaatataagcactataatcttaaagataaacttcaagaaaagtataaaaatgataaaatagaaaaaatactaaattattatagagaaaaaattagtgaaattaataaaaaatttcatgaaataaaatttgatgataaaatatttcaatatgtagatactataaataacaataaagaaatatgctatgaatatgtaatatattttgcaatagttctattaaataatttcaatataaatgaaatatataaaaatttatacagttatatttttgtagatgaatgtcaagatataaatttactgcaccttatcttattaagaagtattgctgataatgaatataataaaatattttttttaggagatacatttcaatctataatgaaatttgctgatgctttaggagaacaaattgaatatttattaaagcaacattttaatataactaaaattatagaattacaaaaaaattatagattagaaggaagagaaaatatatctaatttccaaaaaaatattagaaattatgataaaaaattacaaatagaacttgatgaagattttcaaataaaaagttttaattactttgaagaagagatatcatttattaataatcaaattaataaaattatttctgaaaataaaaaagctaaaatagcaatacttttttctaatcaattttattttaatgatgataaaattttaaatttgttatttgaaaatttaataaaggaaaatatagaatacataaatatattaaaaaccgaaaaagaattaaatacaataatgaaaaatgtattcaatatagcaacaaatataaaaatattaaattataataatcttcttaagaagatacaaaattattatgataatgacatatcaaaattaatagaaggttatagaaactattgtttaaagtttggaatagattttaatacaataatagaagttctaaaagaaaaagatttaataaaatatgccccttattgctctgtaaatgtaaatatattaaatatacataaagcaaaaggggcagaatgggattatgtttttatcccatttttaaataaaaaacaattcatatataaaaaaaattgtaataaatgtaataatatatgttacaatcatataattgatataaatgaagaattttatcaagctttttatgtagcaattactagaacaaaatatggtttatatataacatcaacaaaaaataacgcttcttgtttattttatcattcattaaaattaattaagaatatttattaa

SEQ ID NO: 73010 - DNA, 1986 bp, Pediococcus lolii NGRI 0510Q
gtgattatagaaggctttcgatcatttggtaaaaaaacagaaattaacattgacgactttaatacttttatcggaaataatggaaccggaaaaacaactactttacaagcactaaataaaattttttcaactaatccaaaagatagaattattgaagcaactgacttctttgtgtcaccccaagaagaaaacgagcagacaacaaatcgggatttaagtatagatgttatttttgggattagtacagaaaaacttgaaaatgatggacgtgcagcggctatttttttgaaaaatatgacaattaatagcccagaagatgaaccgtatcttcatattcgacttgaagctagttggacatctgaaggtggtgcaagcgggacagttgactataatacttactatgttgatagagaaaataattcaaccattgcttcacgtttgcaacttaatagtttaagaatgatttatgtgcctgcagtcagaaatccaacacgtatactaaaagatagttctcatagcttattatcaagtttaataaaaaatgtagtgtgggcagagcagacaaaagaaaaaattaataacgaaaacaaaaggctaaataatgatttcctaagtgaacgtggtatggcattaattaatgataaagtacgtaaaatttgggacgagttttgtcctgatgaaagatatggcggagcaaaattagaaatttcaccgactgatctagtagcgatgagtaaacagacgcaaattgtttttaattcttcgaacgtagaacataattatcaaattgatgaaatgggagatggatcacgttctttattttatatatcaaccgtgaaaacggctcttgaaattgaaaatgaacttattgatttagaagcagaaaatgatccgattataaacgatactcctccattgttaacgatggttgcaattgaggaacccgaaaatcacatttcaccacatctattaggaaaactaatgaacaggttgctcgaaattgctaaattaaaaaatgctcaagtactgctcacatctcattcaccggcaattgtaaaacgagtagacccactaaaaattcgtcattttagaataaaatctagagaaaaatatacagaagttcataagttatcgttgccaaacaaagaagacgaagcatataaatatattaaaagagcagtccagacatatccagagctatattttgcacaacttgtggttttaggtgaaggagatagtgaagaaatcattttgcctcgattttttgaggctaaaaataaaaatttagatgaagctggaatctctgttgtcccgcttgggggtagatttgttaatcatttatggcgattgctaaatcagttaggaataccatatataacgcttttagacttggataaagaaagaaaaggtggcgattggcaacgtattaagtacgtcattaaagaattaaagaagttaaaagaaaatgatgaagagctaaatgaaaaattatcagtatttgaaggccaaaaagttgtaagtagtgaaaaagatttaaaggaagcaatagatgctctagaaaataaaaacattttcttttctgcaccactagatattgacttcatgatgctaaaagcttatgggggcttttataaaggattacttaatgatgatgagggacctagatataaaaacaaacaaggtaaaaatgttaaggttcctaaaaagaatacaaaatctttagaagaagattttgtgaaaaagatagaggacgcagtagcagaaacattaaaaaaagatggtggtactggtgaatcatataatcaagaggaacgtgaattaatgatttggtacaattacttctttttaggaagaggaaaaccttctacacatatattggcactatcaagtattgatgatgaaactttaaatactaacatgccaaaagtaatagaacggttacttgttaaagcagaatacttactagaaggtgaaaatgaaaaatga

SEQ ID NO: 73011 - DNA, 1818 bp, Pediococcus lolii NGRI 0510Q
atgataaaagaagtgtggaaccctcgaaatggaataaaattagaaaaaaatgctaaaaaggctgtattttcagaagaaaatactcttatattagctggtcctggcgccggaaaaactgaaatgttagcacaaagagcaagttacctacttgaaactggaaaatgtcaaaacccatatagaatcttagcaataagcttcaaaagagatgcagcaagtaatttaaaagagcgagtgaaagagcgtactgaaaagaaaaataatatacggctagattccataacttttgatagtttttctaaaagattagtagatcaatttataatggcaattccactaaaatggcgaccgccaaaaggatatacaatagaagattcagaaataaaggaaacaatttataaaaatatagaaaaaccagtatataaatattcaagaacaacaataaataatttttttgacaaaataaaaaagccaactttagaagaagaacccgatggagtatggcaactttctctaaaaggaacagaaaatttaaaaccgaacttaacatttaaaatgatcaaccagctcgctattttcctacttcaaacgaatcctaatattaaacgtttaatacaaaatgcatacccatttgtttttttagatgagtttcaagatacaacagcacttcaatacgagttaataaccgaatgctttaaagatactactacggttataacagccgtaggtgatacaaagcagaggattatgggctgggctggcgctcttaaaacaatatttaaagattttaaaagggacttttcagctaacgagttgtctttgaaaatgaatcatcgctcagcacccgcattagttaaattgcaagaatcagtttgctttttattagaagaaggtattgaaaatattagaacttcagaaaaatggggaaaagaagacggggagataaaattattcaaatctacgagcgaagaaaatgaggctcaattagtaggtgatgatatattaaaaagattatcgaaaggattacggcctgaagatattgttattttgtgtaaacaaaaaccagacgtatatacaaagtgcttaaaaaattacttggaagaaaaggatgttcaaattagagttgaagatccatatcaaagtttactcaaggagcccgtagttgatttaatattaaaaactatttcagcagcggataatactttggaatcgaaagaatggcaagaatacattgatatagtgtgtaaaatcaagcaaattacaacaagtgaaaatgatcggcagtttggagagtgcttaaaatcgttaaatctttttttaaaaagtttcaaaaaaaaacttactggtgctttagattcagaacaagtcaaaaaaataaaaaatgaaattatgagttattttaagactgaaagtatacaagaagcttttccagaatatagaaataagtcttatcttgatagacagcttgaaaatttttgtgatctaattataaaaaccaaagataatgctacaaactggcaggatataattgataacttcaaaggaaaaaatacaatttctatcatgacaattcataagagtaaaggattggagtatgaagcagtttattttgtaggattagaagaccaaggtttttggaactttaaaaaacaacgagatgaagatataagggccttttttgttgctatatcacgagcaaaaagaattctagcatgtacgttctgtcaaaaaagaaatatcgacaaggtaaagagaagacatgatgaaattagagagctttataaattattagatgacaatgcagaatttatttgtgattaa

SEQ ID NO: 73012 - DNA, 2109 bp, Pseudomonas putida CSV86
atggccatacgatttcacggtagggacatcatgcggatcgagcgcgttgagattcaaaatttcagactgcttcagaatgtcagccttggcctagaagacggcacgacgctgattgtcggacgcaacaactgtggcaaaacctccatcgctgaggtgtttcgtcggctcctttcagacagggctccctctttcaggcttgaggatttctccctgggaagtcacgaagagttttggacggccttcaatgcatttcacggcgagatagcccgctccgatgttgccgccatgcttcccgttgttagggtcacactggacatttcctatgacattgatgccccagatctggggccgctcagcgaatgtatcgtagacctagatccagattgttcttgtgcgcgcatcgtcttgacctatggaccacgggcgacagcccttgagtcgcttttcgcggaaatcattgctcccaacgcggagcagggggatcaacgtcctggctttttcagcctgataaagaaacgcctggccgcggcctacgagcctcgcctggaagcggtcgaccccaacgatcctacgaaccgcaaggacctcgaccttaaagcactcactacgttgatccgtggcggattcatcaatgcgcaacggggcctagatgacgatacacaccgagagcgcgatgttcttgggaaggtggtggaggtactgttccaatcggcattgaccgaccccacagatcccgagaagcgaaccacagccgaacagctccatggcgcagtggagaagattcaaaaggagctgcatgacggtttcaacgccggattgacctcgctgctccctacgttcgagcttttcggctatccaggcttagatgacccaggcctcaccaccgtgaccactttcgatgtcgagcgcctgcttaaagaccacacgcaggtcagatacaggggggtaaacggcctgaccctcccggaaagctacaacggactcggcgtccgtaacctggtgtacatacttctgcaattactgaaattcttcagggagttccaagctacgcccgcagcagcaagcgtacacctaatcttcattgaggagcctgaggcccatttgcatccgcaaatgcaggaggtcttcatccgacaattgcacctgatcaagggcgcgttcgagcagcaactgaatgacagccgtccttggccagtgcagtttgtaatttctacccactctccgcacatggccaacgaagcgcgcttcgaaaccatgcgttactttctctctatgaccgatgaacacggaattcggcagtccaaggtcaaggacttgaggtggggtatgggcggggctccagcaccggacagagattttctgtatcagtacctgacgctcactcgctgcgaccttttctttgcggacaaagccatcttgatcgagggaacatcagaacgattgctgctgccaaccatgatcgccaaaactgatgcagctgcggtcggtgagcctcagctggcaagtcagtatttgacggttatggaggttggcggcgcatacgcacatcggttccatgaccttcttaatttcctggaactgcgtacgctgatcgtgactgacattgactccgttaagccgaacgcagagagaaaacgaaacgcctgtcctgttgcggaggggctgtacacgagcaatgcctgcctcaaagactggtttgaggccgaagtcactcctgcccaactgctggcgaaaacgtcagcagagaagaccagaggattgaggcgcatcgcctaccaaattccggaggggaacgaacccgggccttcaggcagaagctttgaggacgcgttcatcctggcgaaccttgatcgatttcagctggggcagggcgatgtggcatccctagcttacgagcatgcggcggaccagaaaaagtcagcttttgcgttgaaatacgcgatcgatgatacgaactggaacgtgcctagatacatcgctgaaggattgcgttggctcgcagtcggggcgccggtcgttgatacccaaatggctgctcggaccatggccgcagtggttgaggttgttggcgaagcagtggccgctgaaggagggcaaggcgatgcctga

SEQ ID NO: 73013 - DNA, 1755 bp, Pseudomonas putida CSV86
atgcctgacattcaggaaagccccgcggacagagcagggcgagaagctctggagcgcatgttcgcttgtttggacgaaggtcaaagctttcgcctggaagcaggtgctggagctggtaagacctattcgctggagaaggcactgagtcgattgattgagcaccgaggtccagctttgatccgggagcgtcagcaagtcgcgtgtatcacttacaccaatgtggcaaaagacgagatcatctctcgcttccaggcgcaccctgcaattcaagccgagactgtgcatggtttctgctggtcattgctcagagactttcaatcatcactgagagcattccttggcgcagaagctttttggcaagatcgctttgaaacggtgggaggcgtaggcaacaggcgcatccattacgaaatgggtattccacgcgtatcggaggacgaagtctcgattcggcacgaagatgttctgaccttgatggttcaggcgcttccgtctccgaagtttagggccgtattgacgtcccgatatccgatcctgtttgtcgacgagtatcaggacacggatgagcattttgtcggtgcactgaaatcgtggtttctagatcgcggtgaggggccgatgattggcctgtttggtgaccattggcaaaaaatttacgatgagggctgcggcctggtagagcatgaggcactccagccgatcgaaaaaaatgcgaattttcgctcggcatcgcggattgtcgatgtgttgaatcagatgcgaccaggcttgcaacaagaggtaagagatccggacttgatcggtgaagcccgggtgttccataccaatcgctggcctggagcacggcgcacgggagccgggggtggacactggactggcgacaccagccctgaagcggctcgtgcttacttcgaatgcttgaaagttcagctaaacgtcgaaggatgggacctctctccccagaagaccaagattctgattttgaaccacagaggcattgctcgtgagcaggggtactcctcgatccctccgatttttggacagttcaacgatccctggctgaagaaggaagatccccatatcaagtatctggcagatcagcttgagccagcatgtgtcgcatatcaacagcgtagatacggcgccatgtttgggcacctggcaagcgatcggccaacgattcaaaggcacagcgacaaagtcgcttggactgaggcaatggaggcgcttctcgaactgaggttgaccggtaccatcggcgaggtgattgaccacatcatggccgtaccgcagatgcaactccccaatgcggtgctacgaaatgagcaagggttacaggacgccggtgtagaaccaggtgaggacgagccgcgcaggattactcagcttcgaaagctaagggaagttccttactcggagctgatagcgctggaccaattcatcgatgggcatacgccgttcgcgacaaaacacggggtaaagggagctgagttcgaaaacgtgatcgttgtgctgggccgaggctggaaccaatataatttcgctgaaatgcttgagtggtttcagccggggccaccggcgaacaggcgtgagaaattcgaaagcaatcgtaacctcttctacgtcgcgtgttctcgtcccaaagtccgtttagctttgctttttactcaactgctaagcccggcagcgctagctcagatcacagcctggttcggcgctgagcatgtattcgagttgcctgcgaaccctggttga

SEQ ID NO: 73014 - DNA, 2139 bp, Cronobacter malonaticus 507
atgcatatttccaaactgactttggtcaactataggaacttcaaaaacacgtctctccagtttcacaagggagtgaacaccgttatcggggaaaatggctccggtaaatctaacatcctgcgagctattcgcctcctacttgatgacaccatggtgcgtgcagcctatcgactagatgagtctgatttcagccgctcactcggtcaatggcaaggccactggatcatcatcagcatggagttcgaagagataaccgccgatgaatccgttcaagcactctttctccatggaacagcttctttggatgctgggccgatccataaggccacctataaccttatcttccggcctaaaaaagatatacggctgaagctggctgccttggacatctttgacgatgagcaactcacggagatccttgaggcaatcacaatcgatgattacgaaacgattttcacaggacggagctgggcggacttcagtaatccttcagtgtacaaaaaaatagttggcgatttcgataattgtatcttctcatcagagacggagtttccagaaatcggggcaaaggtgcccggtttcctttccgttacgaaagaggtatcgctgaccttcatccaagccttgcgggatgttgtttctgaattccacaacaaccgcactaacccgttattgaccctgcttaagagcaagagtggagaaatcaatccagcgacgatggagcctattaccgagatggtccacgaactcaacgcctcgatcgaagggctaaaagacgttcagtcagttcgcaatcacattcgtgagaccatcaaggacgccgctggtgaaacctactcgccagcatcactttcgatcaaatctgatcttccagaagaagccgataagcttttccagtctctcaggcttttcgtgggtgaatcagaagaagggtacgaaggggcaatccatgaacttagccttggcggagccaatctcatctatttaactcttaaacttcttgagttcaagtaccagcgcgaaaaactgaccatggccaatttcctcctgattgaggagccggaagcgcacatccatacacacattcaaaaaaccctattcgatcgcattgcatatagcgacgcgcagatcatctacacgactcactccactcacatctccgaagtaagtaatgtaaaaaatatcaatattttgggccgtcatggtgcattctgtgaggcctatcagccagccagaggtcttgtacctagccagataaacagtatccagcgttacctggatgcagtgcgtagcaatcttctctttgccaaaagcgtgatactcgttgaaggtgatgtggaggaaattctgataccaatcctaattaagctagtattgggagtcagtgttgacgagttaggcatcagtgtcatcaacattcgcagcacaggctttaagaatgttgctgtactcttccataacatccgcattaagaagcgatgcgccatcatcactgatttggaccaagccttttttgatgtcacccctctgccaactgatacaaaaggtgtggctaaggcaaaggccaaagcagctgggtcccagaaagctggtttagaacggcaggctgatctaaccgagttcactggagataatccatggcttgtaaccttttacgccaaacatacgttcgaggtcgactttgtcgcagccggtaaccatgaggccgttgtccaaactattacagcagtttacaaagacgaggaaaccaggaaagaggcgaaacagcaacttcaatccggggacttgtcacaaatgggaactcgtacgctgacgatggcaaagcaagagggcaaggggtggttcgctctcatgctcgcagagtacctgactccccaagttcagatcccagcctatataatgcaggccattcattttgctcatggcacttttcctcttccccttctttccagaattctccagcaccgcgctgaatgcagatacggttccgatatattgaattcgcaagctaagcaggcatttcttctggtaattgagcgttttgtgcagagaaatatcggcttggctgaactcaggcgagaaatcggccttatgatacccggagaccccattaatgtattcttagcggagatgcagtga

SEQ ID NO: 73015 - DNA, 1782 bp, Cronobacter malonaticus 507
atgtttgcctgggacccaagagacctcaatcctgagcaggcggcggcagtaatcgagccatcaagcatctttctgatcgcttgcccaggtagcggtaaaacccgtaccctgacctacaaaattgcctacgaactatctcgccgtactgacaagaggatcgttgtagctattacctacacccaccgtgctgctgatgagattcaagagcgtattgaggacctgggagtagatacctcgggtctatggattggtacgatccatgcgttctgtttagagtggatacttaagccatacggtatctattcccctgcacttgcacaggggtaccgcgtgatcgacccacatgatcgtgagcatctactggagaggctatgcgctccgtataaaggtgtcactcattgggattgcgattactatgttactgagacggggtataagcttggctgtgtggatatgggaaaacaccctatcattcacaaggttttgaagttgtacttcgacgagctggcagcgaaccgacagatcgacttcgaactcatcctttggtatgcctacagcttgatgcgggacagaagccaaatcgcagtgctgctctcacgtgtattttcccacatccttgtggatgagtatcaggacaccaaacagatccagtacactatcgtcacgtccatacttcgtgcaggtaacggccagatcaaaatactcatcgttggcgatccgaatcaagctatctatggctctctgggtggctatgctatgccagtggatgaattccgaactctcgctgggatctcgattaaagagttagcgctcagcctaaactaccgctccagcgagcgaattattagctacttttcgaactacagcgtacacgcaacaaaaataaaaggcgctggcaaacatgccaattatcccagccgggtgacctacaatcaaaacgtaacacgcagcggtgtgcatgatgagattgtaaggctgattcggatgagtctcaccaacggtcactctcccgaaaatatctgcgtccttgctccgcagtgggttttgcttgcctctactactcgaaaactagtagcgatgttgcctgaccagcaatttgatggccctggtctcgtccctttcagtaacaatttcgataatttctggttcaagctttccaagattttactaacggattcctcccccaaactcctcgtcaggcgaatgcgttgggcgaacgatgttatccaagacctcgaaagtttcggcgttgacacccatacactgacaccgcgtatcttgttgcgagagagtaactcactcacagtcaatgaaacggacgggctccgctacttggaccaagctttcaatgatctgctcaagaggctcaatatctcccaagacatccatcctgcactcttgacccatcgggaggcatttttcagcagctcggcagcgagaatagagcggctacagaaggaaggggcgacctacattaatcaagtgtcattcttcaaaaaagtttttcgcgagcgaaccggcatcacagtctccaccatccatggtgtcaagggggccgagttcgacgtcgtcatcgcttttggattactggagggtatggtaccgcactttaatgaagcaaatggaagtgccgccgcaagcaagctcctctatgtattgagttctcgagcccgtaaaaatcttcacttgatctcggaatcaggacgacagagaggaagatacggcctgtatacctcgactgagttactcgcggcttgccgcttcagctatgaccaggactaa

SEQ ID NO: 73016 - DNA, 1785 bp, Cronobacter malonaticus 507
atgcggatttcccgaatccggttaattaatttcgccaacttctccgatgttgatgttgaaacgggtgagagtattgttattgttggtgaaaacaaggttggcaagagcaattttattcgcggcctgcagctgattcttgacccagggttgtctgagcgtgaccgtcaactgggttttgaacatttttgggatggattgggcgaagacaaattgggggagaccatcgaaatttcattggatcttactgatttcactgacgatccccgattgatggctcatctgaatgactgtgtcctaaatccgggacctccgatggtggcccgtcttacctaccgctttcagcccaaagccgagttaaatcgagctcctgaatcgttaaaagattatgagtatgtgatctttggtggtgctgatcctgacatgcatattggtggtgcgtttcgccgtatgttgcccatcgatgttcaaggcgcgttgcgtgatgccgagaaggatctttcaagctggcgtaattcacccttaagaccgcttattgaagaactgtccgcatctctggacgacgagactcgtgaggagattcaaactcaggttgatgaggctcaacgggaactggctgatcatgatgaggtggcagcgacagccgaacgaattagccaaaggttgattgctatcgcaggtgagcaacatgccgttccggtatcgctcggacttgcaccgactcgcgttgatgtgctgctacgtagcctgcgtttgctgcttgatagtggcattcgtggcattggcgatgccagtctggggacggcgaatctgatttttctggccctgaaaagcctcgaacttgatcgtcttgttgataatggagaacgagaccatacgtttttcgtcgtcgaggagccggaagcacacttgcatccgcacgtacagcgtctggtctaccgttatttcctgggtactgacggggagaatggtgatgaagggacgccgctgacaacgatcctgaccacccattccccacatattgccagcgtcacaccaatcagatccatcgtcttgctgcgccatgatccggaggaagggaagacgattgcggtttcaacggcaaacgcaccgtttactccgcgggacgaaaatgatctgcagcgctatatcgacgtcacccgcggcgaaatatttttttcacgtggtgtgatcctggtggaaggagatgccgaacgctttcttgtcccggcattcgccgatgctcttaatattcccctcgatatgcttgggatcacagtgtgttcgatcggtggaacaaatttcactccgtatgtgaagctcttggggccacgggggcttaatattccgcacgtgattctgacagaccgcgatcctatggagaacggccctccactagttcgtaggcggttcatcaatattctcgaggtgcttgaggaggatgttgagcatgatggtatggatgatgatgaggtgattgagcttgccggggagtatggatgcttcgtcaatgagaccactctggagccagagctgtttaccggtggactgggcgaagccatgaagtcggtgatcgagcaggaattgtctcctagacgagctactctgaacaggatacagacttgggtggatgactcgaaccagcttgataatgtccggttgttggaactaattgagcgaattggcaaagggcggttcgcccaggcgctggcacctttggtgtcggaggatgtatgcccggattacattcgtgaagcactggagtatatctgcgatgccgtcacgtag

SEQ ID NO: 73017 - DNA, 1818 bp, Cronobacter malonaticus 507
atgccgtcacgtagtgtcagtgcagcctacttagctcaggctgccgagctggttgggaatccgggccagttagccgcgtatcactcccagggacactgcgtggtgctcgcggggcctgggagtggtaagacaaagacgcttgtgctgaagctggcccgaatcctggctgaggatgttcaagctccacgtggtgcggcatgtatcacatatagccaagaatgcgcacgcgagctaacccgtcgtctcgaagcgctggggctcagagaggcaccgaatctctttattggaaccgttcatgggttctgcttgcgccatctgttgatgccctatggacgactggccgatctgccaatcccatttccgctgtcagtagcgtctcagcgcgagagcgaacggttacttagacaatctggtgaccgtctctttggtgcaaaccatccctataaggctatggatctcggacggcatcgccgttcggtgttgaatcgcaacagcgttgcttggcgtgcagaggaggaactcgctgcatgggccgaggcctacgaagcggcattgcggcagcaaggactaatagactacgacgatatggtgatattcggccagcgtctgatcattgagcatgattgggttctgcccctagtacaggcgaaatttccgatccttgcggtggatgaatatcaggatttgggcgtggcgcttcaccgtatggttaaacgcctggctttcgagggaggcgtacgcttatttgctgtgggtgatgcagaccaatcgatttacggtttcactggtgccgatggtgcgttactcctagaactggcaggcaggggagacgttgaaacagttcggctccagttgaactatagatcaggggcgggcatcgtcaatgcatcggagatggtgttgggtgaggttcgtggttatcgagcaaacgacccgaaccgccagacaaccattgcgttccagctgtgcccggatggtttggtggatcaggctgtccatgctgtcgcgcaaattattcctgctgcgttggctgctaagccgggtcgaacgctgggtgacatcgccattctgtacaaggactaccgtgcaggcgatgtggtagccgatgctgtgaccgctggcggttttgattacattcgtgtggacaccgcagcaccttatcgcaaggttgccttgacgaactgggtggaggattgcgcggcatggtgtgctggcggttggcgtatcgggcgccctcaactgcgcggattgatagaccgttatctggcatttcatcgggcaaggctggatgatgcgtgcgcccggcgtaaagggcaggagttaaccaggctgctttgggtacttcgtgccgaccaatatcctgcgtgcgattttgtcgcgtcgttgcgcaatggtctcgttgattccctgctggcaactgaaccgacgctttctgatcagggtgagcaaatagatcgcatgactgctgcacttgccgaaggcggtgcgttagcgatgctggatatcacgagcctaggtggtcgtgacggttcacccgagcacctcaatttgctgacacttcactcagccaaaggttgcgaatatgacgtggtcatcatggtcggcttagatctggggaatttgccgtggcgtaatgagacgccagagaagctgcgtgaaagccgtcgtcttttctatgtggggctgacccgcgcacgggacgaagtgcatatgctgtattccggttttgttgacggtcgctatggccctatgcgtctggggcgttccccatttctggatgaactggaggcgcgaatgcgaggggcaggtttacgatag

SEQ ID NO: 73018 - DNA, 1584 bp, Enterococcus faecalis OG1X
ttgaataaaataagattaatctatgtacctgcagtaagagatccaggtaagcagttaaaaaatgtttctggtagcatgattcaccaagtaatgaatagcatcaattggaaggatgaaacaagagaaaacgtaaaagaacatatagataagataaatgaagatttttctgttgaaagcggagttaatattcttaaaaatgcaattcagaaagagtggtacgaatatcagtcagacacacgatatacgaaagctgatttaaaatttaatgctacaactattgatgcagcggtaaagaatactgaagtcttattttctccaacggagacgggtagagagtattccatcgatgaaatgggtgatgggatgaaatcattattttatatgtcgatagtagatagtattttagatgttgaagcaaaaataaatgaagaaatggttaatggagaagatttgtcttttacaaaagaacctcctgtattgactattgttgctgtagaggaaccagaaaatcatatttctcctcatatacttgggaaattagtaaataaactaagagatatatcaaaaaaaggaaatgcacaaactattattacatcgcactcaccagcaattgtaaaaagaatgaatccagaagaaatccgtcatttccgaatgaattatggaactttatcaacatcgattaagaaactgactttgcctgataacgagactaattcagatcaatacaagtacgtaaaggaggctgtaaaagcatatcctgaaatatattttgctaagttagtcatttttggggaaggtgatagtgaggaaatactactacctaaattttttgaagcagatggatctggtcttgatagttctggagtatccattgttcctttaggtggtcgtcacgtgaatcatttttggcggctagttgctgatttgggcattccttatatcactttattagatcttgatcgtgaacgtgaaggcggcggttggggcagaattaaatatgtaattaaacaacttttacagataggtataaacagagaagaacttctaaagctaaaaaacggtaaacttttagatgatgatagactcaatgagatgcattcttgggcagtaacgaatgttgataatatgaataacattatcactcgtctcgaaaatcataatgtatatttttcttcccctttagatatcgattttatgatgttggaaagttatggtcaggactacatttcaactatttcagatagagaagggccacgaataaagttaagcggcaccaacaaaaaagttgttgatttaaacgattcagaaaaagagttagatgaatttaaggaaagaattatccatgatatcggaaaaactttaaaaaacaatgatgctaccggaactacttacagcaaaacgcaaaaggaattaatgatttggtataattatttctttctaaatcggggcaagccaagtactcatattgccgttctttctcaaatatctgattccaagttagttgaacaatctccagaagttttgactcgaatgatgtctgctgcaaaaaaacttatttcagagcagagggaaaattatgagtaa

SEQ ID NO: 73019 - DNA, 1863 bp, Enterococcus faecalis OG1X; identical to SEQ ID NO: 72191

SEQ ID NO: 73020 - DNA, 2073 bp, Enterococcus faecalis M7
atgaaactcaaaaaaatgattcttaaaaattatcgttcaattggtgatgatgaacaagtaattgattttgaaaatttgactatgcttattggaaataatagcgtaggaaaaaccgctgctttatcagccctcaacaaattattttctgatgtcccgaatgagcgcgtattaaaacgttcagattttcacttaccaaagggtattcaacctgagaattttaaaaaacaagagttagtaattgaagcaatttttgaatttgatgagttactagatgatcaagctgaatctagccctgcaattccatttttttttgaaagttttatcgtagaaggtcctgattcattacctaaactacgtgttaggttagaggcaagttgggaagatggtagtacagttgatggtactattgaaagtaatatttatttcattacttgtccagaaacaagtgaagttacagatgataacaaaaaaaatgcatctagacacgatttgaataaaataagattaatctatgtacctgcagtaagagatccaggtaagcagttaaaaaatgtttctggtagcatgattcaccaagtaatgaatagcatcaattggaaggatgaaacaagagaaaacgtaaaagaacatatagataagataaatgaagatttttctgttgaaagcggagttaatattcttaaaaatgcaattcagaaagagtggtacgaatatcagtcagacacacgatatacgaaagctgatttaaaatttaatgctacaactattgatgcagcggtaaagaatactgaagtcttattttctccaacggagacgggtagagagtattccatcgatgaaatgggtgatgggatgaaatcattattttatatgtcgatagtagatagtattttagatgttgaagcaaaaataaatgaagaaatggttaatggagaagatttgtcttttacaaaagaacctcctgtattgactattgttgctgtagaggaaccagaaaatcatatttctcctcatatacttgggaaattagtaaataaactaagagatatatcaaaaaaaggaaatgcacaaactattattacatcgcactcaccagcaattgtaaaaagaatgaatccagaagaaatccgtcatttccgaatgaattatggaactttatcaacatcgattaagaaactgactttgcctgataacgagactaattcagatcaatacaagtacgtaaaggaggctgtaaaagcatatcctgaaatatattttgctaagttagtcatttttggggaaggtgatagtgaggaaatactactacctaaattttttgaagcagatggatctggtcttgatagttctggagtatccattgttcctttaggtggtcgtcacgtgaatcatttttggcggctagttgctgatttgggcattccttatatcactttattagatcttgatcgtgaacgtgaaggcggcggttggggcagaattaaatatgtaattaaacaacttttacagataggtataaacagagaagaacttctaaagctaaaaaacggtaaacttttagatgatgatagactcaatgagatgcattcttgggcagtaacgaatgttgataatatgaataacattatcactcgtctcgaaaatcataatgtatatttttcttcccctttagatatcgattttatgatgttggaaagttatggtcaggactacatttcaactatttcagatagagaagggccacgaataaagttaagcggcaccaacaaaaaagttgttgatttaaacgattcagaaaaagagttagatgaatttaaggaaagaattatccatgatatcggaaaaactttaaaaaacaatgatgctaccggaactacttacagcaaaacgcaaaaggaattaatgatttggtataattatttctttctaaatcggggcaagccaagtactcatattgccgttctttctcaaatatctgattccaagttagttgaacaatctccagaagttttgactcgaatgatgtctgctgcaaaaaaacttatttcagagcagagggaaaattatgagtaa

SEQ ID NO: 73021 - DNA, 1863 bp, Enterococcus faecalis M7; identical to SEQ ID NO: 72191

SEQ ID NO: 73022 - DNA, 2190 bp, Enterococcus faecium EnGen0016; identical to SEQ ID NO: 71696

SEQ ID NO: 73023 - DNA, 1794 bp, Enterococcus faecium EnGen0016; identical to SEQ ID NO: 71697

SEQ ID NO: 73024 - DNA, 2025 bp, Enterococcus faecium EnGen0001
atgaaactaactcaactaaaactagaaaattttagatcatttggtccatttgctgaaactattgattttaattctatcacaggactaattggccataacagtgctggcaaaaccgctattctatcagcaatcagggtgttattgggaaatttgagactaaagcagtctgattttcattgcgtaaatgaacaaagtattgaacatatcgaaatgaaaatagaagcacgtttcgatttctttgattcctctgaatctcaggaggagtgtggggaaacaagtattccaacattttttgaaacattaactattcaaaatgaaggagaaaatccatatattcgtatcgttctggatgctaaatggactcccagtaactctccagaaggcgatatcgactctagcattagttttataacatcctcagatgatgatacgaagcgtgtacctatgacagcttttttcagatcaaaaattgatgttatttacattccagccattaggaatccttatgaacaattaaataatgctgctggtacaattttatggcgtttgttaaagcagattaattggaaggaaagtgacaaattagatatttctcaaaaaattgatagtttggatcgagctattagtgatcaggatggtatatctttgattgaggaaacaatttctgctcaatggaaaatttatcataatgataatcgtttttctgatgcaaaaataaagtttggtagtactgatttgaataagattttaaaaaagcttgaagtggaattttcacccggacctcataatcgttcttataaaattggtgacttgggggatggattgcagtcactattctacttctcattaattgatgcatttttaaaaactgaagaaaaaggactcaaagaaattagcaagaatattgacgaaaatgatagaaccttaaatgtaagtccgccagagttaacaattttgttggttgaagaacctgaaaatcacattaatcctcaattactaggaaatgctttatctaatttacgaagtatttcaaaaaatgaaaattctcaagtggtttttacatctcataatccgagtgttgtaaagcgaattgatcctgaggaaattaggcatgtacgaatggaaagtttattcgaaagtagtgtggttaataaattagtattacctgataaggaatccgatgcttataagtacgttaagaatgctgttattgcatatcctgaactttacttttcttcattaattattttaggtgagggtgacagtgaagaaatcattattcctttctttttaaaagaaaaatatcctaatcttgattctgtgggtatctcggttgttccgttagggggccgtcatgtcaatcatttttggcgacttctcaaccagttgcaaattccttatattactttacttgattttgatttagaaaggtatggtggtggttggtccagaattaagtatgcacttaaggagctaattaagatagatcctgcagttggggaagtagaaatgaagaactcgaaaactactattgctgatataattgataatctagataaacgagaagataataattataaaggttggctaaattttttaaaggaatccagcatatactactcatatcccttggatgttgattttttgatgcttgaaaactacaagaatgattatattgaaacactaagcagcaacgaaggtccttttgtcgaaataggaggtaaacgaataaaaatgcagaatatttcagatgaagaaaagacgacagaggagtttaaaagtaaaagggatgtgtctatccgaaatacacttaaagagcatggcggaagtggtgaaggatatagcgatacacaaaaagagttaatgatttggtatgattacttctttttaggaagaggtaaaccagtaactcaccgattagcgctaaatgatattacatgtgattctactaatactattcctactgtctttcagaaaatgattattgatgtaaaagaaaaattaagcggtgatagtaatgattag

SEQ ID NO: 73025 - DNA, 1818 bp, Enterococcus faecium EnGen0001
atgattagtgaatcagattgggtaccaacagatggtttagaactagaaccagaagctttgctggcagtgaaggaaactagaaacactttagtagaagccgggcctggctcaggtaaaaccgagctattatcacaaaaagcaaattatctttttacaacaggtatttgttctgaacctaaacgtatactagcagtgagtttcaaaaaagattcagctgtaaatttggcagatcgagtagccttacgtgttgagcgtgaagatagtcgacgattttcatcaagaacttttgattcctttgcaaaaaacttgttggatagatttttgaatggactgcctcttgaatggagaccaacgaaaagctataggattgatgaaaggtactttgttagtgcttgccaattccacaacattcaattccgatacaatactgatgacaggaaaatatttgagcaagatttttacacaattgattttaatcgaatgtctgaacaagcaaaattagtatgggatactatgctaaagggagatggcactaaatccattttaactttcaaaatgattaattggttagctctacttttacttaagagaaacccaaaaattgtagcttcaatacgaaaaacttataaatttgttttcttagatgagttccaagataccacaacattgcagtatgagttaataaaaacttgcttttgtgaaagcaacgcaatcattacagctgttggtgatagccaacaaaaaatcatggggtgggcaggagcgatgagtagtgcgtttgaaacttatcaaaatgattttagttctttttcgcataccctagctttgaatagacgttcaaataagaaaattcaaaatctaatttggcaaatcaatcaattaaatgctgagtctcctttggcagaaatgccgttcgattcagagagcatatcagagggtaatatagaatcttggttctttctgtctgaacttgatgaagcaaatagaatagcattaaaagttaagcaactgattaatgagggggttagcgctgaagatatctgtattttggttaagcaacgtccagattcatatatggaatccttggagcttgcttttagtaataatgagatacgcatccgaaatgaaaatgaataccaaaatttactgaaagagaacatcacaattattatactagacgttatgaaggcagctctcaattttgaaaaagctctatcatggcaaaaaatatttaatttgaaaatggaattttctcaagaaaatatttcaaataggattaaacaacaagagaaaatgttagttgaagttaaaaggtttcttaacacggtagcaaatcagatcgagagtgtcgattcaccagaggatgtttatcatttgtttcagaatatagtagacttctttggtaccaataatattcaagcgaagtttttggagtatacagatatctcttatttaacagagattcttgaggatttgaccagttgtttgtatcagtattttacacaagaagaaaattgggtatgtgcaattcagactttatgtggaaaaggtattgttcctttgatgacaatccataaaagtaaagggttggagtttaataccgtatttttaattgatttatctgattctagtttttggtcttatcgtattgatccgattgaaactaagtctactttatttgtagctgtttcaagagctaaacaaaacttcgtctgtacattcagctcgattcgtttaggtaaaaatcaaacctgtacattagtctcggatttttttgacgcgattaatagccacggtcaaaaatttaattttaactaa

SEQ ID NO: 73026 - DNA, 2190 bp, Enterococcus faecium EnGen0003; identical to SEQ ID NO: 71982

SEQ ID NO: 73027 - DNA, 1794 bp, Enterococcus faecium EnGen0003; identical to SEQ ID NO: 71697

SEQ ID NO: 73028 - DNA, 2001 bp, Enterococcus faecium EnGen0029
atgagtaatccatatctttcaaaagtaagaataaaaaatttcagaaattttaaggatgtagctgtagaattagagaagcagcaaattgttattggtgaaaataatgttggtaagaccaactttattagagcaattcaattaattttagatccttctctgtccgaagaagagagatatttaaatgaaaccgatttttttgaaggtcttgaatcacctttcgagaataatgaaattattgaaattgagattgaattaagaaactatgaaaataatttaaaacttttgactattttatcaggtgcaacagtcagtaataatccagatactattagaattacttatcaattttttccagaagttgattcaatgggaaatactgaatataaatatcgaatttttcaaggggaaaacaaagaactaaattttggtcataatgaacgtagattcttgaacatgaaagtaattcctcccatcagagatgtggaaaaagatattcgtagtaataaaaaatcacctataaaagccttacttaaagattatgatatagactctaaagagttagaagctatatctgaggaattagatgaggcaacaagttctttgttagatatggatgaactaaagtatctaacaggttcaattaacgatagatttagtgcagtagtgaacagccaaattgatttgccagtatcatttaaaactatggatattgctcccactaagttattaaactccttgaaaattgttttaggagagagtgggagaggactacatgatacaagccttggaataaataaccttttgtatatatcattacttctactttctttagaagataatacagttcctagcatactttctgaaaaacaatacaatattcttctagaagatgatacagagctgattattgataaattatacaaagttacttctaatggaaaacgtataataaactctaacatttcaaaagcagactataaaaaattatatactttcatggatgaaaattataaaaataaaaattttcaaggattctcaattcttgttattgaggaaccagaagctcacttgcatccggcggtgcaacgtacgatttacaaagatatatttaatagaaatgtctcaatgctcatgacgacacattctcctcatattacttctgtggcaccgataaatagcatcgtacatttaaggaagagtagtcaaggtactttgataaatagcacagcaaatttagattttactgacggagaacaaaaagatttagagagatatattgacgtaaaacgtggagaactgtactttggaaaaggtattctcttagtagaaggagttgcagaagaatacttaattccggaattctctagagtgttggagaaagatcttgataaacatggaataatttgctgcaatataaactcaactaattttaaaccatattataaatttttaagaacactaaaaatgccaactgcaataataactgatggcgatttctatttccaagaagagaaaatagaaaatggtgaaaaaaagataatatctacttttcataaaatggaatataacacacctactggagcaaacaagttttatgatggattggaaagaatgagacaacttgtaaaagatatagggatgttctcagaggatgttgatatccttgatgatgaagctttagaagctaccttaaacaaagaaggcatctttatcggtttttatactttagaaatagacatttttgaaaatttagatgccattgacaaagataatgtctgtaacctatttaatgaattaaccgcaggtggggataatcataaaagtaatttcaaagaccatctggacaataaaagatttgacaaatgtttaaagatgatagaaggcaccacatccaaaattggtaagggaaggtttgctcagagattatcattagacatttctccagaaatggtaccagattatattaaaaatgctataaattatattgtcgaaaatttttaa

SEQ ID NO: 73029 - DNA, 1779 bp, Enterococcus faecium EnGen0029
atgactaaatattttgaaaaactatcccagataaaagaagataaaaatcagtatgaagcactattagcaaactctaatgctgtaattaaagcaggacctggcagtggtaaaacaaccgttttaacggtaaagttaaaacagttactgatggaaaaaattgttgaccctagagggatcgtttgtttaacttatagtaattctgcggtgaaaaactttactcaaaaattaagagagttaggtgtgaacaaatccaatagggttattctttcgacggttcatggattttgtatttcacaaattcttatcccctttggtaagatttatgacacgagaataaattttccaattaaaattattaatgaaaaggaaaaaaaagaaatatttagagtttctgaaaatgaattagctatttcaaaacaatatactttaaaaaatgttgaagaatatagaaatgaaatgtacggttcacgtagttccgtagacataaataaagataaacagctagagaaactgtgtttgctatttgaaggtaaaatgttagaaaaaaatctttgtgatttcaatttaattataagtgaatctcttcgtttaatggaggaacgtccatatattcttaaatgtttagaggcaaaatttccgtggattttgattgacgaataccaagatctagggaaaatattacatgagattgttttattgtttctcgaaaaaactaaaattaagtttttcgttgttggcgatcctgaccagtcaatctataaatttcagggtgcttcgccattttattttttagaactttatgatcatccagatatgaagaaaataaatttaactactaattacagaagtgatcaatttttaattgattctgtattaaagacattagactgggatgatagggagtatgtgtctggaataattaatgagaagcctgcaaaaataaatttttttgaatgtgaagatggtatggaacaacagtataaattagttgctcaacaattaattccaatgtgtgttgctaatgatatttccctttcagaaatctgtattttggttggatacaataatcaattagatgagctttccaatatattagatgaagaagatatagcctattatagagaaggattgccatttttaaaattaaaatttgtgttatggctacaagaatgctgtctatatttatcaggtagtaataaagtaaacttcaatgatatatctgatgagtggttgtttataaataataaagatatacgtaattttggtgaaaaaatgaatctatataagagtctagaaaaaagtaaattgaataaagctagttttaaaaagtggcttaaagaaatttttatagatttggatttgtctaatgttctatcctgttctccatacagcaatgaagttgacgatgttaagaagttcatcatacaagttatccagaatgaagtcttaaaaaatcatacagttaatcaatttggaaacatctcagctatagataatcaggtaactatctctactcggcatagttctaaaggtttagagtttgaggtagtcattattcttggcttagaggatggaagttttcctcactatgcgcatgagataggtggtcaggaatatcaagaagacctgagagttttttttgtctcactaactagagctaaaagagtagtgtatttagttagatcaaaaagtatatctggtatcagtaaatatggaaatccatattcttttaagaaggaaccatcaccgttttggacattattaaaacaaaatatttga

SEQ ID NO: 73030 - DNA, 2190 bp, Enterococcus faecium EnGen0030; identical to SEQ ID NO: 71696

SEQ ID NO: 73031 - DNA, 1794 bp, Enterococcus faecium EnGen0030; identical to SEQ ID NO: 71697

SEQ ID NO: 73032 - DNA, 2190 bp, Enterococcus faecium EnGen0057; identical to SEQ ID NO: 71982

SEQ ID NO: 73033 - DNA, 1794 bp, Enterococcus faecium EnGen0057
atgacaaatatcttcgaaaaaatcgtaaatgatttaaatttagaacaaaaagatgttgtggaaagtgaagataacctttatgtaaatgcatgtcctgggagtgggaaaacaagggtacttacaaggaaaattgcttaccaagcaattaaacacgatggatcactaaaaagaataattgctatcacatacactaatagagctgctgaagaaattaaggaacgcctaagtttacttagtatagatgatgatattaatatttgggtggggacaatacatcagttttgtcttgaatttattatttatccttttaaaatgaatctctcaagagtatcaaaaggatttacaattattgatgattatactcaaagagcttacgtcagccaaattaataatatgctgaatttaaatctcaaaacgtatgaactgaacaaaattgatttgtcactttctcatgattttaaaattaatgaagttcagtatactcaagtttctgaaatgtatcacactatgttggaaaaaaataaagaaattgattttgatatgattttactagtagcgtataaaattttaactgtaaacagtaacgttgcacgtaatattgctagtaatataagggcgatttatgtggatgaatttcaagatactagagaattacaatacaatgtaatagctaaattacttcaaaacaaccctcaaattcagtcaatgtttgttggagatattgaccaagcaatttatggatcattagatggtatagctaaatcagttgaagaactagaaatgctaactagtcacacttttcaatcaaagacgctacatggctgttacaggtctaatcagagattagtagacttctactctaattttcagagttgtccttacgagattgaaagcagagggaataataaaaacgaccgtggttttataagttatgattgcaaagttactaaggaggatttacccaacataataaaaaatataataaaggaaaagattgaaagcggcattcatgaaaaagatatttgtgtacttgctcctcaacactatcctctgttttcactgggtgagtatttaaagaaagaattaccgtattgcaattttgatgctataaatatatcaccaattaaggtaaataatcatagtttatttttcaagttagcaattttgtactttactgaatcaggtgaaaaggttcgaagaagaaagctaattgcaaacgatattttaattatactaaaaaatgaatttggaatagaagttaaagattattttattgacttagatttattacagctaataaacagtgtgaaaagaatgtatagtggagacgacaacggtgttgatttatacaaatttgttaccaaacatatatttgttaatcttaatattgacgagaaaaattacccgtctatttttaagcactatctattttttattaacgaagtagaagatcggataaaaaataattcattatctagtagtgtatctagttttaagaagatgtttaaatctcgagatggtatcacacttactacagcacataaagttaaaggaaatgagtatgatactgttatcgctattaatcttctaaacgggaaaattcctcattggaatgaaatttttaatgtttctgataaaggaattagttcagcgagaaaactactatacgtaatttgttcaagagcaaaaaataatttatttcttttctcagaggtgggttattttacgagtaaaggagacttgctttatcccactcaattattagataaaatagaatttgattataatatttaa

SEQ ID NO: 73034 - DNA, 1728 bp, Echinicola vietnamensis DSM 17526
atgagagttgcaaaattaaacattaaaaatttcagaggagtaagttcagcagaaatttatttttccgaccacgtagtattaataggtgataataatactggaaagtcaacaatatttgaagcgcttgatttgactttaggacctgatagagtgaaccgtaaaccagttgttgatgaacatgatttttataatggtttatatcttacagatgatgaaactgataatccagtgatagaaatagaatccttaataaccaatttatctttagaccaacaaagccattttaaagactatgtagaatggtggaatattgaagaaaaaaaattacacacttcaccacctccaaaatcaattgataatgaaaatattattgctgcgcttagagtatcttttgttggacaatatgaagaggaagaagatgattttataggttcaacttacttttcaagaacaattgctgaaaatgatagacctctatctttcaccaaaaaggataaacaaagatgtggttttctttatctaaggactttaagaactggttcccgagctttaagtttagaaaagggaagtctattagatattattttaagattaaaagatttacgcccacaaatgtgggaaaacacaattactgaacttaatgagtttaatgttgctacagaccctgaattaggtatttcagggattttagagagtatagaaacagcaattaaaaaatttgtaccaaaggaatggggcattactccacatctaaaagtatcaaatttaacaagagaacatatcaggaagataattacagcatttattgctacaggttcaggagagcatgcagctcctttttatagacaaggtacaggtacgattaatattctcgttttagcaatgttgtctcaaatagcagaagaaaagcaaaatgtaatatttgctatggaagaacctgagattgcaattcctccttatacacagaaacatatcattcatgaaataaaaaaactctcatcacaatctttattctccactcattcaccatatgttattgaggaatttcacttatctcaaactattattctttcaagggatgatagaggtatattaaagcaatcagaagtaaaattgccagatggaataaaattaaaaacgtatagacaagaattccgtcaaaaatttagtgaaggacttttagcacgaagaattataattgcagaaggtcatacagagactgcttcgttaccagcagttgctcgcagactatcagagttaaatccagataaatattcatctctcgaggcattgggagtatgcataattgatgctggtagcgagtctaaaatcacggccttggcaaaattgtatggaagtcttggtaaaagagtttttgcactatgtgataaacaaagtaatgaagcaaagaaattaattgaagacaatgtagagaaattatttatgcattcggaaaagggttttgagaatcttgttttaaagaatacaaccatcgaagcaatggaaagattttgtgaattaattgattggccttctcatataatagaaaaacaccccgaaccaaagaacgatattgaacatgctttattgaaatattttttatgggcaaagggtaactggggaatagctgatttcctttctcaatgtaaggaatctgaaatacctgattggctctgtgatgtttgtatagaaattaaagatttgtatgaattatcacctgaattttag

SEQ ID NO: 73035 - DNA, 1821 bp, Echinicola vietnamensis DSM 17526
atgtcaagtgaaaaatttatattgacaaaagagcaacacagaattcttaaggatttccataatcagcttatcattggtggccctggttctggtaaaaccactatttctatattaaaagcggggcaatgggttgaaaaattaaaagaaaaccaaaatgtactttttttaagttttgcacgagctacagtttcaagagttattgaggctattgatgagcaatcattattgtcaaaagaaataaagaagagaattaatgttgatacttatcacgcttatttttggaaaattatcaaaacacatggatatttattgggtctaccaagaaaagtatccatcttaacgccttcaaatgaagcaattaccttatccagtattagaaatgcatatggcaaagtaaaaaatttaagcgatagacaaaaagaagagaagaaacaggatgaaaaagatgctattaggaaacttgcatttgaaaaaggagaaattgctttcggcctttttgcagaactaaccttttcacttttagacaactgtaataaaatacttaacctattagctaattcataccctgtaataatattggatgagtttcaagatacaaacttcgaacaatggaaagtaatacaatccttaggcaatagaagtatcattattgccttggcagattcagaacaaaggatttttgatttcataggagctgacccacaaagaattaatcattttaaaaagcacttttcaccaaaagaatttgatttaagaaatgaaaaccatcgaagtaggggtacggatattactaaatttggtaatgatattttgaaaggcaattttcaagacgattataaaggaataaaactatttactttcccatcaaataataatcaggccttttcagaacttaagatacgaacaattaaagcacgtaaaagattaatcgaaaaagatgtaaaggactggactttggctatccttgtacctactaaaaaattaatgcgacaagtatcagacttttttaatcaaaaaactcaaaaattacctgcaattcatcatcatgctgttattgatatgcatggagcaattttagctgctgatgtcatagcttttttaattcaaccaaagtgtaatgataatgatttagagcagtttgttcagttaatatgtaattttttttatggtaaagggggggatttaccgaccaaaactgatattgctgaagcatcgtcaattcagaaatcatttgacaaattatatgctaaaatcaaggcaaaagaaaaaaccccaaagaacagtattattaacgctattgttgaaggatatgaaaattgcagaaaattaaaattcacaggtaatccatacgaagactggctaactgttagagatactttagaatcttcaaactgtaaaagacttaaaagtattgctttagaagcaaagaatcttagattattgaatagaggaacacaactcagggaagcgttatctcaaaattggagggatagtggcttttacaggaatgcccttgatatagtgaggcaagcttttatagctgaacatttttcaatatctcaaagtccagaaaaaggtgtaatagtaatgaatatgcataaagcaaagggaaagcaatttgatgaagtaatcgtttttgagggttggccaaaatgggtgcgtcgtgaaatcgttagtaatccagacagaatagtaattggaaataagaagagttctgatatgacaaaatataaatataatttaagagtgagtgtaacaagagcaaaaatacgcaccacaataatgacacctaaagatgacccatgtgttttatttctataa

SEQ ID NO: 73036 - DNA, 2022 bp, Echinicola vietnamensis DSM 17526
atgaaaatcgaaaaagtagaaataaataactttaggctattaaaaaacactagtctttcattgcaagaaaaaacaaccgttattgttggtcgtaacaactctggtaaaacatcattaactgagatattcagacgcttctcaaaacgagataggtttaaattggaagattttagtcttagttcatttcctgatttttctagagctttaaaagcaaatttagcccaagaaaaggattcagcaattcgagaaattcttccaagtatcgatataatattgatagttaactatttggagaataaagacgattacggagtactaagtaatttcattattgatttagatgaaaatttaacaaatacacaaattaaaatttcatatagattacaagatggaaagatagatagctttttttcaggtatgactgatgaaaaagctcctgatttctttgatatcattcgggaaagaattcccatgtattatgactttgaggtaattgcaattgatttaaaagaccctgataatactgcaaaaactgaatttgaaaactacaaaagattaattcgaacagattttattaatgcacaacgttggcttgatgatgaaactataaaggaaaacgatgtactgggaaaagtactaagtagcatttttagcaatgcatctaaagaatctgcaccagaagaaatgcagaaaaaatcgaaagagcttgatgaagttgtaaaacaaatacaaacaacggttgattctgattttaacactaaagtaaaagccttaattcctgctctgaatattatgggatatccaggattaagtgacccaaactttactacaaaaacatcttttgatgctaaaactattattgagaaaaacaccaaacttctatatgagaaagctcatgggattactctaccggaaacatataacggattaggttctagaaacctaatatttatcttgtttcatttatttgactatttcagacaatttcaatcggatgaaatacaaccaaaaaatcatgtaatctttattgaagaacctgaagcacaccttcatcctcaaatgcaggaagtatttatccgaaagctatatgagatagcagatactttctctacacagctgaatggaggaaaaaaatggccagttcaatttatagtaacgagccattctacacacattgcaaatgaagctgaatttgattccatacgctattttcttacaaaaggaactgaagatttacagacttatataaaagacctaaatgaggaatttagtaaaccggataacgaaaaggacaaaaactttattcataaatatttaacgcttactaaatgtgatttattctttgctgataaggctattctaattgaagggccaacagaaaggattctaatgcctgaatttataaaaaaactaactacggcaaatctaaacagtcagtttatttcaacggtagagattggaggtgcatatgctcatcatttttataaatttcttgatttcctagagttaaaaacattaattataacagacctcgattctactaaacataaacaaactgacaaagggattaaatacgaagcatgccaagtttctgctggtgaaaaatcaagcaacacaggaataattaagtggttcagttataaggacgatgaaggtaatgataaagaaaatgttgatttatctgaaatacgcacaaaagttctagaagataaaattcaaggcactaggagaatagcttaccaaattgatgaagaggtaagagagtgttgcggtagaagttttgaagatgcctttattattacaaacccgacactttttggtatagctgaaaccaaaggcaaagctttagaagcaaaagcatttgaagaagctaaaaagtatacatctaaaaagactgattttgcaatcaaatatgcttatgtggaatcaaaatgggaaattccgctttatattaaggaagggttaacatggttgtctgaaaatgaatcggataaggttttgagtacagatgtgattaaataa

SEQ ID NO: 73037 - DNA, 1746 bp, Echinicola vietnamensis DSM 17526
atgaatagtccagctgaaaaagcatcagaagagacattaaagaaaatctaccttgcgttagataatggaaattcatttcgtgttgaagcaggtgcaggtgcgggtaaaacttactctttaataaaagctttacattatttgatagaacataagtcagcagagcttcaaaaaggatttcagagaattgcttgtataacatacacgaatgtcgctactgaagagattagaaatcgaattgataaccacccatcggtttttgttgatactatacatgggttttgttggtcaatattacaagggtttcaggctcaaatgagggctcagattgaattaataggtgacgaaaaacttatagaaaaaatagaggacgcgggagggctaagaaaacaaaaaattgtatatgatttaggatatcgtagtgcaacagaaaaggaaatctttattcatcatgacaatgtgattcagttattcactgcattactttccaaagaaaaattcagaagtattcttaaaaatcaatatccaattatttttattgatgaataccaagacacaaatgaagagttaggaaaagcaataatatcaaatttgattgaatcaaagtctgatatgcaaataggattatttggagaccattggcagaaaatttatgaaaatggtattggtggaatggtatccgttgatattgaggaaataggtaaaaaggcaaactttaggtctgaaaagaatttagttaaatttctaaataggatgcgcccaggactccctcaaatggaaaaagacccatcttctgctggagaagttaaaatctttcattcaaataattggattggtgtgaggagagatggtaaaggaggtggacattggacaggagatttgccagaggctgaagcaggtaattattttagagcagtaaaaaataagttgatacaggaaggttgggagttttcatttgaaaaaactaaaattctaatgcttactaattctgttctcgctagagaacaaggttatagcggaataactaaagtatttaggttttcagatgattatctaaaaatgcaaaataaatacattgattattttgtaaatatactagaaccagtttcagagtcattcagcaaaaagaaatatggtgaaatgttaaaagcgattggcataagaacaccaagattgaaaaaccatagtgataagaaagtttggaatgatagtttaagcaaattaattaaaaatcgaaattctggaactataggtgatgtaatagattgtttagccgaaactcaaaagcctcgtttgtcatcgaaaattgaagaatctgaagagaaatattctaaactcaaagatttaaccgaatttgaggatgaagcagacaaaaaacttgtttcaaaaattaaaaaacttaaatctgtaaaatattcagaggtcattgaactagctaagtatattgatgataaaaccccattttcaacaaatcatggcgtaaaaggagcggaatttgaaaatgtattggtcatatgtggtagaggatggaataaatacaattggaaccagtttcttacctgggcaaacgatggagttcctgatgataagaaagaatcttttgaacgtaatcgtaaccttttttatgtttcttgttccagacctaagaaaagattagcagttttatttacacaagaattgtctagttcagctatggcaacattaaacaagtggtttttaccagagaatattttcccaataataatatag

SEQ ID NO: 73038 - DNA, 1812 bp, Pseudomonas putida HB3267
atgcgggttgcacggctgcagattgagaatttccgtggcatcaagcgtgcggatgttttgttgcccaaacatgccgtcatcgttggtgataacaacattggtaagtctacgctcctagaggcacttgatctcgtactaggccccgagcgactctcccgtaggccagtgatagatgagcacgatttttatgcgggagagtatgtcgatctgcaggggcagccagtaaacataaccatagaagtggtcatcactgatctgaatatggatcaggaaatgcgttttagggatcacatcgagtggtgggataatggcgcgggagatctgctcggaggcccgccagcagagagtactgacgagcagatggttcaggcctgtttgcgcgtcgtttttatcggcagctacgatgccgatgaggatgatttcactggtaccacttacttctgttcgccgatgaaacaggatgggtcctacgatttcttcagaactgccgataagcgtgtctgtggatttctgtatctgcgcacgatccgaaccggcagtcgtgcgttgagccttgagcgtggttcgctcttggacatcattttgcggttacaggacgacaagaacttcaaaatctgggaagggcttttggttgagcttcgacagttgcaggttgcagctgatccggagatcgggatcaacgacatcctggcggatgttcaggcctcgatccgcggctacatgcccagcgatgatggtagcgatccccaaatgcgtgtcacgcaactgactcgcgagtctctgcgaaaagcgttaactgtcttcatggcaaccggtgcgcagcgcagtgatggcgaagcgcatgcagcaccattccagagccaaggcaccggtactgttaacatgatggtactggcacttctgtcactgatcgcggagctaaagcagaacgtgatttttgcgatggaggagccagagatagcaatcccgccgcatattcaaaaacgcatcatcaacggtgtgcgcaacaagtcagcccaggcgctgtttacctcgcattcgccttacgtgctcgaagagttcgaccccgagcaggtaatcgttatcagccgaaacgatggaaacttgagtgctatgcctgcagggctgccgccgggcatcaaagcaaaaatgtaccggcaagacatgcggctgcgtgtttgtgaggcccttctggcacgtcgggtgctgattgccgaaggccggacggaatatgacgcttggcccgccgtagcgcgactgcttcatcagcaggagccggagtctttcatgccgcttgaggcgttgggcatcccaatcatcgatgcgacgactgactcgctgatcgctccgatgggggcctactaccgcaggctcgggaagaaggtctatgccgttttcgacgagcaggcacccgagcaattggaagctattagggcgtcggtcgactacccctatcaagcgcctgagaaaggtttcgagaacgtcgttctcaaaggaaccgatgaggaagtgttgcgtggctgggttgcgtctctggtcgacagcggtgcttggccttcagacttaaaggacaaggccccgggccctgatgccacgaaggatgaggtagcagcgattctaggggtgctgctgaagcgctggaaaggcgatggtgctgctgccagcttactttgtaccgccatgacccgacatcaactcccggaattcattgtcagcaccctcgagagcattacagccacaattgttcccaagaagcccgagcctgaactgtcggaactggatgatgactttctcgatttggttgggccttaa

SEQ ID NO: 73039 - DNA, 1719 bp, Pseudomonas putida HB3267
atgatggtgcttgatcagtctcgacgggatgttatcgagtcacccagacatctggtggtgatgggcggccctggctcagggaaaaccacagtcgcattgctcaaagctgaagcatttctaggccgactagacctcacagagtatcagcaggtgctgttcctgagcttcgccagggcaacggtcgcgagggttgcggaacaggccgggaaaatgctgccgaaacttgagcaggctcggctcgaggtcaacacctatcatggcttcacgtggaatttgctgcgcagccatggctacttgctccgcaacgggcgacccttatcgcttcttcctccgccagaggctgctgcgcgattgtccacattgagcgaagaacagatagccttggagaaaatcaggctgctcgaggaggagggactgttgcacttcgacctgttcgccagcaatgctgccatgttgctggagagaagccagtcgctgcagcgcatctacggcaacagctatccactgatcatactcgacgagttccaggacacgaacgaggatgagtggcgtttcattcgggcgttgactcggcatagccaggtgctggctttagctgatccggaacaacgaatctacgaattccgcggtgccagtgctagcaggattcaagagttcgaacaggcctaccgccccgcctccttttcttttggaatggaaaatcaccggagcacagggaccgacattgtccagttcggcaacgatctgctggcaggagtaaataggggcagagcctacacccatgtgtcggttacaccctatgcgccgcgcaaggggatgctccatcgggctttcaaatttgccattctgactgctatagcacggttgaatagatacggacgtgattggtcactagccattctggttcccagcaaaagcttcatggctgaggtttctgcgtacctttcgagtgatgcggacaatctgcccaggctttcccatgaggtggcgttcgaccaggaggcggcagcgctctctgctacggcgatcgccgcgttgctggaaggtggcgcgaatgctgaactcattactgaaagacttcttagaaacctatgtgctcatctgcgtggcaggaaaggcgagaaagccccaagcaaggctcacttggaattggtactcgctctggagcagttgttcggtgggcaagcacttcgtcgagcgccgcacaagcgggttcttgctgccgcacagcttattgcagtccagcgtcttgagttgcaattgactggcgacccccaagttgactgggttgccgcacgacaatttctggattcaagcaccgagcaggttttcaagcagatcggtatagatggtcggtatgtgcgcttgcttgggaaggggtcgctgcttcgaagccgtttgagcgagatgtggcgctcagctgaaggctattcaggagcagagaagctggtgcgggatgctcttattcaggaccactttcaagctgtcaccagggactggaaggggctccatctgatgaccatgcacaaatcgaagggaaaggaattcacagaggtcattctttatgagggagtgatgaaggggcgtttcttgccgaccgaagcaaccccggatcgcgtgcgtcaggcccgtttagccatgcgtgtcgctgtcactcgtgcaatgaagaaggcgactatcttgacgccgactgggcgaaatcgctgcccgttgatttga

SEQ ID NO: 73040 - DNA, 2073 bp, Escherichia coli KTE113; identical to SEQ ID NO: 72136

SEQ ID NO: 73041 - DNA, 1734 bp, Escherichia coli KTE113; identical to SEQ ID NO: 72137

SEQ ID NO: 73042 - DNA, 1785 bp, Escherichia coli KTE177
atgtatttatcaaaactcggaatccgcaactttagaaattttgaggcggctgatattcccctagcaggtaatgttgtgttattgggggaaaatcgtgtcggtaaaagtaatctgcttttcgcaattcgactggttattgatcctactctgcctgattcagccaggcagcttaagctgtcagatttctgggatggctgcagccttgaattaaaccctcaaattgaggtgcaccttgaatttgccgattttgacagtgacccttccctctcagctctgttgaccgattttcgcatagcagaggaccctaccgtagcaaggttgagctacatatttcgtaaaaaggaagaagtaggtggggctccacgttcgggtgatgactgtgaatttattgtttttggcggaggtcaggaatcgcgaaccattcctggacgcgtcaggcggcggatctccattgatatgctggacgcgttacgcgatgcagaagcacaacttgcttcctggcgaagctctccgctacgccccttattggaagatgccttctcttcactaagccgagccgatttggatcgcgtagcaactgagcttcagaccgcaacggaaaccatggagaagttcccatcaattaaggagctcgaagattctctgcgtggtggcattcttgacctagctggaactgctcacgatttagatgcccgcctccgttttgcacctgctgacccgctcagattgatgcgttctatctctatgttcattgatgatggaaagagaggcattattgaagcgagcctaggttctgcgaacgtggctctgatatcactcaagctagcagagtttgcatggcgacgtgaaaagaatgaacgtaatttctccctgctttgtattgaagaacccgaagcacaccttcacccacagcttcagcgcgctgtttttgacaaactcttcaataatgtcgataaagatcagtcattgattgtaacgagccattctcccacgctggcaaccattgctcctcttcgttctatcgttcgcatttgcagggatcctgaagggcgatcacgagctttttccctagctaaactgccagtaagcagtgaagaactcgacgacattgaacggtatctaacagcaaccagatcggagctgctttttgctaacggtgtaatatttgttgaaggcgatgcagaggaggttttacttccaggtttcgcgcaggctatggggatcaatctcgaccagcttgggattacggtatgtaacgtagcgggagttaattttgaaccatacgtgaagctggcagccagcctcggactacccttttccgtcgtaaccgactgggacccactggatggtacgaaacaaccgatgggtaaaacacgttcaattggtatctggcaggcatttagcgatgtatcgggaaaactaaaaaaactaactcctgggaatattaattggctcaataatcgatcttatgaagagtgtaagactgcatttgaaaagattggtatttttttaaacgatcagacgtttgaggtcgccgttgccaatacgactggcctcaaagaagcgctgctggatatcctcgatgagcagggatttggtgtgttacgttcatcaaggattgcttcatggcgtgccggtatggttccagacccgacgcaacttctcgcgatgatatctgacataggtaaaggacggttggctgccaagctgaagcaaaaagcacctgggcttgcgccgccggagtatattgcttcagctattcaatatgtggtgtcgaatgtctga

SEQ ID NO: 73043 - DNA, 1782 bp, Escherichia coli KTE177
atgtctgaccggcgtgcactttcagaggctctgaatgagctattgccgaacagagagcaatacgctgcggccacataccccggccactgcgtagttattgctgggccaggcagcgggaaaaccaaaacacttacaaccgcaatggcacgagccctgattgaagaggtcgctgacccccgaggcgtagcctgtattacttacaacaatgaatgcgcttctgaacttgaaggacggctagcatgctttaacgtcattggcgatgatcggaactttattggtaccgtgcatagctttgcattaaatcaggttttaatcccctactcacgatgtatacctggtttgctgccggatggttttcgtgtggcgaccagagatgagagtcgcgcggctgttgaagtggcttatcaggctagattcggagctgtcggagatcctcatgctcggtggaaatttgcagaagagaaacgacgccgggatgtgaaccggctcctaccggcttggcggaataacaacccggagctggcagattttattgatggttatgaggcagaacttcggcgcttaggactgattgactatgatgatatgccactcatcgcttttcgtattattagcgagcatgaatgggtacgtaatgctattcggtcgcgctatcctgttttatttgtcgatgaataccaagatctggggcacgctcttcatgagctggttctgctgctgtgctttaatggtggaatacgattatttgcggtcggtgatgcagatcagtccatttacggatttaatggtgcaaatccagggctactggatagtcttgtttcacgggcagatgtaagaccgttccgtcttcgcttcaactatcgatctggcgcgaaaattatcagggcatcactaggggcgctgggagaagaccgcgattatgttggccccgatggtaatccagagggagagttaggatttcatgggattaatggcgattatgacgcacaggcgcattttatcgctcatgatctaattccctcgttgtttgaaagagggtttcagcctgaacgtatcggggttctttaccgggcagcctggcttggcgataaagttgcggatgagttcaaggccaaaaatattgccataatacgtgctgacagtaatgctctcattaagcgcaattctcgtcttgcccgtttcatcgaagcctgcagtcagtgggtaactgggggatggaaagaagcctctccgccatttaacctcttactgggtcaggcgctctttcttgtttatggccgccgcgcaagccgtgctgaagaacaattactgaccttacagctcatcacttttttacgaaacggaattgataaagcggaaagtgctcacgaatggctgagacgtttaaatgatgagattatcaccgactggatggctatctcacagaatactcagcaggaatgggatgtcatctctgagttactgaaacgaaccgatccccttaggggactggatgtggctctggatatattcgctggtaaagtagaaggaactggacgcatcacccttagcactcttcatagtgcaaaaggccgagaatttgatgtagccataatgtttggggtaaataaatatgacttcccgagtaagcgagatctagcttcagataatgcccttcgcgaggcccgtcgcctcttttatgtaggcgtcacccgtcctcgaaaagaactgcacatggtttatgaaaagggtaaacattcaccttggattgcggaactgtatcatcgcagccagcagatatag

SEQ ID NO: 73044 - DNA, 2133 bp, Escherichia coli KTE232
atgtttatcaagacgctctcaataagaaattttaggaattttaaagcaacatctctatcctttaaaaaagaatgtgttaatactattgttggtgaaaactcatcggggaaaacaaatgtttttgaggcgatgagacttatactcgatgatactttgccttattataaacgatttcttttagaaaatgattttcacagagggttaggaagtgcatttggccattgggtaatagtcagcctagagtttgatgagataggcggggatgaagaatcagagctactgtgtcaattaaatactactgttaatggtggtggcactgggcgaataacttatatttatagaccgcaattttacataagagagcaactctttaaattgaatgaaattgaagattatgaagaacgtaaaggtgcatatcatactctgaaagaacagcatttaatcgataagacaacctatgaatctttagtgttatgccaaggtactgccgattttagtgataaccaaacatactctcttgtggttggtgattttaatgcactattattctctgatcctaaactagaacgaattaatttaattggtaacaggcagcgtaattataatatacaggataatatcagttgcacctatgctcgggctttgagggatgtggtaagtgaacttaagaacaatcgattcaatccatttcaaaagctcttagaatatgtatctaaaggaattgataatgatgagaccttgagtaaaaacatcagggatgttaatgaaaaaatatcatctattgatgaggtgaaaaaactctcggatgggatattattatcaataactaatgcggttggtacaacgtattcaccagttttaaatgttacctctgaattacccagtgaactcaaagaattggtaaaggttttacaattaaaggcaggagactcactttctgaaggatatgtctccgaactttcagagatgagtcttggaggtgcaaatttaatctatttggctttgaaactgtatgagtacgaagagggtatcagtaaaaatcttttggctaacttcctgataatagaagagcctgaggctcatattcatacgcatatacaaaaatcattatttagcaacctaaaaaacaatagaactcaggtttttatatctacgcattcaacccatatttcatcagtatcaaatatttcaactactaatgtacttgtaaaaaaaggacttgaaactatttcatgttcaccatcaaaaggactcgaagaggagaaggttaatcgtattgaacgattccttgatgccataagaacagatattctttttgcaaaaaatgtaattctaattgagggggatgcagaggaaatattaatccctcaccttgtcaaaaatacttttggcattactcttgatgagcttggtatttcattgatatctgttcgaggtactgggtttgaattgctatcttcattgtttcatgcagatcggattaaaaagaaatgtgcaatattaacagacgatgatataaatctgtatggcgacaataagccagattatttatcacaagaagaatataataaagctgtaaaatcagcagagtccggtattgcacgcaaagtcattttggatgaaattgttggtgataacagttttattcgtgcctattactctaaatttacttttgaaatcgatttagtcctgtcaggagccgtaaggtattttgatcagatagctgatgaatcctttgagaaaaaagccttttatagcccatatcaagaagcgttttcatcctctgatagacaaaaaatcggatgttacgctttaaagttagcaaataagcataaaaaaggttggtttgccatgatgttggctgacaagcttgatgccgatttccctatacctgaggcactttgtcattcattaggatttacgggtgattttaataaatttactctagctaagatggttcgatatcgtgtcgaagtcattaaaaatagagatgggaatgatttgttaaataatattcttgggcgtgatgatttggcttttgtcattgataatttagatgctgccttggcagtattccaagagcattgccctaatgatcctttaactcttttgcttgaggttcattatggatga

SEQ ID NO: 73045 - DNA, 1677 bp, Escherichia coli KTE232
atggatgatcaaaagagaggtttgataaagattaaaagcaatctattggttagcgcctgccccggggctgggaaaacaaaattattaattgggatgcttgaggataacttatatcataatgaaggttttcgttggcacattgtactaactcacactaacgctgcagctgatgagatctctagcaggatagataatctcaatattgaaactgatagggtttggtgcggtactattcattcatttcttttagagtgggttgttaaaaaatacgctggagccatcccacgacttgtggatgggttttctttgctttcagagtataagcaaaggaaaataattcaaagtatagaagttgataaaaaattaggaacaaggctacgttataattgtgatgaagaaggaaatgcatttgtagtaccttattgccacgcggcggacagcaaagataaagagttgctggttattcaagaatataatcgcatcaaagaggataataaatttattgattttgatgatatcataaaattaggtgttgatttccttaataacaatccaaatatatgtgagcatctttcaaagttgattggtaatatttacttggatgagtcgcaagacaccagtttaatccagcttaaggctttgtcatatataactagatataatcgtgtttctgtttttatagttggtgataatgatcaggcaatttatcaggatcttggtgtttcagtaaaaaacaaagatattctaaaatctgagttacaattatctgaattaaggcatgaaacactgtctggttgttaccggtcgtctaaatcactggttgattattataaaaaatattctgcttcgcgtaatgatgttatttctatgcgggtaggtgatggtaaactgcctattataagagatatgtcgaaagatgaattgcctaaaagaattttcaatctaataaatcaatatcacttaaaatataatggtgttgatggcattgcgattataggcccggataaatactacctcatgggactgatcaatgatttgtatgatctttctgagtgttttgtttatgattttcaatctacaaacccactttattgtgtaaggaatacagttttttacgaattaataaagttagttcttctagatgtaagtgtggttaactatcaaagaagacattctctggcaagaaaaataattgactcaattcctgagttaagtcacctaagtccattgcagcttaagcgtgatttaaaagaattccaatgcgtaaaaaataattttattttatggttgaaagaactttatgtctttttagaaatgaagtaccaaaaatccattaagatagagacagattacaatatttgtaatgcagcagcttctgtagcacaacttaaagctggtatgggggcgataaagaaaatgataaacaaagataaaaatgttgtatctgtgtcaacaatacatggttcaaagggtgaagaatatgattatgtaataactattggatatcatgacaaagtagttccacatcaatcatcttatgataaaggaaatgattatgctcaagatattgcaaacagattaatgtatgttgctttctctagagcgaaggattacatgaacatatttatagatgatcgaaaggcggttagccctttctttattcgagaattggactga

SEQ ID NO: 73046 - DNA, 2085 bp, Lactococcus raffinolactis 4877
atgaagattaaaactatcgaaatttcaggttttaggcaaatttcaaatgccgcgtttaatttggaagatagacttacatttcttgctggagctaataatagtggtaagacttcactagtcgaacttctgaactgtgtttttaattttggtaccgaaaaattatccggtgaagatttttctgtagttaatactcaacagtgggtaaatgatgtttatccacaaatattaaattattttcaagaagatactcaaaaagaaaatattatctccaatattcataatttgatttttcctaatacagatgaaaagaatgaagtaattattgagcccattaaactaaaatttcaaattgattatgatgttacaaatgatgatataagaaatttcgctgactacataatggatcttgatccatcttcttccagtttctattttgtttatgaatataatgtagataactctctttttagaaagaatctaataaatcattacgataaactagaacaccgcatcagaaaaatactttcagatcctgaaaataataacgataaaaatattaaaaaaataattttgaaagtatattttgaatccctatcagaaaccattagatttacagatagtaacttcgaaaatggcagaaagattgatcgtaaagatttcataaagcttttcaattttcaaaaaattatggctggaagaaccttagatgatactagtacggacagaagtaaaatcttaagtaaaaatattgttgatattgctagtaaagatgaaaattgggcaaaaacgattgaaagcttacctgatacaatattggaggctatcgaaaatgaaaatatcgaacaaattataaaaagcacttccattgactctcttaaagaaactatgtcttcaattttgatgacgaacggtggtcagacaaacgaaatcattattaatatagacatcactgaagattctcttaaatcactacttaaaaacatcacaagtgcccaatatatgctggatgaccactatttaaatgaatcatcacaaggattagggtatagcaatcttatctatatgcatatgcaactagaaaaatttaataaaacaattgatccattgttggttaatctttttgtaatcgaggaaccagaatctcatatgcatccccaaatgcaatatgttttttcacaatatttacttacttactttgcctccaaaccagaattgcaaggttttattactacacactcgcatgaagttgttagaggtgcaaagttatctcaattaagggtacttagaaaagttaatagctttgagtgttcattatatgatttaagaagttttcataatattttagcaggtacacctgaattgttggatttttacaattatttttatgcaattagtttcccgaatattattttcgccgataaagttattttgtatgaaggtgatacggagcggatgcttattaatagtcttttgaaagatgatcaaacaccatttcctaaactaaaaagtcagtatctttcatttgttcaagtcggaggggcgtacgcagttaactatgaacctattctaaaatatttggatataaaatctctaataataacagatatagattatggaaacgaatgtagtactaaaaatgaaatagatgtttccaaatctacaaacgattccataaataaattattaaatatgaaagtaaaaaccgaaaacacaaaaactattaaagaaatttactcctatagagaagctaatgaaccgtatgttttaataagagataatatatgcctaactttccaaggggataaggatggctatacaagaacgttagaagaagcaatgctatgcaaactgtatgatgtaaaggtatttgatacatcgacaaaggaacagtggaaagataaaagaaatagggataaattaaaatattcgatccctaacactgatgaccttattggagtaaggcacatcgttaatagtacttcaaaaaataaaacagattttatgtattctgctgtattaaataataaattaatggatacattaccttactatattgaggaggggttgaagtggttagaaaaatag

SEQ ID NO: 73047 - DNA, 1953 bp, Lactococcus raffinolactis 4877
gtggttagaaaaatagaaaattttttcatcgttaatgctcccgcaggcagtggtaaaacaaccactattcgagaaatgattaataacattatttcgattaattccaaagacaatgtattatgtataacgtataccaatagagctgcagatgaactttctaagagtttttcttctcctaatatttctatttcaacaattcactcatttttaaacaattttatgaaacaatattttggtagccaagaaattattgacttatattttgatacttaccaagatagtatacaacaaagaattgataatagagaggctaaagaaaatcagactgaaagcaataaaaaatatattgaaaaatacggagacctgagtatcgatgttcttcgaagaaatattacaaatatatattacaatgaaaatagctttaattccctatattatggcggcttaggccacgatgaccttatttcattttcaagtaaaattattctaaaatataaagtgatacagaatagattatcatacaaattccagtacgttttcattgatgaatatcaggatacaaccgcagatgttctaaatattttttatgaaagcttaaacgaaaaaagaacaatcttatatttattcggtgataagatgcagcaaatttacaaaaattatgatggtagctttgaaccaaagtttttaaaatttgattctagtaaagctttaactactaactaccgttcaattcccaaaataataactctgctaaataatatatacaatgattccagttttgttcaaaatgtttctgaggatatggtcaagattgctcctaattttgctcctagagtaattatcagtagtgatgttgacgaaaaattaactcaaattttggatgagtatccgaattcattaactttattcttgtctaatcaatctagatttcagaaaataggttgccctaccctatatagtgcgtttagtaagatgaatcgttattcttttggtaaaaaatatagtgtagtggatgtgttaacagataacactaaagataatcctgattctttgatgagacttattttttcagtagcttatattaataataactatgcatctaataactacggtgcaatcattcaaaaaattaaggatgaacagtcaacgattggattaaaagactggaagctgtcagaccatcaagataaagttactttaaatgcaattctagaggaattggcattgatattatcttcttcaaaaaaatctatcaaagatgtcttgatttttctaaaagaaaaaattccacaatcagcagtaacattaagcgagattatggaagatgaaagttattctgatgcattggatgtgcctatcgaagaagtaataaaactttataactatttggagtacccaaaagtatccacacaacatggcgtaaaaggagaaagtcacgatgaagttatttttgttgccgatgatagttataatccacatgtgagtatgtataatttttttgatatttggtcagataccgaactctcactcacatcattagaagaattttattatcaatattctttcgaattaactaaaattactgaaaaagtagggatgaaaattaacaatttaaagaaggatagtttcaccgctcatgaagattacttaaaaggcgttgcctctagtataatgacaatgtttcaggagaacgatttatttaataaactctgttttctagaatatcaaacattcatatccaatccaaatgtgactaacgcaaaaaaatgctttaaagaatctcaagtatatggaattttgagtgcttataaactcttttatgtggggtgctcgagagctcgtaaagacataactgtcttattagatagcaacaaaacaaagggcaatatggatttacaaatacaaaaatttgaacaacttggatttaaagttcataacgaatctttgatttaa

SEQ ID NO: 73048 - DNA, 1785 bp, Rhizobium tropici CIAT 899
atgcgtctaagcaaattaagcgttcgaaattttcgaaattttcagtccgttgacatcccgctctcggacaatgtcgtcttgttgggcgaaaaccgtgttggcaagagcaatctcctcttcgccatccggttgatacttgattcaacgctcccggattcggcccgtcagctcaaactgtccgatttctgggacggggcagctgccccctacgaggatgcgatcgaagttcatctagaactcgcagacttcgcgagcgaccttggccttctggcgatgctttctgagttcaggcctgcggataatcccacgatcgcgcgcctcacctatatcttccgcaagaaggccgatatcaaaggcgcgccacagtcgagcgacgactgcgagtttctcgtgttcggcggcggtgttgagtcgcggaccgtgccgagcaaggtccgtcgacgcattgcgattgatatgctcgatgccttgcgtgatgccgaaggccagcttggtacatggagaagttcacctctgcgtcccctcctcgaagacgcaatcgcgggagtgacgcgagcggagctcaatgccgtcgcggttgaactcgacaaggcgacgaaggcgctcgaggcgtttccgacgatcaaagatctggaagaggagctgcgcaccggcattctgaatctttccggcaaggcgcacgatatcgatgcgcggctcaggtttgcgccctccgatccgttgcggctcttccgagctatcgccatgttcattgacggcggcaagcgtggtattgcagaggcaagcctcggatcggccaatgtcgcattactcgcgctgaagcttgctgaatttgcctggcgccggaagaaaaatgagcgaaatttctcgcttttgtgcatagaggagcctgaggcccacctccatccgcaactgcagcgttcggtgttcaaaaaactcctcgccggcggggatgcagcacaatcgctgatcgtcaccagccattcgccgacgctcgctgcggtcactccgttgcggtcaatcattcacctgaggacgcgcgatcagtcgacgcgcgcattttcgctggcagagttgcctgtcacgcctgatgagctcgacgacctggagaactatattgatgccacgcgtgcggaactgctgttcgcccgtggcgtgatcttcgtggagggggacgccgaggaggctttggtaccagtgttttcctcggccttgggccatgggctcgacgatctcggcataagcgtatgcaatgtagccggtacgaacttctcaccatatgtcaaattggccgaatctcttggcatgccctacgcggtgatcaccgactgggatccgttggacggcacgaaattacccctcggcaagacacgcacgctggacctctgggatgacatcctgaaggtccgcaagcagcctgcggtcaatcccgtgcagcgaggtcaatgggaagcgctcgactttgccgcgttcgcatcaatggttgcacctgccgggatctttcttaacgagcagacgttcgaggtgtcagttgcaaacacgccgtcccttttgagtcctctcctcgatatcctcggcgcccaaggtttcggatcgatccgaaccaaacgcatcgcctcttggcgatcgggtacggcttccgttgatcccgcgcaactgctggctatgatcgcggatatcggcaaaggccggctcagcgcaaaactatcgaaaaaagcggtcggcctgaccccaccgaagtacattgccgatgcaattgcgtacgtggtgagccgtgtccagtag

SEQ ID NO: 73049 - DNA, 1779 bp, Rhizobium tropici CIAT 899
gtgtccagtagtcagcaactgcttagcgcgatcaacgaattgagcaccaatccggagcaagtcgcagctgtgcgcgagacgggccactgcgtcgttctggccggaccaggaagtggcaagacgaagacgctgacgacagcgatggcccgcgctctgtctgacgacatcattgaacctcgcggggttgcttgcatcacctacaacaatgagtgcgcaattgagcttgagacacgccttgcccgccttgggatcgaaagtggtgatcgagccttcatcggaaccgtgcatggattcgctctgagccaggtcatagcgccgtacgcccgatgcgtaccgatcggactgcctgcagagtttcaggtggcgacccgtgcccagacacgagctgcggtggaggcggcctacgcgaccgcgatcggcggtagcgacgaccctcatcgtcgatggaactttgcgtcggaaaagcggcgacgggacgttgatcgcagccggccagactggctaggccgcaatccggagctcgccgtgttcattgaggcttatgagaacgagcttcgacggcaaggcttgatcgatttcgacgatatgccgctcctggcgtatcgcatgatcaaggagcacgactggatcagagatgcacttcacgcgcgcttccccgtcttgttcgtcgacgaatatcaggatctcggccatgcattgcacgagcttgtccttttattgtgttttggcgggggcattcgcttgtttgcggtcggcgattccgaccaatccatatacgggttcactggtgcaaaccccgaactgctcgatagcttgacccaacgctgcgatgtccgcaccatcagactgcgcttcaactaccggtctggcgggaaaatcgtgcgagcgtcgctcggcgcattgggagaggagcgtgattatcgcgaggcagaaggagctccagagggagagttgacattctggccggtgacgctcggccttgatgtgcaggcacaagcgattgccgacactgtcattcccgatctggaaaagagaggcttcgcacttgacgaaatagccgtgctgtatcgcgctgcatatctcggggacaagattgccgaagccttgaagcgggccggcacgccctttgtacgcagcgacggaaacgcactggtcaggcggagttcgcgactttcccggtttatcgaggattgcgcgcgttgggtcgttggtggctggaaaagtgctgacccgcggtatagccgcctgcttcagcaagcgttgaagatcgtctacggcgctcaagttaggcctgacgaagaacaacttctttcggatcagctcatcggctttctccaagctacgatcaactccagcgacaccacccacacctggctacaacttttcgacagcgagcttattgcacattggcggacgattgcgcgaaacgcagagcaagaatgggaggtctgtgccgagatgatccgcaatactgaccctgtggccgacctcgatatcccgctcgcccatctcgccggccgtttagagggaaccggtcgcgtgaacctgagcacgctgcatagtgcgaagggcagggagtttgatgccgtcgtcatgtatggcgtgaatgcaagcgattttcccagtcaacgcgatcggcagagtaccgttgcgctccgtgaagcgcgccgtcttttctacgttggcgtgacgcgcccacggcgggaacttgcaatggtctatcaagagcaccatcactcaccttgggtgaaggagctcttcgacagaagtcaaaaatag

SEQ ID NO: 73050 - DNA, 1956 bp, Clostridium pasteurianum DSM 525 = ATCC 6013
atgtatatatcaaaattaaacatagaaggttataaaaattgtaaaaataaatctgaaatacaatttaataaagggttaaatatactagttggagagaatgcatcaggcaaaacaacaataataaatgcattaaggatgattttaaaagagaatgaattttcttatatgaatattagtgaagatgatttttataaatcatttaaagatagcgaacaagcacatgcaattaaaataaatataagttttgaagagttaaattcgaatgaagaagtaacattcttaacttggtgtgatgcagatttcaaagcaaaattaaatttggaagttaatagtaatccgaatagaaaaggatattttagaaaaagtatatggggcggcgcttctaaaactagtgcatttgaagaagaaacttttgattgtatagattgtatctacttaccgccattaagggatgcagaggagaagttaacaaatggtaaaaaatcaagattagcaactttactaaagcaccaatataaagataaaaatgatgaaaataatttagttgaaaaagtttcagaattcaataataaaattacaacaaatgaaggaaataactacaaagaaatatctaaagcaaaagagaatattaattttaatataaaaaattcaatgggagaaatgtttggtcaaagtattaatttacaatttgcagatgtttcgtttaataaaatacttgaaagtattaagatggtatttttccctgaaatagatgccacagatataaaaagatttagagatatagcaataaatagtttaggatataataatttgttatatatagcgactgtatttgctgaattgcaaatagcagggaaatcaaaagacttatttacagtgctgcttatagaagaaccagaagcacatctccatccacagttgcaaataaagttaataaaacatcttgaaactttagcaaatcaacaaactaacactcaagttattattacaacgcattctccaatattagcatcttcggttagtatagacaaccttatacatgtatctgagcaaaatgatacgataaaaacaacttcattatgtaaaatacgattagatgatagcaaaaactatataaacagatggctagatgtaacaaaatctacgttactattttcaaaaggagttatattagttgaaggaataagcgaaaatatgctaatacctgaattggctaaaatatgtttgtgtaaatacaataaatataattcagctaagcaattgcctagttcacttgaggaagctggtatatctgttataaatataaatggtattaactttaagcactttctaaaactgttttgtagtattgatgaggataaaaatattataaaaattccaataaaatgctcagggatgactgataatgatcctgaaaaagaagaaatagatgctgtaaataaaaagggtgagaaaataaaagttaagattgatacatatcctaattttaatgataatattgaaggcaaaaacagtgcgttaaaattaatttctcaaataaataatagtaactatgcaagattatatcattctccattaaagacatttgaatatgatttggcaatggaaggaaatattatgataatggttaaatgtctaaataatatatggtattcaaaaactggagaagtaaaagatacatgtaaggatataagtgaaaactatgatgatactaaattacaagagtattctaagtttatccataaaagagctagtgataagaaactagggaaaggcatatttgcacaggaactagctgaagatataaaaaaagaatatgatgaaaaattattagaactaaattcaaaagatgaaactaaagaaaatgtatatgatgaaattatagaaatattcaaagtacctcaatacatatataattcggttgtttgggcttgtggtggtgatgtaagtgactaa

SEQ ID NO: 73051 - DNA, 2013 bp, Clostridium pasteurianum DSM 525 = ATCC 6013
gtgactaaagaagaaatgcaaaatgaagttgctaaaatattatgtgaaaaaaatagtgatttaacatgtgatgagtgctataagagcaaaaaagatatagattatatttgcaaaaattcaaatcattgtagaatatcagaaaaaacagaaaaacagcttcagtatattttgtcttctataaatgagagtacatttttagaagcttgtcctggaagcggaaaaacagaagtagttggaatgaaatcagcttatgaaattaaaaggtgggatagcaattctaaaaatggaatggctattttaacttttacaaatgatgcaactagtgttattagagaaagagcgaatcaatttagtaaaaaaacatcattctatcctcattttataggtactataagcagctttattcatcaatatattgctcaaccttttggatatagtgaaataaattactcaggtatagatggagactattctttaaagttaattgatgctgatttaaatgctgttactaatccttggctaaaaaaatacaaatgctcgataccgtatataggtaaaaatggaaaaagaacagatatattcgctaatcaaatattctacgatgaaaaaaaccgaaatttttatataaaaattgataaaatttatttatcaataaatgaatattatgatatccaacaaatgcagaaacatattaaagatagcagaaaaaaatttaataataattattattactcaaattcctatttttataatgaatttaaaaagtgtaaaaataattttcttaaagatggttttgcaacatatgaagatatgaattgtattgcctatcaaattttagataacgatacaatagtcaagaaaatatcaagaaaatttcctttaattatagtagatgaatgccaagatttatcatggatagaaattgaaatattgaataaattaaaggaaaaaggaacaatattacattttgtcggggacataaatcaatctatatttgaatttaaggaaatagcattagaatctgaatatacatctgaatacattaaaagattaaaaaagttagaacttactgataattttaggagttgccagcctattgtaaatttatctaataagttgatgagtataagtaatacaataaaagggatagaagaaaataaatttttagaaaatagtgttctatatttagagtatgaaaatccggaagaagctgttactaaatatttaagaatattaaatcattttaaaatatctgagagcaagtcttgtataattgtcaaacagaatatattaaagaatcagttgctatgtaatataaatgataatgaaagacatttgttaatatcatcaattcagctttggggaaaagaaaatcctaattcgaaaaagaaatcactggaatatgcaggaaagcaaatttcaaaatggtttggaggagctagaagtaaaagtagttattattgtcctaaagatataacttcagtattcgcatggaggatatttttaaaagatattttaaatgattgttatattaatagcaaattaataaattatgatagaaaatatggcaagtggtattgtgatgcaagaaaggaattacccagtattattaagaaaaactattgtaaaatacaatgttttgataatctaataagagactttgacgaaattttttcttctaaatggtatataggaaaagatgttcaagaagacattttaatattaaatagtgaattaaagaataatgatagtgcgataaagatatcaacagtgcatggatctaaaggctgtacatatgatagcactttagttatatctagtgagacagctaaaagtgaatctggacattggaaaagtcattggatagaaggaacagatgaagataggagggttggctatgtagcaagtacaagagctaaatttcttatgatttgggctgttccaactcttggtaaaaaggacaaagagttaatagaaggttatggatttcagaatggcaatactatagtttaa

SEQ ID NO: 73052 - DNA, 2004 bp, Streptomyces turgidiscabies Car8
atgcagctgacgcatgccgaagtgatcaactttcgcgccctggagagggtggacgtccgagttgacccgaaggccactctcatcgttgggcgcaacaacagcggcaagacgtcgttcgtcaatctcttcgagaagttcttcggtgaggaggacacgaggttcgtcctggaggacttctccacctgccgtatcgccgacatcgaacaggcgcggcagatcttcggcgaggctcaggcgcatgccggccgtggagactccgagacgagcgaggacctgctggccaaggcctacgacctcgtcccggccatccgcttggtcctcaccatcgagtacacggaagacgacgacctcgcgccgctcacgggtgtgatcctcgacctggacgacacctgcttcgaggtcaagatcgaagcggcgctggaggtggcccgcccgcacgacttcctcaaggacttctggtcggccagccagcgggagcagttcgatcgcatcaagtggctgcgcaagaacttctcggactacttcgccccggcttatcgcgcggtcagcgccttgaacgagagcgtccgcaaggagatcaagcgcggcgccgccgaggccatcctgtcggtcaagttcgtctacgcgcagaccaagatggatgacacgccgagcgacaaagcccgcacgctgtcgaagacgttcgaggcctactacaaggtcaacagcggcaacgaagaccgtcaccagagcatcgagcagatcgagaccgctctggcgtccgcctcgcagcagctcgacgacaactacgccacgctgttcgacccgatcttcgaggacctgcgcaccttcggagtgggcaccatcaccccggtccagaagccccgcatcgtctccctcatcgaggcctcaggcatcctgcgcggcagtacccgcatccagtacccgtccggggatgacgacttccatcttcccgaaggtcacaacgggctgggctacagcaagctgatctttacgatcctgcaggtcatcagctttcaccagacctacgagcgcaccacccccaagccggcgctgcaggtgctgttcatcgaggaacccgaagcccatctgcatccccagatgcaggagacgttcatcaagaacatccaggacttcatcgaccgtaagacgggctggaaggtgcaggtggtcatcaccactcactcctcccacatcgtcgccagcagcggcttccacacggtgcgctacttcgaccgttccgagccgcagctcacggtcaaggatctctcgaccttcgaggccaacgtaaaggccactccgcagggtgacgagaccctgcgcttcctgcgccagtacatggtcttgcaccggtgcgacatgttcttcgccgacaaggtgatcctgatcgagggcaccgcggaacggctgatcctgccggaaatggtccggcggtgcgccaaggggcttctgcaccagtacgtatcggtcatcgaagtcggcgacgcctacgccgtccgcttccgggaactgctcgccttcctaaacgtcaagaccctcgtcatcaccgacatcgactccgtgtgccccaagcaccgcaaggcctgcccacccggccaggggccgacggtcacctcgaatgcgacgctcaagaactggctgcccgcaaagtccagcatcgccgagctgctcgccaccgacccggccgacaaagagcaaggacacgtccgcgtcgcctaccagatcccggagaaggattcgggagcctgcgcgcggagcttcgaggacgccttcatcatcgccaacgcagaacccctcgtacgtggcttccgccagctcgtcctgaaggcggccttcgtcaaggaggtcggggccgaccccaccgccgacgacatcgaagccaaggcctacgacatcgcacagcaactcagtgaccacaagacggacttcgccttcgacgtcatgctcctggaggactgggccgttccccgctacatcgccgaaggactgcagtggctcgcctag

SEQ ID NO: 73053 - DNA, 1638 bp, Streptomyces turgidiscabies Car8
gtggctcgcctagacaccctcgaagccgtcaccaccgagctggaagcccgacgcagcttcctcgtcgaagcaggggccggcgccggcaagacgaccaccctggtacgcgccctgcagcacctcctgacccaccaccgcgtagacctggaggcacacggccggcggatcgcctgcatcacctacaccaacgtcgccaagaaaaagatcgtcgaacgcatcgccgcagacccgctcgtcgacgtcgacaccatccacgaattcctgtggagtgtcatccagccctaccagtttgagctctggcagcagatcctcgactacaacaaggacctgtccaaaccggaagaccttgatgatgtcaccgatcctcccgtcatcgagtattccgaccgcgggcgcaggctgcacgaggggcgcatctcccacgacgacgtcatcgcgctgtcgctccgtctcgtcacggcccaccccaagctcatacgcatcatcaccagcaagtacccggtcatctttgtcgacgagtaccaggacacttcgcccaagacgatccagctgttgctggaccacctggccggtgcaggccgcgagaaatgcgtggtcggtctcttcggcgactccatgcagaagatctacgagtcgggcgtcggcgcggtaaaacggcccggccttctcaccgagatcaccaagcacgagaactaccggtgctcgcctccggtcgtcgaggtgctcaaccggatgcgtcccgagctcacccaggacgccgtcggcaagcagcagaccggcgaggtccacttgttcctcaacagcagcgtcccggccggccctgcgcgactcaccgccgccgaagcaatactcgcccggaacggctggacacgggagaacagcaaatacctgctgctcacccaccgagggatagccggcaccctggagtacgccaacctcctagagcagtaccgaaagctgggccgctacggtcccgacgacctcatggcacgcaacgagccgtacatccagtacctcacccgcatcgaggccatcagcgccgcgttccgcgacaacgacttcgccgggctgaccgatctgctggacgaggggcggacacggatcacccgtcacgccaacaaacgcgccatcagtgacgcgatccgtgcactcgacgccgtacgcagcaccggcaccatcggtgaggtgctcgatctgatggccgacggccatctcctcgcccagccgggaaaactcaaggatctggaacgccggagatccgcaacggacctggacgaacgcgaccagcgacgggcggacttctccaacaacctccgcaccgtgtcctaccgtgaagtcatcagcgtcacccacttcatcgacgaactcaccccgttctcaacccagcacggcgtcaagggtgacgaattcgagaacgtcgtagtggtggtcgacgaccgcgcctggaacaggtacagcatcagcaaaatgctcgccggcaccgacaagcccgaccgtaccgaacggtcacgcaacctgttctacgtctgctgctcgcgagcccagcgtggcctggccgtggtgttcatcgacgatctcccggacggagcagagcccacactccacacctggttctcttcaggcaccatccacccgtga

SEQ ID NO: 73054 - DNA, 2082 bp, Elizabethkingia anophelis R26; identical to SEQ ID NO: 72534

SEQ ID NO: 73055 - DNA, 1680 bp, Elizabethkingia anophelis R26; identical to SEQ ID NO: 72535

SEQ ID NO: 73056 - DNA, 1830 bp, Pseudanabaena biceps PCC 7429
ttgaatattgtcatcgacaccatcagaatcgcaggttttcggggcatcaaaaatcttgagatgtctctgcctcgcgttactttgctgattgggatgaataattcaggaaaaacatctgtactaaaagcacttcaattagctttgggtgattactcgcgctatttatctgaagaggatttttatattggtagtgacgataaacgtgcggctgagatagttgtagatgttaggattgtacctgtagatgaacaaggcgatcgcatagatacatttgatgatgattggcaggctgaatttcaagataggattcaatctgaatctaactctcgtcaatatgtagcacttcgtactcgtagtaaaccagatgaagttaagggtggttttgatacatcttacttagtgcttaggcaatgggcagattatagtaactggctgactgatagcgtacaggtttccactaaaaatttttcccgtcctacaagcatattatttattccaattgatgctcaaagagatattcatcacgaaattagagataagtcttcactgatacggaaagttttgtcatctgttaaatatgacaatgcagaagttactgctctagaatcgttgattaaagatgttaatgatttagcaattactaaaagtaccgaacttaccagtctaaagacaaatttagaaaaactgaatcagtcgattgagagttctggcaaagccgaaatcactccttttcccagaaagattcgcgatctttctaaatatttctcggctcattttggtgaaagtgcaagtagtaccttttctatggaatatcacggaatgggtacacgtagctgggcatctatgttagttgtcaaagcttttactgaattacaagatgaaaaacatgcgaaggaagcaaagcctttctttactattcttgcagccgaagagcctgaagcacatttacatccaaacgctcagaaaaccctgtataaacaacttgatgattctagaggacaagtgatcatcagtacacattcgccctatgtggcggctatggctaaacaaagtgagctaagatatttaaagaaagatgcggacaacatagtcgtcaaatatctaagtaatgagcttactcatgaagaaaggcgtaagttacatcgtgaggtcatccattctagaggtgaaatccttttttctaaagctattgttctatgtgaaggtgaaacagaagagcaagcattaccattgctttttgaaaaatattttggtagtgaagcatttgtaaagggcataagttttattggagttagaggagcagggaactatcttccatttttacgatttgcctatgatttctctatacctgtttatatttttggtgatggagaagattcagcagtcaacgcactcaaaaaacactacgagagcgtatatggaaagacagaaattttaaattgctcaaatattactatccttgatggtactaattttgaaggttatctgatttcatcgggatttcaatcaatagttgaatctgccattgaagatcttaacgggaatggagctattcaaaagtggatagatgataacgatggtaagtgggctgggagaaaaccaaccaatcagcccacctgtaaaacatgtaatcagaaaatctatattgatgttattaaagactatcaatcatctgggggtgctaacagagttttgatggatattcttaagcctggtaaaaccaaatacgctccattaattgcggaaaagctctgtgagcttgagaaagagcagttacctccaaaaattcttgaattttttcagaagattgaaaatggaggcataatatga

SEQ ID NO: 73057 - DNA, 1905 bp, Pseudanabaena biceps PCC 7429
atgattgatttatctccagataaaagaagtatagtttacgctccaacggatcgagcaatacaggtactagcttcggctggatcgggaaagactcgtgttttgacagagcgtgtaaggcatatcattaacagcactaaaaaagatggagttatagcattaactttcacaaacaaagctgcggaagaaatgctcaatcgtctagaagaccttgaagatgttaatgaacgatgctggatagcgacaattcattctgtagctcaacgcatacttgaacagtatggacatacccttaaagatgttgctttgccttctgagttacatatttacgatcgtgatgaagatcgcaaaactatttttattcaatctctgcgaaatgagggcatagatattgataaatttcttgatgtgtcggacagtaaaacaaaaagagagcgagaagctaaaattcaaactcgattgggacagtttgctactgttaaaagagaattattagatgaacaagaaatcatcaataaatattctgaaaatactaaatttttgtcaatctatcgttcgtaccaaaaagctctatttgaaggtggaggtattgattttgaggatatccttgtttacgctcataaaatacttcttgataactcatggtgtggtgatatctatcgcgcaaaatataagcatatttgcgttgatgaagcccaagatctcaataaagctcaatatgaatttataaaggttttatgtggagaaaaaataaggagcgttctgatggttggcgatcctaatcagatgatttatggttttaatggttcatcaaacagatatctccttcaaaattttcttaatgactttagtccgattcagtatgtccttaataagaattttcgtagctcaaaagcagttgttaatctggctaataagataaaacaaggttctcaatcagaatatgattttgctcttgatggacgtagtgaaattaaaatactagaagatgaaaattctgaagcagtttggatttgcaacaaaattgatgaattaatccaagaaaaatcaagccatgaaattgaaggtgatatttcactagacaaaatggtagttattgctagaaatcgttttgtctttaagactcttgaagaacatcttaaagttaaaggaattaatcctttatttaataggggagaacgacaagtagaagcatcatcaacttttggcaaggtcttagatcttgcaattcgtgtacgcttgaataaaaaagattgggtagacggcaaaaaactgtgtacagttttgaagattgacagtcctgatgtatgggatgacgaatgtatattgagtaaatttgctgaaaacgttctaaacacagatattcccatccctgatattcagtccaaacttttacttgagattcaaaatttagatataaacgatcccaatatacctaaactctgtaaatgttttgcccaactaatcgaggaaagaaaaaatgaaacattaaatgaatttgaagaaaatgaacttgaacgctctatccaagagcttcaggaatttaaagaatgctggcaaaaatctaagattttaggactaggttctctttcttcttttcgcaatgcaatggcgttaggacagttaaatggaaataatagtaaaaatggactaactttgagtacagttcatactatgaagggattagagaaagatatcatttttttgatgggaatgtgtgaaggagtttttccagactatcgcgctcgtactgaacaagatattgaggaagaacgaaatagcgcttttgttgctgtaactagagctaaaagatggatttatataacatcccctcggttgcgaaaaatgtcttcgggaaatagcaaagtgcagcgaccatctagatttattcgggagatgcagggatag

SEQ ID NO: 73058 - DNA, 2004 bp, Streptomyces viridochromogenes Tue57
atgcagctgacccatgccaacgtgatcaatttccgcgccctggacaaggcggacgtgcggatcgatcacaaaaccacgctcatcgtgggacgcaacaacagcggcaagacatcgttcgtcaacctcttcgagaagttcttcggtgacgacgacacgcgcttcgtgctggaggacttctccacctgccggatccccgacatcgagcaggcacttcagatcttcggtgaagcacagaggcatgcggccgaaggcgatcaggagacgcgggagggcctgctggccaaggcgtacgagcttgtgccgtccatccggctgggactcacgatcgagtacgccgaggacgatgacctcgctccgctcacggacgtgatcctggacctcgacgactcctgtttcactgtcaagatcgaagcggcgctggaggcagcgaggccgcacgacctgctcaaggacttctggaccgcgagtcagaggccgaaattcgagcccatcaagtggctacgcaagaacttcacggactacttcgcctccgtctttcgagcagtgagcccggtcgatgagaaggtgacgaaggagatcaagcgcagtgccgcgcaggcgatcgtctcggtcaagttcgtctacgcgcagaccaaggtcgacgacaccccaggagacaaggcccgcacgctgtccaagacgttcgagacctattacaaggtcaagagcgggcctgaggggcgtcatcagagcatcgagcagatcgaggatgccctggccgcagcgtcgctggagctcgacaccagctacaaatcgctgttcgacccggtcttcgaggacctgcgtagtttcggggttgggacgatcacacctgtcgaaaagccccgcatcgtgtctctcatggagggctcgggcatcctcaggggcagcacgcggctccagtatccctctggagacggcgacttccaccttcccgaaggccacaatgggctcggctacagcaagctgatcttcacgatcctgcaggtcatcagttttcaccaggcgtacgagcgtgctactccgaagccagcgctccaggtgttgttcatcgaggagccggaggcccacctgcatccccagatgcaggaggtcttcatcaagaacattcaggacttcatcaagcgcaaggccccgtggaaggtgcaggtggtcatcaccacgcactcttcgcacatcgtcgcgagcggcgggtttcacacggtgcggtacttcgatcgctccgagccggacggcaaggtcaaggacctctccaccttccaggcgaaggtcaaggccactcctcaaggtgacgagacgctgcggttcctgcgccagtacatggtcctgcaccgttgcgacatgttcttcgccgacaaggtgatccttatcgagggcacggcggaacgactgctgctgcccgagatggtccgtcggtgcgccgagggtctcctgcaccagtacgtgtcggtcatcgaggtcggtgacgcctacgcggtccggttccgtgaactgctcgatttcctcaacgtgaagaccttggtcatcaccgacatcgactccgtcagccccacagatcagaaggcctgcccgccgagcaccgcgcaggcggtcacctcgaactccacactgaagaactggcttccgggtcaatccagcatcgtgaagctcctcgacgtcggcacggacgagaaggagcacgggcacgtgcgcgtggcctaccaggtcccggaaaggcaggcaggcgtctgtgcacgcagcttcgaggacgccttcatcatcgccaacgcagcggtcctcgcccgagacctcaggcatctggagctgaagagagccttcgttcaggaagtcggggccgaccccacccctgaaaacatcgaagccaacgcgttcgccatcgccaaacggctctccaagcacaagaccgacttcgcgttcgacgtcatgcttctggaggactggctcgtcccccgctacatcgccgaaggactccaatggctcgcctga

SEQ ID NO: 73059 - DNA, 1635 bp, Streptomyces viridochromogenes Tue57
atggctcgcctgaacaccttcgaagccgtagtcgaagagctggacgcccggcgcagcttcctcgtggaagcgggagcaggcgccggcaagacgaccgatctcgtccgcgcccttcagtatctcctcagccaccggcgtacggatcttgaggcgaacggtcggcagatcgcctgcatcacatacacgaacgtcgccaagaagaagatccttgaacgcatctcggcagacccgctcgtcgccgtcggcaccatccacgagttcctctggagcgtcatccaggcctacccgcgcgagctctggcagcagatcctcgactacaacgccaacctgtccaagcctgaagacctcactgagatggccgctccccccgtgatcgagtactccgaccgcgggcgcaagctgagcgagggccgcatatcccacgacgatgtcatcgctctgtctctgcgactcgtcgccacccaccccaaactcatacgcatcatcaccagcaaatattccgtcatcttcgtcgacgagtaccaggacacctcacccaagacgatcgacctactgctgaaccacctggcaggagcgggcaaggaaccctgtgtgatcggcctcttcggtgactcgatgcagaagatctaccgatccggcgtcggcgcagtcaggcacgacaagctcacacccatcaccaaaaccgagaactaccggtgttcgcgccctgtagtcgacgttctcaacaaaatgcggcccgaactccgccagcaggcctccggaaaccagcagaagggcgaggtacacctcttcctcaacaccgacgtgccgcccggcccgcgacggctcgatgccgctagagccaccctcgcgagcagggactggacacttgagaactcgaagtacctcctgctgacccatcgcggcatcgcgggcaccctcgaatacgccaacctgctggagcagtaccggcagctcggcagccacggccccgacgacctcatggcgcgcaacgagccctacatccagtacctgacgcagatcgaagccctgtgcgcggcctaccaggagcgggacttcgtggaactgacagacctgatggggcagggaaagagacgcatcacccggcacaccgacaagaggatcatcagcaaagcaatccgcgagctcgacacggtgcgcgcgaccggaaccatcggcgatgtcctggacctcatggccggcagtcccctcctggccgttcccggaactgtgaaagaccgcgagcgccgcagaaccgcagccgacctcgacgagcggcacaagcggcaagcagacttctccaacaacatccgtggtgtctcctaccgggaagtcatcagcgtcacccggttcatcgatgaactcacgcccttctcaacccaacacggcgtcaagggagacgagttcgagaatgtcgtcgtagtgatcgacgactccgtctggaccatgtacaacatcggcaagatgcttgccggcaccgacaaacctgagcgcaccgagcgctcacgcaacctcttctacgtctgctgctcacgagcccgccgcggcctggccgtagtcttcatcaacgacctcccggacggagcggaggcaacagctcgcgactggttcgcttcgggcgccgtccatccgtga

SEQ ID NO: 73060 - DNA, 1905 bp, Pseudomonas syringae BRIP39023
atgtatctacggcaattggatgtcactggattcaaatgctttggtgagccgttcaccatcgaatttcgagacgggctgaacgtgctcgtgggagagaatggggccggcaagactggcgtggtcagtgcagtgcgccagctcttcaacgactcggagtcaggcaagcgaatcattagtgagcgcgatttctaccggggttttgagccgggcgcggtcgctgctgaaagcatccagattcaggcgacgttttcaggtctggatgatcaggacgccattgcgttcgaatcctggtgtggaaatcacgacgaggccaagctgacttttgaggcccgcaatcaagagtctcgcgggcgcttcaggcaccacacctacgcggggcacgagcatgccaaaccgttcgagtccgagacgctggactacatccattgtatttacctacctccgctgcgcgatgccgagaacaagttgcgcgaaggtcgccagtcccgccttgcccggctcatgaaggccctctgccgcaaagagctcgctgaggccaggaaggcacagactcttcacccgctggaagagcatgtcggaaacttcaatcgtgagctttcacagagcgacgaatttgcgatcaaacaagccaatcagcgaatcggagacaacctgaaggcagcgctggggctcaatctctctcagggcaccatgattcagttctcagaagtcagcttctcccggatcgtggagggcttgcggcttctgtacttccctaacctcagcgaggctgacacgacccagttccgatcgctggaggagaacagccttggctacaacaacctcctgtacatcgcgtcgatcctggctgaactgatcctggaggaagaagaggatcgaggcgaagagacctatctgcggctcctgttgatcgaggagccagaggcgcatcttcatcctcagcttcaactgcgcctgctgcggcatttgaaaacggtggctgaagaacgtggcatccaggtcatcatcaccacgcactcaacggtcatctctgccgccgtctccctggatcacctcatccacatttcaaatgacgcaaggccagtagcaataccgctcagcgcgtgcggccttcctgagcacagccgccgctttgtggatcgctggttggacgtcacaaaatccaacctccttttctccaaaggggcactgctcgtagaaggaatcgctgaggcgatggtgctgccagagctggcgcgtattgtcctgcgcccctacggagaggggaagaactgcctggacgactacggcgtctcggtgatcaatcttggtggcatctacttcaatcatttcatgcagctgttttgcgatgtcacgggcggccagccaggcgagaatgtcccaatcaggtgtgcagggcttaccgacaatgacccaccgaaatctatcaggtcggttgcaggcgatgacggtaaagaaatccccgttccgtttcttccccatgatgatgacctccttgtaggcgacaatccggccttggcattgatagggccgatcagccagtcgcagttcggcaggttgttcgtaggtaagtacaagaccctcgagtacgacatcgcgatggagggtaacaacctcagattgatgtcgacggctgcggccactctctggcctgtgcaaggcggggaagtggtgagagagctgacaaggcgggctggactggactactcgaccatgagttcaggggagagggcgccgtacgcgaatgacatgcttgatcgaatcgaaaccaaagaaattggcaaagggttctatgcgcaggcattcgcggacgcgctggctaacgtgagggatgactttatcgtgccggaatacatccgcttagccgtcctctgggcttgtgggatcgaggaacaagccgaatga

SEQ ID NO: 73061 - DNA, 1752 bp, Pseudomonas syringae BRIP39023
atgaacttcaccaaggagcagttggaatacatcgcagcgccgcttgatcagcacagctacctgaaagcatgcccaggtagtggcaagaccgaggtggtggctgcaatggtctcgcaaaccatccaggtgtggtcacgttcgccttcgggtatcgctgttctcacgttttctaacagtgcgaccgacgagctccggagtagggtgcacaagtacttgggcgggcctatcggcttaccccacagtatctctaccttcgacagctttgttctcactaggttggtggccagcatcgccagcgagctgacgggctatccaggcaaggatggcgatttccgtatccgtatccttgagaaggaagcgaatatcttccagacccagcaacggatttgtggtcgccgcatctcagcctgtcggtacaactatgacttggaggcggggcgcttcaagttttcgaccggcgatcgagcgctcgatcatcagctcaacgccgtggaggttactgacaatatgcatcgggatctcgtagccacgaagaggcggttctggctcggtggttacgctacccatggtgacatcgatatgctggcgcttatggccttcaaagatcaccagtttgaccgctacttctcccgagttgcccgtcggtttcccgttgtgatcgtggatgagtgccaggatctctccgctgaacaactgcaaatcgtgagcaaactcagcggctttgggatcaagtttcacttcgtcggtgacctgaaccagtcgatttatgggttccgcaaatcgaacccggccaacgtcaacaagctcatgggcgtactgcagttcaagcagtacgaactgaccaccaattggcgcagcggccaggccatagtcgatctctgcagcaacatcgtcggtaccgggaaggtttcggggaatcctgaaatcgcatccatccagcccaaaattctcgagtacgaaagttgtccatccgagctgctgcctacgatccgaaacctgacagctgcatacaatgaggtggtactggttgcccgagggcatgcaacccttcagcgcctgcgcaacgggaagacctttgaaggcattgagctgcttgcagtcgcctgcattggcgccagctcagggagcctgagcgatctcaaagtgagtctcaggacattcgcccagtggcttgcaaggaagctaaagctggaggtcactaagacggggccctattgcccaacctcaatggagtcgaaactggcctggcgtaaattcatccaccaaagcctgaggttcatggttgccagcggcgccggcaattccgatcaaaactggtcagcgtgggtacgctgcgcaaaactcgcactgcgacaactccctgaccaggcgttcgtgcccgatgaaattcttaatgaattgcaggaattgagaggactcaacctcgtcaccaagcgtggtcaaggtgataagccagtgtcgatccgtctctcgagtcaggatatccaggatggcgaatcggagacattgcgttacgagacgattcaccaagtcaaaggtgagactcacgatgtcactgtggttgtgtcctcacgtaaacgcggcaaaggtgaatcacactgggccgactggctacagaaccgtgagtctgaggccgcccgttttgcctacgtcgcgagctcaagacctcggcacatgctcatttgggcagtcaaaacgctgaaacctcgcgagcgtccaaccctggtcaatttgggcttccaactgccgtga

SEQ ID NO: 73062 - DNA, 1905 bp, Pseudomonas fluorescens BRIP34879
atgaagctacagacgctgcgcctatcgaattttcagtcttacggtgccgggcctactgacgttgacctcgaagccatcacctacttgatcggccctaatggggccggcaagacagctgcgcttcaagcattgtgccgattgttcgctttcgatccgtcccagcgtcgcatccagcggtctgattttcatgtcgctttcgatgagaaggatattccggaggagcgccagctttggatcgaagcagattttcttttccctgaactggcggaagacgaagacaacagcacggttgctcctcattttggtcacatgcgcttagacgagccggacggtattccgcgagtgcgtttccgtctgagcgcagtcatgggacaggatggcgacatcgaagaaacctttgtttatgtgctggatgtcaatccagatggttcgccgctcaccactgcgcaagtgccgcgagccgagcgcaaccatatacatgtccactacctgcccgcacgacgtgaccctgccgaccacattgcttatggggccaatgctttgcttgggcgcatgctccgcgctgtgcagtgggacaaagagcgagacgtcatcaggggacttactgacggcataagcgacagcctggccgccaacccatcagtcaatgcgttcagcgagcatctgcaaatgacatgggcatcgctgcacaaaggcagtttctttgccgatcccaagattactttcgcggcctctgagattgaggccttgctacggcatatgtccgtctcgttcacaccagggcatgatgaaaactttgtcgatttttcgcgacttagcgatggccagaaatcgatgctctatctgtccctcgtgctgtcgtcacaggctataggtcgtgccgtcttagcggagaaagacaagtctttcgatcctgacaaactgcggccccccgtttttacactggttgccgttgaagagcctgagaacagtctttcccctcactatctgggaaggattgtaagtgcattgaatgccatgacaagccaaggcgatgctcaagccctaatcgctacgcatgcgccttccatgcttcggcgagtcgagcctgaacacatccgctacttgcggctgaccgaggcgcggcaatcgcgcgtaacgtgcattcaattgcctgaaaaaacagacgaagcacacaagttcgtgcgcgaggcagtacaggcattccctgaagtttatttctctcgattgattgtcctcggcgaaggggacagcgaagagattgtgttgccacgcctcttgcgggccaaaggtgcgccgattgatgagtccgctgtcgcgatagcgccgctggggggcaggcacgtgaaccatttttggcgtctgctggaggccctgcggattccatatctaacgttgcttgatttggatgtggcccgccatcaagcggggtggggtcggtttaaatacgtaaacgaccagctgggaacgtttcgagcggacaaggtccttccaaaagaccatggaattccgaaatggaattccagtgagcacaaggtgcgtgagtatcccgtttacatagaagcctttgaagaacgggacgtatatttctccgacccgatggacctagatttcgcgatgcttctcgcctatccagacgcttatggcgttgaaaaggaggtgccagatgcagacgtgatcaaggctgttctcgggaaaagccatcacgactcctcccaatacagcgaagacgaactcaagctgtttggcacctatcatcaacgcttcaagcttggcagcaagcccgccgcgcatatcagtgcacttgctcaactaagcgaccaagagttgcttgaaaatatgccagcatccctgagcagattggcagacaccgtcatcgccaaactcgcggagctgccggagtga

SEQ ID NO: 73063 - DNA, 1677 bp, Pseudomonas fluorescens BRIP34879
gtgattgcagtcgaagcctggcagcccgctgacgggttgacgcttgaaccgaatgccttgctcgcagccaaggagcaggagcgctgtcttgccctgactgcagggcctggtgctggcaagaccgagatgcttgcacagcgagcagattttcttttgcgcaccggcacttgtcgttatcccaagcggatcctggccatctcgttcaaagttgatgccagcaagaacctgaaagagcgggttcagcgtcgctgcggcccagatctggcctcacgctttgatagcttcacctttcatgcctttgccaagcgcatcatcgatcgattccggccagtgttgacgggtgaagatgccctggacgcgggttacaaaatcgccgatagcaaggtggggcgctcccgaactcaaattgtgttcggagacttggtgccgttggctatccagatactgcggaagtcaaaagtggctcggaacgccattcgtcaaacctacagcgatgtctttctggatgagtttcaagactgcactaacctgcagtacgagctagtaaagcttgcctttcaggacaccagcattcgtctcacagccgttggcgataccaaacaaaaaatcatgggctgggccggggcactcgatggcatctttgaaaccttcgcggcggattttgctgcggtaccgctcaacatgtaccgcaacttccgttccaagccacgcctgcttcgggtgcagaacgagatcattcgtgtacttgatctcgcgtcagccatgcccgacgagcagcttgccggtgatgaaggtgaggttttcgcatggcaatttgaggacagtcgcagagaggccgagtacttggcggatttgattgccaactggataagagtagagcagctgcccccgtcggaaacagcggtgcttgtttccaagcaattggagctgtatgccgaccatctcatggcagcgttggaggtgcggggaattccttttcgtaacgaacagcagatgcaggacatcacggtagagcctgtcgcgcgcttgatcgttgactatttgtcctgtctctatggacagcgcgagcccaaagcctgggttcggttaatgaaccagttaattcctttcgcggatgacgaaatccagtcaagcacgcggaagaatttagatcgtttgatcaagcagcagcgaaaagaagctgtcgtagctgagcttcttgaggtgccgttctccggctggtgggagtcggtacggtcgttcttgaagcaagtcagtatcgaaaccttggtcgcgctttcatcagactatgaatcccacgacaggctcaaggaagttgtccgggacaccaaaatgcgcattgaagaattgctcaagatcgagcccgatctgcccaaggcccttgagcgcttttcggatgagcaagcggtacgcattctgacgatgcataagagcaagggcttggagttcgattcggtcatcctccttggcgtcgaaaaccaaaccttctggggaaaggcagacgaagagcgttgcgctttctttgttggcgtatcacgggccaagcgtcgattgataatgaccgtcagtgagcgccgtgaaacgcctccatccaaaccatacaagtgggttgagcaaagagtgccccatgcagagtttctcggctatgccaggctatttttaagcaacgcaacataa

SEQ ID NO: 73064 - DNA, 2337 bp, Pseudomonas syringae BRIP34876
atgcatattgagaccgtttgggtgcgtaatttccgtcgtctgaaggacactcgcatcgatcttgcgtcagatatttcaatatttgtcggggccaacaacagcggtaaaacatctgcggcgcacgctttgcagctttttacctccgcttcgaaagatcggtttaccctccatgatttcagctcagcgtgctgggacgtcatcaacgctttcggagaaggagcggacggagtcgaactgccaaccatctccctcgacatctggttttgcgtcacgccagccgatctgcatcgagttgtagatctgctacctagcctagattggcaaggtagccgggttggtattcgagtggagctcgcagcagcagatgccggccttctgagaagcagtttccaagaagcacgggccagcgcacggcatgctcagtcgcagcctgcaggggaaggcgtggcacagggatacgtggagccagccattgcgcaagacgggtacaacccgcgaccgcgtgacctttgtgacttcattgcagacaccgtaggtgacaggctacggcgtgatttcgaattgcggtactacgtactcgatagcgccggatttgacactgagtttaaacagcttgatggttacgtgcctctacgcctggttcctgataagggtcgcagcggcagggatgtgctgggtagcttggtaaaggtcgactgtttacatgcccagcgtcacctgtccgactccaatgctggatctcgatccgaagatctctcccgctgtttgagtcgtttctatgaacggaaccttgagaagcgcggcgaggattatgacgctcagcgcgcactataccagtccgagagtctgctgaatgaccacctggaacgtgtcttcggtcccactttggagcgtttggccgatctgggctatcccggggtaaacaatcctcggctgctgatcaagactgcattgaaccctgcgaccattctgagtagccatgaaggggcacgtgtgcactacgcgctcggcgctctcggagcagcagaggtcacggcaaccttgcctgatagatacaacggcctaggtttcaagaacctgatttatatggttgttgaactgctcgatgttcacggtcgatggttggacattgaggaaaaccgcccaccgctccacctgatattcatagaagagccggaggcgcatctccatgctcagctgcagcaggttttcattcggaaagtgttagatatcctcgccgtgcccgaggaagacagcccatattgcaccagccagcctgtagtctcgacgcactcgcctcacgtcctttacgagcgaggctttaaacctattcgatattttcggcgagtagcggatgccggcatacagcaatctcaagtgctcagcgtggcagctttttatgaggcggccatagatcctaacgacccaaatgaccgcaccagggattttcttgagcgatatctcaggctaactcactgcgacatgttcttcgctgatgcggccattttggttgaagggaacgtcgagcggctgctgatgccgcaaatgattgctaaagctgcacctcgacttcaatcgaactatttgagcgttttagaggtgggtggcgcgttcggacatcgattcaaaggcctcattgatttcttggggcttacttctctgatcgtgaccgacattgacagtgtttctccgcccgcagcgggcgctttagccgcaaacggcgagttgcctgttgatgaggatccagcggatgcagagcctgacgacaatgagggcgcggaggaggctgaagctagacgtaaagggcgcaaggcgtgcatggttcatgaagccggggctcttacttcaaaccagacgttgatcaaatggctgcctgggcacaccacgattgacgatctgctggctgcgactgccgaacagcgcactcaactccgagacgaagaaggcggcgcccttgtacgtgttgcttaccagacaccagtagcggtggtgtggggcggagcgactcaggtgaggacaggcaggacgttggaggaagcgtttgcactgcaaaacctagcctggacgcagcacctggaccgcaaggatctcggcctacgtatcaagggttccaataatctggaaatcgcaggtattgcggagcgcctttaccgtaaggtcaaaagctcaagttttcgtaaaactgatttcgctctcgggctgctggctcaagagccatcggcatggacggtgccaaattacatttcggacggtcttcgttggttggaggatctggtcgccccgccaccgcccgcagtagctgaggcggaggcgcctctcaacgggggtgaggtatga

SEQ ID NO: 73065 - DNA, 1899 bp, Pseudomonas syringae BRIP34876
atgactgcgcgtatcggtcagccggatactcaagcagatatcgaactaaggttgtgcttggaccagcgtcctcaacgcagctttgtcatggttgctggcgcgggttctggaaagacgacgtcgctggtaaaggcccttgcgcacctcggccagacgcgaagactaaagctcaacatgcgtggtcagagagtcgcttgcattacctacactgaagtagcggtcaaggagatctggggggacgtaggtaacgatccgctgttccatgtctcgacgattcatagttttctgtggacggtaatcaggccattccaagtgaacttgaaggcttgggtcatcgcaaggatccacgagaaaatcgccgaggcgcagcagcatcacgacaagcctaggactcgggcagcaactcgtgagcggctcgtgaaagatatcgcgcgttaccagcgtcaccttgaggccgtaaggcatttgactcattttaactacggcgccggaagcgatttcgggcgaggtgtactcgggcacttcgacgttatttcggcggcggtcgagctaatcgagcagagccagttgcttcgtgatgtcatcgccagcaggtatccagtccttttcattgatgaaagccaagacacgcgtccggaagtagtggctgcatttagaaggatcgccgagacgactcctgtggagttctgcctcggattttttggcgatccgatgcaaaaaatctaccttgaaggtgctggagtcattgagacggccgcaggctgggagcaaatcaccaagccagaaaatttcaggtgtccgcagcgagtgcttcaggtagtgaatgctatccgggagcccgatgacggtttgtctcaaacacgaggccggatgaactgggtcgacggcaatcctgaacctgttatgggatctgttcaattcttcctactgagagcagatgaccatcgctctatgaagctagctaaagttcgtgaatggatgcggcgtacgaacgatgacgatcattgggtgagtgatgatcttgccgctgacttcagggttttggttgtcgtgcatcggatggcggcagcgaggctcggctttccgaatctttacgctgctttgaatgacaacgatgcaccaccgtccatcaaggagggccttaaggacggcaccgcatggccgctgcggccgtttctggattacttgctacccttggcaacggcggtttcagaaaaccgaaagctcgacgtcatgacttttctgcgttcggaatgtccattattgcagccaacggctctggtcggtagcgatccggtagcggtgcttcgggcattgcaagcatccacaacagagttggccagactcattttttcgagcgatgcattgctgcaggacgtgctcgttcactcccaggcagcaggtctgctacaactagacgaagcgtggacaaaatacttgggcccagaccgcacagccgacgatgatgatcctgagatccccgccgtgtcggctttcctacgttgcggtgtcggtgaattggctggctatcgtcactacctcgaagatctttcaccgtttgcgacccagcagggagtgaagggggcggaattcgaacgcgttttggtgctcatagatgacgaagaaggtagaggacaaaggcagttctcctacgaaaaatacttcggcattgtggagccctcagatactgatctggaaaaccttgcacagggcaaggatagcgtgatggatcgcaccagaaggcttttctacgtgtgttgctcccgagcgactagggatctcgctgtggtcatgttcgtgcaggacatcgaaaccgctcgagcaaaaattgccgaaaccggcatctttgattctgccgacattgtggatgaggagactttggaagccgctctaacttag

SEQ ID NO: 73066 - DNA, 2337 bp, Pseudomonas syringae BRIP34881; identical to SEQ ID NO: 73064

SEQ ID NO: 73067 - DNA, 1899 bp, Pseudomonas syringae BRIP34881; identical to SEQ ID NO: 73065

SEQ ID NO: 73068 - DNA, 2058 bp, Vibrio campbellii CAIM 519 = NBRC 15631
atgttgttaaaaaaactcaagatatccggctataagagtatctcatcaggacatccccagacgattgagtttgaggatgatgtaactattttcattggtcataatggcacaggcaagagtacggctcttgaggcgctaaataagttgttttcaattgaccattctttgagaggtttatccccttcggattttcatttacctagcggggacaaacccgatacggctagagatttatttattgaggcttggtttgacttaggtaacaccgaagatccaatctcgataccacctttattgaatggtctaacagcctcaggcgaagatggatcgatcatatttcgcgttcgtttggaagcaagtctgtcctttgattacaatccattaggggatgttgaagaatccatttgggttattgatagtgatatggatgagcctatagatgacgtcaaagaacgtttacttacaactcagagaaatgcaattcaggtcaattacgtaccagctaacagagatcctcttacacagctaaagttctcatcaaaagccattctaggtaggcttttaaaggcgataaagtggtcagaagaagaaaagggtgaatttgaagaaaaagctcaagagttgaatgagttagctacagaaaacaatgctctaattcaaataaagcaggctatcaatgaaacttggagtgacatatatagagggcagcatttaaaggaagctattcttgatttcccggttggagacattgatgaaatacttaagctcttgcaacttcagtttatgcctgatgcgacaaagaacaaggttgatacaagcaggcttagtgatgggcagaaatcactagtatattttgcattgacgaaagcactgtttgacttagataaagcaatgcgtaaagcaatcagtgacggtgaagaatcttatttcgatcctgagaaactccgattgccagttttcagtcttatgattcttgaagagccagagaatcatctctcaccacattacttgggaagagtcatgagtctggtcagagattatggttcaagtgagtcttgtcagtctattgtgtcgacacattcggcatcgttagtaggaagggttgaacctcgtcaaattagacactttaggttagaaaacgatacgtgtagtacacgagtccaagccttaagtatgccggagtctggggatgaacaggccaaatatgttagcgaggcagttaaggcttatcctgaaatatatttctcgaagttggttgttttgggagaaggagatagcgagcaagtaatacttcccaaactgctggaacacttcggtcaacattctgatggtcgttctatatccatagttccattaggtggtcggcatgtaaaccacttctggcgcttgttggagtcgctacagatcccttacataacgctgcttgatttcgatattgacagaaatggtggcggctttgggcgtattaaatatgcggtcgaacaactagttactaatgacaatgatacaccttaccttcatgaggagatgatagaaaatatccctaaatgggactcagacgaagatccgaatctttacttgatgacatttgtagagaacgatgaagatgatgaagaggaagacgtcagccttgtagaggagttggaagagagcaatgtgttcttctctagccctttagatattgattattcgatgatttgtgctttcccagaaatcttttgcacccccgacttagcttacggagagcgaggtcctatggagggaggtgaagatgaatctgaagaagagcaggaagctaggcaagcctcactcatcaaggcggtcttaaagcaaggcaatagcggtataaggtatgatttcggtgaagactgggagagaaatttcctttggtataggtatagatttctttcaaacaaaagcaagccagcatctcatgtaaggatgttctcgaaattggaagctacgtatagctctgctgaaataatacgtaggatgccccccgagcttaggaggctgattgagagagttattgagtgctccgagcaggttgttgagtaa

SEQ ID NO: 73069 - DNA, 1686 bp, Vibrio campbellii CAIM 519 = NBRC 15631
atgaacgaatggaaaccaaccaaaggtatagagccaactcaggagttgatggatatcatcacttgcgatcaatcagtttcggttttggcgtgtgcgggagccgggaaaacagagctgttggctcaaaaagctaactacctattggttactgggatatgcccttggccaaagagaatactttcattgacattcaaaactgaagctcaagctaacatcaaagtaagaattgggaaaaggtgcggagaggcatcttctcgatttgactcttttacgtttcacgctttttgtaagagtgtagttgatcggtttaaaaatatacttcctttatctcagcgtccccatgatggatatgatattgttttcaaagaaagtgaggcaaaaaataactctaagatccttatggaacgattgattgatatggcaattatcattcttaaagaaagagaggatgtaagggctatgttctcaaactcatactcacatgtttttgttgatgaatttcaagatacaacaaataaacagtatgagcttctaaagcttctattccaagggacgcccagcaagcttttgagtgtgggtgatattaatcaaagtattatgctttgggctgacgcccgagaaacggtgtttgatgattttctaaatgatttttcggctgaacagaagtatttgttaaaaaattacagagcctcagacgaaattggtagggttctagacgtcttcattgattatataaagaatccgactgaggaggttgaaagttctgatgtttcttctccaaactgctctgtaagtattttctctaatgaagttcaggaagccaagctcgtatcccagagtataaaagctcttatagatgggggagtaaacaacaaggatatttgtatactaacgaagcagcagtcagcgttgtacacagagagaataagtggtgagttagctaggctaggaatcgaacatgctgatatgaatgaattacaagatgcattcaaagagcctttaggattgattttttctcaatttttgaaagcacttttttccccaagcctgaaaaatacaatggaaatctatggtgttgctttgagcctaaatagggtcgaaattggcgataaaaaggaacatgagattgtatctaccatttcacaatacatagcccagaaacgagagcaattgaatgagcaaaccaccatcgacgaacttatatcgtacgttgtggatttcgtacatttcctcgatttaggcaagataaaaggaaggtggaaacaatatcgttcagtaggattctatcaaaaaacatggaatactcttgaaacccgtctacgccagacttacgcccaagtcgagggggtgaaagactctgtcgttctatttaactccccaaatacgattcacattatgaatattcataagtgtaaggggttagagtatgactacgtttactttgtgggacttgaagaccaagctttttggaattacaagtctcagacatttgaagacaattgcgcgatttatgtcgcactatctagagcaagaaaaagtatcaatattacatactcgatgctcagagcaaaccgtagctattcgcaatggcgtgacaatcgaccttcaagctggagtgcgctttcttctgtttacaaggttctcttacataaatgtaagtttcagcgaataaaccatactgagtag

SEQ ID NO: 73070 - DNA, 1698 bp, Vibrio campbellii CAIM 519 = NBRC 15631
atgtacatcagaaaggtaacgattaacaactaccgtagtttccgcactttcgaagctaaacttcaacaactgacagttgttattggtgaaaacgatactggtaagacgaactttttcaccgcactttcgttaccgttaagcggcaacctaatagacttcaaccagaagcgtttgagtgtttctgatttcaacaaagattccgttattgattttctaacgtccgttgtcaatgatgacaccgaagagaatcagcttaaaaagatccctaaagtatcagtaaccgtagagttcgctgatccgaaagatgcttatgaaacagcactgttagctaagtgggttgttgcagatggagataaagagacttacaaaatcagatacgactttaagcctaaagacgacaaagatttgcttgaggtcgtgaagaaatcgttcgctggtaagattttagatgatattaactggtttactctacccgttgagctatacgactaccaagtcgtctctgtgaacaacgaaaagcctatcgcatacagtgacttaaaacacgtcagtctccatagcatcaatgcagagcgagatgacttctcagaaagcagctcaatgaagtccaatagcattttcaccaaactgcttatgaacactctcaacgatgacgacaaaggtcagatcaataccgcctactctgagttttttagtgctattgaaaagactgaaacattcgacaaagtcattagaactaatgacgattttgagaattacgacagtattatcaaacagcttgagtgcactcctaacctgcctaacttgaagaacatcttatcgaacatcactttgaaatacgggaatgaatttctgtaccaaaaaggcttaggacaacgaaatcttatctacatactcatcttgtttgcttactacaagtcatgtggtgatacattcaacttgtgctgtatagaagaaccagaagcacacttgagcgttaacaaccttcgtttagtaagagacttcattgagaaaagctcaagcaatagtggctcgcttgtacaaactatcatttcgacccataacccatcgatcatcaacaagctaaagatctctaatgtgttggcgtttactggcgagaaagcaattagtctgtctgatactccaactaagctagttgattacctaagaaagagacctaacttcgacatcttaaagctgctgtttgcgaacaaagtcattctcgtagaaggtccgactgaagaaatgctaatcagcacttatctgtctaaacagccatccctcaacgacattgatattattccaattggtcaacgtggttacgccactttcttagatatatggctagccttgaacaaagataatcagaacaagaaaattggtgttgtccgtgattatgacaattcagatgcggctaaagccaaacatgatgcctatgacacagcgcatgcgaatgtcactgtaagaacaacaacaaactacacacttgaaattgatttagtagaagcagaagacaacctagctttactaaatgatttattcgaaatggaaggcgacctcgacgcagtatccaaatacatgattaatggtaagacagcaagaatgcttgatgtatgtgatgcgatggttgatgaagagaatccgctggatatcaagttaccagctcacatcgctgaggttatcgaggcggtatcatga

SEQ ID NO: 73071 - DNA, 1377 bp, Vibrio campbellii CAIM 519 = NBRC 15631
atgatagaagtacagattgctggtgcaggtgctggaaaaacttatggtttagcaaagactttgatagagcacatcgaagcttgtactagtcacaaaaagacatttgcactgacgtacacaaactctgcaacagcgaagatagagcaagagataatcaaacagcatggctttattccgtcgaatctctgtatacagaccgtacatagcttcttgttaaacgaaatcatctacccattctcgtcattcactctcggagatgtgtataacgacgcatcaataatgatgttaccgagcgatgctagattcaaaaactggcacttaaagcgattaaaagataaaaatatcattcatgccgagagcgtctacaacatcgctaaacaaattgttgatgaaaccaccagcaagcacaacaacagagcgaagaaagctaaagtccgcagacttttggctattctaggaagctgttttgacaagatattcatcgacgaagtccaagacttagataaagatgcacttcgctttttcgaagttctaggcagcaacgatattgacatatacatgatcggagatccaaaacaagcaatcaagtttccccaagatcttgaggctttcattcaaaaattagctcaaaaaaaatacgcgaccatactaccgatcaacaatcaaactaggcgagtccccagagagatactaactgtctcaaacagcttctgttatgaaaatcagcaacaagagtcactatcagaaatggttggtgaactcatgtacattgaatcgacggacgggcgatatgacgatctactaacgcactacttagatacaaaacagcttgtttgtatcgacaaaaagaatggtcgctatacaacttcatctaaacacaaacactcattcccacgagagatcgaggaaatgattcgtgattctaaccacaagaaagacaaagctttgtttgttaaagcagctttttctgactttatggacgatgcgatcaatgaagataataagaaagccataagtaaactcattgctcggcattcattggctcttaataaacagcacttcgcccaattacatgagctatgcaattcatgcacaaaaaatgatgttcaattcaaagtccaaagtatcgaatctatcaagggattggatgctgatgtgtgtgtaatcatacttagccctaatactctgaaatacttaactcaaaatggtattagcaaagcaaatcgatttaataaagaatggaaaaaaatctatgtcgctcttactcgtgccaaaaagaggctggtgttagctttagatcacgatttactcgctaaagaagatatggcggctgttagggattccataggtgaactgggattcgttactcataactag

SEQ ID NO: 73072 - DNA, 1860 bp, Gordonia soli NBRC 108243
atgagggttcggcaggtcgaaatcgagaacttccgcggaatcgtggcgggacacgtgctgttccagcagcacaccctgctcgtgggcggaaacaacatcgggaagtcgacggtctgcgaggcactggagctggtattggggccagaacgtctctatcgtcgccccgtcatcgacgagcacgacttctctcacggcgactacattggtggcgagggcgacccccgcgagatacgtattcgcgtcgtgctcactgacctatcggacgaacagttgcgtcggttcttccagcacgtccggcgatgggacgacgagacgttttcgttcatcgacgaggagccagacagtatccaatccgccgacggcgacggcaccgtttgggcgctgcccgtgatcttcattggacgatatgaccgcgaggaagacgacttcatcggggacacgttctttgatcatccgctgcccgaactcgacgatcttgacgaagacgagcgcgcatcacttggcgcgggccgcgcgcagttcagccgcttgcacaagcgggtttgcggcttcatcttcttgcgagcgctgcgcaccggatctcgtgcgctcagtctgcagcgcggttcgctgctcgactccttactcaggctaggcggtgagggcgcggaggagatgtggcgggatgcgcttggcgcgctgcagaacctcgatccggccatcggagagatcgaacaacttaggatcatccgggagaacattcgcacgcgactcggtaagtttgtcaacctggctcctagtgagaacgcagcggctttcttcgcatcagatctcacacgtgagcacctgcgtgaagtcgtccgactcttcgttgcgacacaaccgagcaaccactcagtaccgttcaccaagcagggcactggctcgatcaacctgctggtcttcgcgttgctgacgatcatcgcggacctcaaggaagaccagtcggtcatcttcgtgatggaggagcccgagatcgcccttcctcctcacacccagcggcgcgtgacgaagtacgtggtgcagcaaatgggacagtcgattgtcacctcccattcgccctacgtcatcgagcagttcgatccggagaacgtagtgatcctgtcgcgcgatgggaatacattctccggcgcaccgatcgacacgacgagcgtcaagcctaagacataccgcacgcagcgccgccagtttgcagaggcgatcctgagtcgggcggtctttgtgcttgagggtcagacggagatggttgccgtgcacgccgtctcatcggcgctcgagcaggtccgtgacgattactcgcacgttgatctcaccggcgtcaccctcttcaatgcaggaaatgaccgcgaagtgccgcggtacgccccgatcttcaaggcgcttggcaagcgggtctatggcatgcgagacaagctgaacgcccctgatgcagcggacgcggctgagaacatcaagtcgttcgacgagttctgggagtcgccggagaccggcatcgagcagatcctggtgaagcaggtttcaacacgtgtgttgcggagcttcctcgacgaagtcgtgcagcgcgacgactatccgtcaagccatccctacgtggccgagcgggttgctgatgacgacttggccgagttggcagtgaaggtgctgaaggctcgcaagggcgatgcgtttggcttcggatacaccggcacactcatcgagcagtgtgagaccgaggccgatctaccagctttcattcgggacgcgctcctcactatcaacgaacagctccaggacgagcctgaactgatactggacgacgacactgcagcgccgggggccggtgctgcagagcccgaggagtag

SEQ ID NO: 73073 - DNA, 1704 bp, Gordonia soli NBRC 108243
gtggagttgcagctctccgagactgcccagggagccgtggaccacgattgccccgtcttggtactcggcggccccggctccggcaagaccacgctgtcgcttctgaaagcccaagcgatgcttcccgtcctgcagcctggccaggagatcctcttcctcagtttctctcgggctgccgtccggcaggttgagatccggtgtcgcgatactttgcgttcggaagagcgtcggcaaatcgcggtgcgcacctaccacgcgttcgcgatggaggttttgcgcgcgcatggtcgactgctcaccggacatgctccgcgaatcgtctatcccggcgacgagaacctctctaaagcggtcttcgaaggagactggggcaccgagatcgaacgcctggcacgggaggaaggccgctacgtgttcgggcagttcgcagccgctgccgcccaactcgttgctggcagcgcatcgattgcatcgctactcgccaataagtaccccgtggtcatcctggacgagttccaggacaccgacgacgcacagtgggcgcttgttcggacgctctcagagcggtcgaaaactgtgtttatggccgaccctgatcagcggatcttcgactatgactcaagggtagatccggagcgccttaatcacctgcgcgcccacctcggccccgccgagtttgatctcagcggggagaaccatcgaagtcctaacgctggcatcctgcattacgccaacgccgtactgataaaccgacctttgccagacaccaaagacgtgatcacgcgcgcatactgggcgaacgctttcgacagcaccgttcacgctggtgtggtctggatgctcggctcgctccgcaaggcgggtatcgctcatccctccgtcgtcgtacttgccagaacgaacgcgctcgtcggcaagctgtcgatgatccttgcgcaagagcacaatttcaacggccagacgatcagacccgtcgagcacgacgtattgtgggacgccgacctcacggcagcggctgccctggtagtggcttcgattctcgaatggccgggctgccccaaggaggtggcactcggccagaccttcgaccgcatcgccgattatttcgatgcgaagaacgctgctaacgcgagcaacgccgctcgtcagaccagcgagcggtaccgaactgctgcagatcgggcgcgcagaggtgagacgcagcggctcgcgagcgccaaggctctcgccgcctcatacgacagcggtctggtgcttcagggtgatcctgcacaggactggctacacgcgcgtgatctgttggcagctgggaacgatttgtcggatctgctggccaacgccaggttcgtccggctcttccgagcaaccgatgagatcggaagccgacttgcgtcggcatgggaccttcgcggcagctacggccgcgccatcgacttggtacgccgtgcgctcgaggcaggtcggcttcagtccgaccagcgcgacctacgcggttgcgtgctcatgactatccacaaggcaaaaggcaaggagtttgatggcgttctgcttgtcgaagggcagtaccaggggggcttcttccgcgacaccgacaccgaggcgcaacgagcggcggcgagacgactgctgcgagtaggtatcactcgtgcacgacaccaagtggcgatcatcaggccgcagggcgccgcaccccttgtcggctag

SEQ ID NO: 73074 - DNA, 1752 bp, Enterobacter aerogenes EA1509E
atgtatttaggtagcctaaaaatttcgcggtttcgatcttgtgatgatgtgaccgttagtctccgcccagatttaactgtattggttggtgaaaataatggtggaaagtccaatgtcgtagacgcaatcagattgcttactttgccgttgagtggacgccgcgaacgatatccagaagatgaggatgtacgacgctattcgacagtcccaagttttcaaatcgaaggggctttccaaggcctaagcgatactctaaaaggtctattgatatcagcagttcccgatcctaccaagagcgaggctaccttcggctatcgatatgaatcgcgttctgaacatgctccccgtggtaagactaccgtgtgggctggacgcttcgacactaatggaccagagcttggttcttctgagttgatcagacacgtttatctccctcctttaagggacgcacatcaggtgctgggtactagcagcggcactagagtgatggcattgctgcgtaatttcttgccaaaagagcgggagcaggatttcctcgctggtgtcaggcgtgcggataatcggcctgagatcttaactacaatcaatacggatatcagtgctgctctcggactactcactaatggagtacgtccgcagatagcggcattggattttggtagcgaaaccttactcgatgtagctcgtgatttgagatttcgtatggccgatacaggtttgataccagaagatattcggtcttctggtctggggtactcaaatttactctatatggccactgttgttgtagagttgactaaggccaaagaggcagacctcacgattttccttgttgaagaacctgaagcgcatttgcatccgcaattacaggtacttgtgcttgagttcctcttggatcaagcgcgccaatcagcatcacgtatcattgaaccaggaaagcctgaaggccgcatccaaattgttgtgacaacccattcccccaacctgacagcatgggtttctccacgccacctagtggtcatgcgttcgcggcatcgtgaacaagatggaatatccatctcagaatcagtgagtgtgcccattgccgaaataggtctaaagccaaagacattagataaaattagccgatatcttgacgtgactcgttccgctttgctgtttggtaacagagctatcttggtggaagggatcgcggaagcactattgttgcccgtgctagcacaaaagcttgtgctagccgatgatttagatgggtggcttaggttcaagggggctgtaattgtgcctatcgaaggtgtggacttccgtccatatgttgaggtactgctacggccatatggtgatgcacgtattgctgatcggctgatagtgatcactgatgcggacccaaccgtgttgggaaataggaaagttgatctggaaaatctggctgcaacgcatggagctccagatgctctgatcgtgctaaccaatcagcatacattggagcacgaaatttttggcgctggaaatgaaagtttcctgaaaagcgtgtttcttcgtttgcatcgtaattcacgtagagactgggaagcgcagatagaggccattccagaacaagatcgccccaatgcatttcttaaattaattgaggcgaaaaagactcgtaaaggcgatttggcgcaagctatggcttcgcgcattgaggcgggtgaaccatttgttgtacctccttatctcattgatgcaattcgtggagcttcacgtatatga

SEQ ID NO: 73075 - DNA, 1776 bp, Enterobacter aerogenes EA1509E
atgactggcatccacaatctaaccccagagcaagaaacatttgctgcccacattggcggagctttcgttaatgcttgtcctggagccggaaaaacacgcactatcattgctcggctagcgaggatcgccgctacgttgcctcctcgtcagggcatagcgatactttcattcacaaactccgctgtagacgagtttcgcgaacgatgcctggctgctgggctcgatacgcttttgcaatatcctagtttcatgggaacacttgatgctttcgtcagacatttcgttgtactaccaagctgtgcggtatcaaaccagatacgaccaatcatccttgatagttgggatactcttggcatagaaattcgtttatcaggtcaatttgcctttcgaggtgaaccggtaagcctcgatttgtttgatccagaaaccaatattattgttcctgataggatcggacatgtaggtttgcaaaatcatgtccgtcaacatcagcttcgataccaacaagcagcagcacatcggcgaagatctttgttacaagctggctatatgagtgcaggagatgcacgtgctcaaacattgcggttgattagagataatgtaattggtggggcacttgctcgcgcattagcggcacgttttcaagaagttatggttgatgaagggcaagattgcaatccacttgatctacaaatactgacatggctcagagcacatggggtaaatgttacgttcgtctgtgatcctgaccaagcaatctacgaatttcgtaatggtaatcctcaaggaatacaggtatttaaggatacatatcctattgcgtcacataaggagttgacgggtaattttcgtagtagtcccgcaatttgccagttagcggcctctttaaggcgagaaggtcaggttgatcggtcgcttggtgaaagtgcgaatgttgactatccaattttacttcttacctacggtggccggggtccaacggcaatgattggtcagatattccttgaacggattacggaactgggactggactcaaccaaggcgattattttggctcactcaggcaaagttgcgttacgcgcagctggtgtcacttccagcaattcaatcggaaactcgcgaattgagacgctggctcgtcaagtgtcaacgttctggtcacctgccgcaaccccaaaaacgaaggagaatgtagtccagtcagtcgaaatattattgctggatttaatgggtgtgcgtcaaccaaatgagcatctgattaaagccatagagcgtcttggtatggaccggcgtgcccatcggagatgcgccctaagtttcctcattaaccttccaaaaacgtgtagagattcggatgaagagcggcttgcctggatagcctgtgttcacgcggaaatggagaggttgcatctgccactccaggctggtgtaagcgtacgtcgtttcttccgacagccacctaatgcgcattggtcaaagcatcttcaagtgcccgcagctctcggttttgcatgtggcaatatacatgaagtgaaaggtcgtgagtacgatgccgtatgcgtcgtagtcccgccaaatcgagctcctgaaaacagagttgaagcactcttcgagtcatggcaagcgcgagtagatgctgaggcaaagcgtgtactttacgttggcttaacccgtgctcgtaattttgttgctcttgcgataccaaacgcctttgcagggcgctgtgtggatttgctggctacacgccaagtgccctatacaagagtggatttgtga

SEQ ID NO: 73076 - DNA, 1926 bp, Pseudomonas aeruginosa VRFPA01
atgaggcttcaatcgatccgactatcgaactttcagtctttcggagcagcgcccaccgaagttctgctagaggagattacttacctcatcggacccaatggctccggcaaaacagctgcgctgcaagccttatgtcgtctcttcgcctttgatccatcactgcgccgaattttgcgctcggactttcatgttccattcaacgaggaggcacaaccggcagagcgtcagctatggatcgaggctgattttctgtttccggaacttgacgaggacgcggacaacagcacggttgcccctcatttcggtcacatgcgcctcgacgaagtcgacggcactccacgtgtacgctttcgcctcaccgccacaatggggttggatggggatatagaggaaagcatggtctatgtgctggacatcaatgcagatggctcgccactgaccactgctcaagtcccccgatctgaacgcaaccatattcacattcactatctacccgcacgccgtaatcccgctgatcacattgcctacggcgccaatgcattacttggacgcatgcttcgggcggtgaactgggagtcagagcgaagcgccataaagggcttgaccgaccaaatcagcgaaagcttgtcggccaatccgtcaataaaggctttcagtacaagcttgaaatcggcctggagtgctttgcacaagggaagcttcttcgccgacccaaagctcacatttgtggcgtctgagatcgaggccttgttacggcacatgtctgtgtctttcacgcctggccacgacgagcagttggtcgatttctcacgattgagcgacggccagaagtcgatgctgtatctgtcgcttgtgctgtcctcgcatgctatcggtcgcgctgtcctggccgaagatgacgattcatttgacgtagataagttgcgtccgccagtgtttacggtagtggcggttgaggaaccagagaacagcctctcaccacactaccttgggcggatcgtcaatgctctcaatggaatgaccggcaaaggcgacgcacaagcgctaatcgccacccacgcaccatccatgctgcggcgagtcgcgccggaacggatccgttatctgcggctgactcaggagcgaacatcgcgcgtcacacacattcagttgccggaaagcacggacgaagcacacaaattcgtacgggaggcagtccaagcatttcccgagatctatttctcgcgacttgtcgtcctgggcgaaggtgacagcgaagagatcgtgtttccacgcctgctgcaggtcaaaggagcgccgattgatgagtccgcagtaactattgcgccgctgggggggaggcacgttaatcacttctggcgcctgctgtcggctttgcagattccgtatctgacactccttgatctggatgtcgctcgttacgctgccggctgggggcgagtcaaagtcgtcaatgatcaactggcgaagcatgagccagagaaagtgcttcctgacggctggagtctgcccaaatggaacaccaaggaagccccaattagaactcatcactgttttggtgatgagaagaagagtgtcttcaatgaactggaaagccgcggagtctacttttccgagccattggaccttgacttcgcgatgttgcttgcatttccaaaagcctacaacgttgaggaggataagcctgatgaggccacgatcaaggccgtcctcgggaaaaagcaccacgacgcaagccagtacagcgcagacgaacagaaattattcaccacttaccatcagcgcttcaagctcggcagcaaaccagcagcccatattgatgcactggctcagctgactgatgaagaattgctggcgaacatgccagcgtccctgaacagattggctgacgcagtcattgccaagctcgcggagttgccagagtga

SEQ ID NO: 73077 - DNA, 1677 bp, Pseudomonas aeruginosa VRFPA01
gtgattgcggtcgatgcttggaagcctgcggatgggctgacacttgaaccgaatgctctaattgctgctaaggagcaggtgcgtagtcttgcgttgaccgcaggccctggtgccggaaagactgaaatgcttgcgcagcgggcggatttcctgctgcgcactggcacctgtcgttatcccaaacggattctggctatttcgttcaaggtcgatgcaagcagtaacctgaaagagcgggttaagcggcgctgcggctcagagctttgttcgcggtttgatagctataccttccacgcatttgccaagcgcatcatcgatcgcttccgtccggtgttgacgggcgtgtatgggctggatgctgggtacaaaattgcggatcggaagcctggcccatcacggatcttgatcgagttttccgatctggtgccgtatgcaattcagatcctgcggcagtctgtagttgcgcggaacgccatccgccaaacctatagcgacgttttcctcgacgaatttcaggactgtaccaacctgcagtacgaactgctcaagctcgcctttcaagatacgagtattcgcttgaccgcggtgggtgacaccaagcagaagatcatgggctgggcaggagccatggacggcatctttcaggcttttgttgctgacttttctgccacgccgctcaatatgtaccgcaactttcggtcaaagccgcgactgttgcgccttcagaacgagattattcgcagactcgacccctcatccgtaatgcctgatgagcagctagccggcgacgagggagaggtattcgcgtggcgcttcgaggacagtcggaaggaggctgagtatctcgcagacttgattgacggctgggtaaagaccgaacagctgccacctgcagaagtcgcgatcctaattcgcaatcagcttgacctgtacgccgatcatctgatggcagcgctggaggctcgtggtatccccttccgcaatgagcagcagatgcaggacatcacggtcgagccggctgcacgcttgatcgtggactatctgtcctgcctttatggtcagcgtgagcctagagcatggattcggctcatgaaccttctgataccttttgccgatgaagaaattcagtcgactgcccggaaggagcttgaccggctcgtcaagcaacaacgaaaagaaatagctattgccgagctggtcgatgagccctttgccggctggtgggagtttgttcgagcattcctgaagcaagtccgtatcgaaacactggtgtcgctttccccagactacgagtcgcacgatcggctgaaagaagtggttcgtgacaccaaggctcgtatcgaggagttgctcagtctggagcccgacttacccaaagctctcgagcggttctcagacgaccaagcggtgcggatactgaccattcataagagcaagggcctggagtttgattcggtcatcatcttggccgtcgaaaacgaaatcttctttggcgatcaggacgaaaacaggtgcgcctatttcgtcggggtttctcgtgccaaaaagcgcttgatccttacgcatgccgatcaaagggagcgcccagcaggtcatacgaagcgctggagtgtgcaacgcacggctcaaaatgaatatttcggctacgccacgcagtttgtgagacaagaagaatga

SEQ ID NO: 73078 - DNA, 1932 bp, Acinetobacter baumannii Naval-57
gtgtatattaagaagttatcaattacgggatatcgttgtttttcagagctttttgagatcaactttaggaaaggtttaaatgtaattgttggggaaaatggagctggtaaaacagctattatcaactcgtttcgacaactatttattgatactgaatctggctcttataatgtttcttctgatgattttaataaaccatttaaagaagcttctatagcagctgactctttcaaaataaaagttgaatttgataatttagaaaatgctgaaccaatagcatttctacaatggagtgatgctgcaaataatgtaattttaaacttagaagtcttaaataaagagttacgtgggcgttttaaaaaaagtttctggggtggaaattctaaagcatcacaatttgatgttgaactatttgacaaaatccattgtatttatctacctccattacgtgatgcggaatcaaagctagtaaatggaagacaatctcgcttatcgaaactattaaagtttattgaagctgagcaacttaaaacatgtaaaaaagctaaaaagaaacatccattagaagagaaatttaaagactttaataaatctcttattgaagaagaaggttcaagtataaaagaagcaaatcgattaatcacagaacatttgttaaaggcagttggacagaattttagtcaatcaacacatatacaatttgttgaaaatgaattttctaaaattgttgaaaatttaagattaattttctttcctaaaattacaactgctgaagcagatcaattcagagacttatgtcagaatagtcttggatataacaacttattgtatattgcttctattcttgcagaactaacgttaactaaagaagaatcattatacagacttttactgattgaagagcctgaagcgcatttacatccacagttacaggttcggttattagatcatctagagaaagtagcaaatgaacataaagtacaagttattgttactactcactcgacagttttagcctcaagtgtgcatttagataagattatacatttaactaagaatgataatcctactgcaacacctttagctgaatgtggtttagctgataataacttgaatttccttaatcgctggttggatatcacaaaatccaacctactttttgcgagcggagtaatcctagttgaaggcatagctgaacaaatgatcattccagagctagctaagacagtattaaaaggtaaagagattaataatatagaagactatggggtttcagtaatcaatcttaatggtatatattttaatcattttatgcgcctttattgtaatattacaggtgtgccagatgtgcaagaagatcaagtgggcttaaatgttccaatccgttgcgcaggcattacagatttagaccctgatcaattttactatgaagaggatacatctacagacactgagtcgaaagataaaccagagaaaaaaataaaaatagattataaaccccatgaagacaatatattagaaggaaaaaatcatgctctgaaattggtagatagcattaatacttctgactttgcacggctatttgttgcaaaatttaagacgttagaatatgaccttgcaatggaaagtaataatgcaaaagaaatggctaaagttcttattgaattatggccatcaaaaacaggcgatgtgaaaaatggcttacaagtaataatagatgatgattactcggaaattacttctgaacaaaaagcaaatcatgcctttgaaatattaaaaagagttgatgataaaaatattgggaaaggatatttcgcacaagttttagcagataagatttcatcagaggaaattaaacttcaagtacctcaatatctcgaagatgcgattctttgggcttgttcattagacaaatcctctattgaggaatag

SEQ ID NO: 73079 - DNA, 1764 bp, Acinetobacter baumannii Naval-57
atgaaatatacagatgaacaactcgattatattgaacgtacacaaattacagagaatatttttttaaatgcatgtcctggcagtggaaaaactgaaaccattgctcaacgagtagcaaatgaagttgaaagttgggcgaattttccaagtggcatagctgttctatcttttactaaaagtgctgctaaagaaattgaacatcgaattaaagaaaaaattgacaataacacgacctacccacatttcattggaacattcgatagctttattttaaaaaatattgtgaatcctctttcgaaagatatttccaaatatgaaggacataatggagattattcatttaaagtagtgaactatgattcacagttattttttttaacaaagtatccacatggttatcaaaaaatttcaggacatcatgtagaaattgataacagaacagggcgttttaaatttcatacgccaaataaagatacaaacagagctcttaatgctatggttttagagcaatggcaaaaagatgatatttatcgtgcgaagaaaaaatgccgtgatgcaggttttctaactcataaggatatcgaataccttgcggaatcagctcttaccactcgtactgcaacacaggattatgcaaaaaaattagcaaaaagatttcaacttatcattgttgatgaatgccaagatttatcctttgaacaactaaatatcttaaaagccatgatgttgaatggaacaaaattacattttgttggagatttaaatcaatctatatatgagtttagggatgttgatcctaatgacattattaactttataactgacaatggctttcgagaaattcaattaactaaaaactttcgaagctgtcaaaaaattgtaaatattgctacaaatattatgaaatcaatttcaatcgaagctgatttcacatcacccgaacaatcatgttttgtacttcagtataaagattcacctagtgaagtgatttctcaatttaatgaactaaccaaacagtatagcaatcgagttttagtagctagaggtcatcaaactttaaaccagttatctattgtggatagcacgccagcgaaaccagttgagttcttactaagctcaatcttgaattttgatgagacaagttatacttcaatcaatcagtcacttattgatttttcaaaatatattaaagataaggtaaagctagaaacaaaatctagtgattataattgccctcaaattattgcatcagaattagattggagattgttcctccacaactctatccagtatttattaaatcatgatttacaattagatagttgtacatggacaaattggtgcaaaaaagtaaatgctgttgttattaatttgtttaagcaagaatttgtactcccagagatttatgaagcattaaaaaattctgactttaaaattaggtctccaaatggtaaagcaacacactgcatctctaactatcaccgtaaaaatgattcattagatatcaaattcagaaaatcaactattcatggtgttaaaggtgaaacacatgaagctaccatgctgatttcaaatcctacacggaatggaactggtacacattggtctcattggattggagataaaacatctgaagcgtcaagatttgcttatgttgcatcatcaagaccaaagtatattttagtctggtgtgtcaaaaagctaaaatcttctgagcagaaggatttagaaagtttggggtttgaaatattggatataaaataa

SEQ ID NO: 73080 - DNA, 1926 bp, Salmonella enterica; identical to SEQ ID NO: 72180
  subsp. enterica serovar 4,5,12:i:- str. 08-1739

SEQ ID NO: 73081 - DNA, 1662 bp, Salmonella enterica; identical to SEQ ID NO: 72181
  subsp. enterica serovar 4,5,12:i:- str. 08-1739

SEQ ID NO: 73082 - DNA, 1872 bp, Pseudomonas poae RE*1-1-14
gtgcatcttgtgcgtgttcgcgtccggaacttcagaggcattgcctacggtgaggtccatctcaatggacacactgcttttattggtgacaacaacgccggcaagtccacattgctggaagcggtggatctggtacttggcccggagcgcctgagtcgccgtcctgtaattgatgagcacgatttctatgcaggtacgtacgtagatccggccaagaacgaggtcgtcccgatccagatcgaagttattgtcgctggactctccgatgagcagctgcggcatttccgcgaccatatcgagtggtgggattcacaggccaagacattgcttgtgggggcacccccagagggaacagacgccccccatgttggcgcagcaatacgcgtcttcttcaacggctggtatgacgtagaagaggacgacttcgctggggataccttttacgccactcccgaaatgccggatggctcctacctgcggttctctgcgcccgacaaacgaaagtgcggttttctttatcttcgcaccctacgaaccggcgcccgcgcactcagcctagagcgaggctctttgttggacgtaatccttcggctgaaggagacacgactgacaatgtgggaagacttgctcgaccaactgagggcgttgccagttggagagaccgaggatatcggcgagttacttgtcgcagtccaggatgcagtacggcactacgtaccatccgactgggcagagcaaccccacatgcgggtttcggacctcacccgggacatgctccgtcgaaccctgactgtcttcatgggcactggagcgaaaaggccggacggctccgtctattccgccccatatcagcaccaaggcactggcacgattaacacgctggtattggctctactgtctatcatcgccgaactcaagcaaagcgtgatcttcgcgatggaagagccagagatcgcgcttccgccgcacacccagaaacgaattatcaattcgctacgccagaagtcggcacaggccatcttcacctcccactcaccctacgtgctggaggagtttgatcctgcccaggtggtggttctcaagcgcacggccggtgttatgaccggagttcctgcaacatacccaccagcagtcaagcccaaggcttatcgcacagagtttaaagctcggttctgcgaagctctacttgctcgctacgtacttgtgcttgagggccgcacggagttcgacgcattgcctgccgccgcccgccggctcgccgagctggatcccacgcgattcaaatctctcgaaaaccttggaatggctatcgtcgatgctcgcggcgagaccaatgtcgctcctctgggtgcattcttccggtctctcggcaagatcgtgttcgcggtgttcgacaagcaatcacaggaggcgctcgcaaccatcactgcctcggtcgatcatgcctatgagtccgcgactaagggcttcgaaaaccttgtgttgtatggcgtgtctgaggtcgcactccgcagctatgctgctgttgtagttgctggcggcgattggccgcagcatctcgcggcatggacgccaacgcccgcaacgccgctggccgatctgcaggcggctctgtcgagctatttcagctgggccaagggtggtggcgacgccggcgacttgctcgcctcctgcccaaccgccaatgacatgcctgaatacgtgagaaccacgctggcagccatcaagaacgtcattgagccacctccgctgcctccactacctccccagctagccggcgtgccccctctcccagaggcggcagccaagccgccgccattggcagccgcctatgggaagttccaaccgtccccgccccagcctctgccatga

SEQ ID NO: 73083 - DNA, 1713 bp, Pseudomonas poae RE*1-1-14
atgacggaagtgtggagcgatcagaagcgcgactttctggagtgcgccaggcacgccttggcgctaggtggccctggtgccggcaaaacacacgtcgcgctggtcaaagctcgcaatgagattcgctcaggaatactcaagccaggccagaaggtcctcttcttgagcttcgccagaccgaccgtagcgcgcatcatcgaaaaggcttctgagctgatctctcgcgaggatctgaagcaactagaggtcagcacgtaccacggtttcgcgtggagcattctccgaagccatgcctatctgttgaatggcagaccgaacctgcagcttctgccaccgcccgaagcagcagcgcatttggcagatatcgataaggcccagcacgaaaatgagaagcgacgccttttcgaacaggagggccgcctgcatttcgacctgttcgcaagcttggccagcgaactgctgagccgcagtgatcggttaggcgccatcttctcagacacctatcccatcatcatccttgacgagtttcaggacacaaacagtgatgaatgggcgctgatccagcagcttggaaagtgcagtcgcctcattgcactggccgatcccgaacagcggatctatgagtttcgaggtgctgatcccaggcgggtgggagactttctggagaacttcggcggcgcccatttcgatttcgcgggtgaaaatcatcgcagcagcggtaccgatatcacggcctatgggaatgacctgctcactggcgcaaacaagggcaaggcctaccagcaggtcaaaatcacgcgttacgacttcatgtatggcaagagcctgcacttcaccgccaaggccgcggtgttctcggcgttggatcgcctcaagaaagtacctgacaaatcgatcgcgatcctggtgccatccaggcggttgatgctcgagttttctgactatctttcttctgccgctgacggtctgccagcgctacaccacgacgtcgcaatggatgctgaaccgccggctctagccgctggcgttatcgccacgttactggcgggaggtaccgctggcgatgtggcgagccgcatgctcggcgcacttcactcgcacattcgcgggcggcgcggggtcaggcctaccccacagaccgaacttgacctggcgggtgctcttagcgggttcctctcctcgggaaagatccgcggctccaagcgcctgttgattgtcagcgaagttcagcgcatatcagaattgcggcggcaactgcaattaacgggcgaccctgcggaagactggttacacctgcgcgacctgttggcatcgtccactgcggaagccttgaagcaagtagcaacagatgctcgctacctacgactgctgcaccgaggctcggtattgcgaaccaatttgggtgcgttgtggcgcgcccagggagagtacatgggggctgaagaggcagtccggagtgccttgatgcaggagcatttcgctgcagctcaaaaggactggcgtggcatccatctgatgacgatacataagtctaaagggaaggagttcgacgaggtcatcatctatgacggcctttaccagcgcattgccaaagccccgcaggatccaaaaatctgcgcccaggatcttttagtactgcgggtgggcgtgactcgggcgatacgtcggaccaccattgtgactccgaagcgcgatccctgccctttattgtga

SEQ ID NO: 73084 - DNA, 2019 bp, Rhodopirellula europaea 6C
atgaaaatcagcttcctgagtttctgcaactttcgttgctttggacctgccccagtttcgatcgacttgaacgatatctcggttttgataggtgagaacggggctggaaagtccgccgctcttctcggactggctcgtttgttcggactcaccaaagagcaacgttcaattcgcgccgatgactttcatttgccggttggagtttcgcgatctgatgccgatttaaagtcgttgtcactttggatcgaggccagaatcgaattcgatgcggaaggcggcggagatgatacgtccgctattcctgaacacttcaagcagatgcgagtgaatgaacccggtggtcgaccgtattgtcgaatccgcctcgaagcagtctggcagaaaggaaatttgcctgaaggtgaggtggagcaatcgctgaactggatcaaaacgtcgtctgatatttcagatgaaattgacgacgaatatcgccagccgctctcagcgttcgagcgacagcgaattcacgttcactacattcccggagcacgtgatccatcgaagcatgtccgcgtttcatcgcaatcgctgctcaaaaggttgctcgatgccgctcgttggacagacgaccttgccgattcgatcaacgctgcgaccgacggaattgtaagcgactttagtcgtgaaccggcaattacagagcttcagcgttcgctcaatgagtcttggaacgggttgtacaaccgcagtcgattcaaagaacttgtattgcacctcgaaacacaaaccattgaagacttcgtctcgtcctttacagcaggaatgaagaccgaagcaaaagatgattgtgttcccgtagatcgtttgagcgacggcctgcgatcactcttgtacttttcgatcgtgaaatccgctttccagatcgagcaagccgcaatcgacgacttctttggcgaccacccgttcgacgaagaacgccttgaccctcccctgctgacagtgttcgcggtcgaggaaccagagacccacctcgcaccgcatttgctgggacgagtagtaaaaatgtttcgcgagatcatcaagccaccgagggctcaggcgatcttctcgtcacactctccttccgtgcttgcccgaattgaacccgaggaaatccgatacttgcggctagattcgaccacggcggtcgcgtcggctcacaaattgagcttccccacggaacagtccgacgcggacaaattcattcgccaggcggtgcgtgcctatccggaattgtattttgctcgccttgttgttctcggagagggggacagcgagcaagttgtgatggcacgtctccttgatgcaaacgatttgccttctgatcccaatgtcatttctgtcgttcctcttggcggtcgtcatgtgaatcacatgtggcgactgctcaatagtttgtccattccccatctcacattgctagacatggattgcgatcgaaagggcggcgactgggggcggattcactacgtctgtgaacaactcatcgaacttggtcataagcgagaagaaattcttgaagttgtcgatgacgataacacctctgtcatgagtgacgagacctttgcagaaatgcctgattggggcttaccccatgatgacttcaccggatgggttaagagccttcgcaagtacggcgtctatttttctgaccccctcgatctggattactcgatgttgcgaaagttccctgagcaataccaggagactgccgacggcgcaccacggatactttccaaaaaacctgagctgaggagtgctcagatcaatggtctatttcgaacggttttcggaaagaaaaacatcgctgaacccgaacgactagaaactcaggttaaaagccttcgatggtatcgctacctctttcttcaacgcagcaaacccgcgacgcacatggcggctcttgctgaaattgaagacgaagacttgctggcgaaatgtcctgacgaattaaagagtctgattcgcgcgatcaagaggaaaatttataatggctag

SEQ ID NO: 73085 - DNA, 1944 bp, Rhodopirellula europaea 6C
atggctagactgcgcaatcgaaatctgaagattgaaaagcagtcttggcagcccgttggaatcgagtctttagaagacaacgccctgatcgctgttaaagctgaacggagcagtatcgtcgttgctggcccaggtgccggtaaaactgaattgctggctcagcgagctgactatctgctgcgaacggacacaagcaagtcaccgcgccgaatcctcgcaatcagcctaaagcgtgatgctgcgaagaatttgcaggatcgtgtcgggaagcgtctgcctgcggaacttgcagagcgattcgactcgatgacactcgacgcgttcagcaagaatcttgtcgatagattccgcctggcaattccagaattctggcgaccaaacgacgactatcgtattgaattcaacataaaggaggagcgtgcagaccgtatgatccgagaggcggcccaacgactcaattgcgaacccgctgacgtggcgggcattggaccaatccggtggtatcgggagtgcttttcacttcggctcccaatcgacggaagtgcgatcctggaaaacggttccatacgcgaacaattggccgtgtctcagtggcagcactatcttcatggaaaataccgctacctcaactttcacatgatcgctcgtcttgcagagctggtgttgcgaaccaacccggcagttttgcacgcaatgcgggcaacctactctcacgttttcctcgatgaattccaggacacgacaaaccttcactacgatcttctacgaaccgcatttcttgaatcagactcagtcttgaccgcagtgggcgatacgaagcagtgcatcatgacttgggcaggggcattggccggaatcacgaagcgatactcggaagaattcgctgcagatccctacgtgcttcgagccaactatcgttcagaacccgaactgatccacatcattggatcacttgcccagcagatcgagcccgaggcgattctccccatttgcggacgggggcgtgagtctggaaacggccaatgtcgtgtcatcgcgttctcggatgatgcagaggaggcgatcgcaatcgcattggtattgaatgagctggtcgaggatgaaggtgtcgaaccgcgagacatctgtgtgatctgtcggaaatttgtcggtcaatactcatccaatctggtcgaggcgttgcagcagatcaacggtttggcgagagtgcgcgatgaaacaaaactacaggacttgctggctgagccccttgtcgaattggttgtagatgcttttctcgtcgcggtaagcgatgagcctcagccggattcatggtcccgccttcaatcagtactagagaagactggacgcagtgactccactcaacagcagaggattcgcaacaaactgcttagcactttgatcgactgtttgcggctatcacttccgcagtgtgaaaagacagacgatgggatcaaggtcgaagtgaatcgagtcatcgacgcaattggagaaaagtcgtttagacaaagtcatccacaatatcgacaaggcaccttcttcgaggaaactgtctccaacgtagtcaagcaacttgggtaccgctacggcgacgaaccacatcagtttggaacctggaccgatgtgatcggcgatctactgggcgagacttcaattccggtgatgacaattcataaaagcaaaggactggaatatcacaccgttatattcgtcgggcttgaagatgctgcattcaacaacctcaaagacccagccggagacgcgaatgcgtttttcgtcgccttctcacgagcgaaacaacgcgtgcttttcactttcgcaaaatctcggttcaggcggaagcaaagccgtaagaacgtcaatctgttgtacggttggctagaagaagccggcgtcggtatcgaaaacgcatcggacatcaaattcgacgagtcgatttggtga

SEQ ID NO: 73086 - DNA, 2067 bp, Treponema denticola SP33
atgattttgaagagaatggaagtcaaaaattttcgattactgaaaaattttgaattaaaatttaaagatgaattatcgttagttataggtaaaaataattgtggaaagacttcgtccctgattattttagataagatgctaaattcatctaaagtaatgtgggaagatataaatttagagtggcagaaagagctgcatgaaaaaataattaattttgatatatctgagcaggaagaagtttcatcattagaagcgattaatctgcgattgttcattgaatataatgataatgattcatatacaaatatccaaaaatttatgatggatttaaatcctgacaataatactatagttttggaatttatttcattaatatctgtaaagaaaattatagagttaaaagacatccttaacaaaaaaaaaattgaagatttcatatcattttctaaatatattagtaagaattttgcaaacttttttgaaattaaaaaatattcaagaggatttgatgtcgaattaaatcaaataacacaagatagatcagaagaaattgataataaagatattcaaaaagtaattaaagtggcaggaataagagccgatagagctgtttctaatgatgatcgtaatcatgttttatcaagtttaacaggtaaatattttagttcttataaagccgccaaaaataaaagtgagttggtatttagaaaacttgaagaaaaattggaggaagctgataaagaattatataagatttataacggagaaaaaagtgaaagtggagaagccattgatgggatttttagtggtgttattgatgttataaaaagatatggtggagcagaaaatgggatagatatagcaatagaatcttctatttctgagaaaaacctattatcagataatacaaatttaagttacaggcagggtggagattgtttgctaccggaaacatacaatgggttggggtatttgaatttaattggtattttgtttgagattgaaaccaagatacaggaattatttgaacaaccggcagatataaatcttttatatattgaagagcccgaagcacatacacaccctcagttacagtatatatttataaggaatattaaatctcatatcaaagcacatagaaaaaagttgttggaagacaagaataaacagttgcagattgtaatcacttcgcattcatcacatatagtttctgaatgtaactttgatgacattatatatttaaagaaaaacgggaatacggttatagctaagagttttaattctttaaaagaagagtatggtggagatgaacagaaaggatttaagtttgtaaaacaatatctgacaataaatagaagtgaacttttctttgctgataaagctatttgtatagaaggagataccgaaagaatcttaatgccaatgatgatgcataagattgataataaagaagagccagaagaaaatattatcccactattatcacaaaatatttctgtaatagaagttggagctcattcacatatctttattccattatttgagtttttaggtattaaggttttaataatcacagatatagatgccgctaataaaaatgacaatgggagatatgtaaaatcacaccctaaggaagcaaagtatacaagcaacgcttccataaaagattttttcaaagatacttgtcttgatgagtcaaataatgaatttaaggaacttgtagaaaaaatacctgaggataaaattaaaaataatataagaatagcttatcaaataccggaaactgatggtgagtaccaagcaagtagttttgaagatgcatttatagcattaaataaagactttatattaaagaataaagaagggctttgtgaatatggagctttaaaagatttttcgaatgatgaaatagaaaatggtgattattataattttgctttgaataatgtgaaaaagaaatctgcatttgcatcaagcttattgtattttgatgatgagaatggcgaagaagatgaaaaatgggcagttccacattatattgaggagggcttattatggatacgctaa

SEQ ID NO: 73087 - DNA, 1905 bp, Treponema denticola SP33
atggatacgctaacattggaaaaagaagtattagaagctattcaatgtataaaaaatggtgaaaattttattttagaaggtggggctggaagcggaaaaacatactcgttaatttctttaataaatgcactcacagaggaactaccagatattaggatagtatgcattacatatacaaataatgcagttgcagaaattttatcaagaatagaaaatgagaacctttgggtttcaacaatacatgagtttatatgggctcttattagaaaatatcagaatgaaataaaggatattttagttgagcttattaatgatgaaaatgaagagaactttaaaaagccaaaagatttttctgaggatttaatttctaaaaaatatttcgaaaatatttatgtggattatgacgagtattattcagtaacgccaaatgatgaaaatagagttaagatcagccatgatcatattttgattgttgcagagaaaatgtttgagaaatacaaaaaaatagcggatattttaaaggatattgcagactgcatttttgttgatgaatatcaagacaccagtcctttagttgctgatattttattaaagcatcttgagcaaagcagtaagaaaaatgtaattggttttttcggggattcaatgcagtctatatatgacaatggagttggtgatttaaatcaatatagcttaattaaaatagtgaagactcaaaaccgaagaaatccaagagttgtaattgaagtagctaataagtttagaaatgatggtattgagcaagttccttcagaagatataaatgcacccaatatggagaatggcaccattagagaaggtagtattaaatttttatatggaactgaatcagatgatttcattaatgttaaggggaaaaacatctttaaaaattgggatttttctgatggaaaacaaactaaagaattaaggctgacacataaatacaatgctgaaatgggtgaatttaaagacttatatgatttatataatgatgatttgattgttacacttataagcaagataaaagaaaaaatggataagggagatttaggcaatgataagaatttgggagaattggcattagaggtaaaaccgatatttaagaaagcagatttgttgaatcaaattattggaaatgaaacttataagtcaatatacagtgtattagaaaatatgtcatgggatgaagcttacgagaaatgtagaatcactaaggaatctcttatgtcatataaattaaatgggatgagcggaaaatatgaagcaaattcttatagagatagaatcctacgaagaatggatattttagacgaaattattgaactttatgttgctaatcgattaaatgatttcttgcgaataacaaaattttccattcgcaataagaatgataaaattcgccttaagcgagcaatggagtatctgataaatgaaaataacaaaacaatagaagaagttttagagtatgcagaagaaaatgagttactgaaagaagatgaattattcaatgactatattctaaataaaggattttatttatgggagagattaaaaaaacttccatttaaacagtatagaaaaagtgttttttatttaaaagaattttctcctaattgtacccaacatagcgttaagggaagcgaatatgacaatgtacttcttgtattagaatctaattggaataaatatgattttaatacattgtttgggaaaggctctaaatccgatagtgttcaactgagaacaaaaaaattgttttatgtttgcgtaacaagagcaaaaaagaatttaataatatatatgcctacagatgattttgagatagtagacaaagctaagattttatttggtgaggggaatgttgtagatatgtctctaatttaa

SEQ ID NO: 73088 - DNA, 1458 bp, Cronobacter sakazakii SP291
atgatggagaaccttcggggggtctatcttccacctctccgcgatgcctcgcaggggcttcgtccgaaccgtaacagccaattggctcgattacttcatttgctcaccgatgatgcaggtcgtgacacgataaacacggctttgaaacaacttgatgaaacgcttaaacaagacaaatccattcaaagcacccataaggcgatatcaaccagacataattccatgatgggtaatcagttagcgcaggagcttgccgtcgggctcagcgtgactgattttcagcgcctctcttcccgactaaccctgacagctgaagccatggagattgagaagaatggattgggtttcaataatctgatcttcatggcggtagtgcttagtgaattggctaaaaatactgattctgctttcagcagtttgattatcgaggaaccagaagcgcatttgcatccccaacttcagcgcgtgttgttgcagtatcttgcagggattccaacgggtgagggcgaaaagactgtacaactatttgtcaccagccattccccaaattttgcaagtaattcaaagctggattctcttgtatgcttgatcgagaacgagtctggtgttgagaccttctttccacgtgatatcaaatttgaaaagggaaaacgtgaaaaactagagcggtatctggacgtaaccagggctgaactcttttttgctcgccgggttatttttgtcgagggcgctgcagaactcatgttgatagacgcacttgctaaaaagatgaactttgatctcagggaatatggggtcagtctgattagtgttgagggacttaattttgactccttcctcccgctttttggacagcagggactgcgaatccccgtcgctgtagtaaccgatgcagatccatttgaagaggagattgaagccgtggtagaggggcaggttgaagagggtattgacgacttactttcggaagctgcctaccaggaagaaacagacgctcctgacgacgaagagcctactggtgatgctgagaaaaagaaaaaagttaaaaggaaagaggtgtatccagcgttgggagatcaggtgaggttgtcggcaaataccatcaagatgaagaatctggaggatgatttcgtgaaggtttttcatggattgaagaccttagaatatgacttggcactcattgaggagaaccgcggtccaatgcttactgcattagccgacccgcatccaaaaatatctaaagctctgcgtaagatagttgatgcccagccagacaatacagcaaaaaccaaagcactgttctgtggcatgtttgagcgcaaagatagcagcaacatccagaaaggtcgatttgctcaggcattagctgaagagatttcgaaagataatgattttaaagttcctgattacctaaaaaaagctattcagcatgcgtgtcagggagtgataaagccgtga

SEQ ID NO: 73089 - DNA, 1728 bp, Cronobacter sakazakii SP291
gtgaaactatcaaagcaacagagagatattattgatgcgccgttaggaccaattgctgtgactgcctgcgccggaagcggtaaaacggagacagccattcgacgcctgattgcggtaagagaaaagatggaaaccagccgaggacgagtcgtgctcttatctttctccaatgttgcagtcaatacctttaatagagggtatgcaggactcgcttctgccctcccggatgatattaaccgtcgtcgggtggaggtcgatacacttgacggttttttcaccaaacatattttacgcccccatgcctatcggactatggacacggatcgggcggcgtatctagtgtcaggctcggaaccttttctaaccagttttcaatattggcgtaaaaacagccatccattgccattaaaagatataaaagtaggtatgtgtaataaaaaattctactttattacaagcaaaggagatgagctggagctacttgatgaaagtgaggttttaaaaatcatcactagactgggaaagacaggtgcctacactcatgagcttggccggtattgggtttatcagactttagtctcacaaccagctgtactacgtgcgctggcaactcgttacccgcaaatccttgtcgatgaatcccaagatttggggacagtacaccaggaaatcttagaattacttattggtgcaggggtaaagataactcttataggagatgtaaaccaagggatttatggcttcgcaggtgcagacggagagttcctgaagagctatgaggatcgtgccgaggttaccggctacaagcttactcgcaactatcgttccctcccaccaatcattaacatcgccaattctctttgtcgccgtaatgacgagcctgaccggcagaacgaacaaggtggtgcattttttttcggatacaaggaatctgaactgccaaaattaactgaagcattcaaggcccatattgatgaattaaacatgcggcttcaagattcagtgattctttgtcgcggggcagcgagagccgaaacaattgcgggtagagcttccccgccaggacaaggtatggtcaaagtcttagcagaagcatcgttgttacgagatcaacataatgactaccatggctgctttaaattggtctgcagagcaattattggcttactggacaatgccccccctggactcagttcaggacttcaggggttatcacatgaaaacggaatgggagggttgaagcgactactatggtgttttagtcgcagcacagatgcgggacttccctcgtctggacttccagcgaaaacagactggcataccaagctattaacgaatgtcaaagcgcttctcgtagagattgaaaaacaatacgaatataaaattgctggcacgcttggcactaaactgacaaaaaagctcctaccggaccttccattgtccagtgtagcagtctctcagacgcatggattcagagtagagacggtgcaccaggttaagggggaatctatcggcgcagttatgtatctcgcgaaaaaaaaccatatcgaagcattgctctcagggactggtgatgaagaaggccgaattgggtatgtcgcaatcactagggcaaaaaacctattctggctcgctgtgccagaatcatgcctaaaagagttcagggataaacttattagagctggttttcaggaacggaccaaacctctggtcattgctcctgcctga

SEQ ID NO: 73090 - DNA, 2040 bp, Streptococcus mutans U2A
atggaaattaaaaaaatctatattcaacattatcgtctattaaacgatttttctttagagttgaaaaatgatttatccttaattgtgggtaaaaacaattgtggcaagacttcggttttatctgtgttagaaaaaatattcaataaaaattccaatcgcaatttggtatgggaagatattaatttaaatcataggagggaaatctttgagaatataaagagagtctctgatattcctgattcggaattatcgtctattttagggattaatcttcaaatttggattcaatactcagaattagattcttatcaaaatatccaaggatttatgatggatttaaatcccgaaaataattttattattcttgaattttcgtatataattcctactcaaaagcttcgcgagataagtagcttgacttgtgattttgcagatgatttttcaaaatttgaatcatttatgaagaaaaatctgaataaatttttcgaaatacagatttattcacgtggttataatcctattactcaagaaatgacagaagaaaagtctgatttacatgaaatgaaagatgttcataaaattattaaagtaagagggattagtgctagtcgagaagtatctaataaagaaaataaccattcattatctaagacatcaaatcgattttataaattaaataatggcgaagaaattaacagtaacgcaaataatttactgcaatctgctattttaaaagcagatgaaactttaaccagagcatatagtggtgatgatagcgtcgaaggaatttttacttcagtctttaaacgcgtcaaaagatttggtggaaatgatagtgaagcagagttggcaattcattcatcactgtctgagaaagatattttaagtaataatacgacactgtattataagcatgatgatagtctattacctgaaacatataatggtttggggtatttaaatttatatggaattatttttgaaattgagactttaatggcagatataaaaaacgaacctgctgatattaacctaatatatattgaagaaccagaatcgcatacacatccacaattacagtatatttttatcaagaatattaaagatttgctaaaggaacacaatgatgaactaaaagaaagtggagattttagttgtattcaaactttaattacaactcactcatctcatatagtttctgattgtaactttgatgatttaatatactttaagcgtgatgctggaacggtaatatcaaaggtttttaattcattgaaagaagaatatggaaaagatcaattaggatataaatttgtaaagcagtatcttacccttaacaatagtgaattattttttgcagataaagttatttgtattgaaggtgatacagagagaattttacttccaacaatgatgcaaaaagtggatatatctaacccacttaaccaaagttcaatgataatgccgctactttctcaaaatatttcaattattgaaacaggtgctcattcacatgtatttaggaaattatttgattttttaggaataaaagtattgataattacggatattgatccagcaaataaaaatgaaaataatcgcttgacttcttgctcagcagtagatgctacctctacgacaaatacttcaattaaaaatttttttgatatttctggagatgaagttttttcaatagtagcccaaaagagttttgcagaaaaaataacatcagatgatagaattcgtattgcatatcaaattcccgaagatgaaaatggttatcagcctgctagttttgaggatgcttttatcagtttaaataaacaattcattattgatcaaaaagttggttttattcaatttgaagctttaaaagactttgatgatagtgaaatagaagatttctataaatttgctagggataaagtaaacaaaaaatctgcatttgcatcaagtttattatattttgaaggtgaagaaaatacttggaaagtacctaactatatttcggagggattattatggttgagaggacagtag

SEQ ID NO: 73091 - DNA, 1794 bp, Streptococcus mutans U2A
atggaagaaccaaaaaaatcgattgtatgcatcacttatactaacaatgctgttgcagagattagatctcgaatcattaatgataatttacgggtttcaacaattcacgagtttatatggcatgtcattgaaaattttcaaaaagagattaaagaatgtcttgttgagttaataaatgatgatgcacaaatcttattcgttgttccaaaggaagtattaggtgaggaacctatttcgcttgattactttgatggtgtttgtgttgaatatactgaatggtattctatgagcataactgagcaaaataaagttcgaataagtcatgaccatgttcttatagttgctgaaaaaatgttttctacatatcctaagttatgcgacattttgatcgatatagctgattatatttttgtagatgaatatcaagatactagtccgttagttgtaaaaattttattggaatatatacagaatagaactaagaaaaatattgtaggattttttggagattctatgcaggccatctatgactcaggagtaggagacttaggttcgtataatctaataaagatagcaaaagctcaaaatcgtcgcaatcctaaaaaagttattgatttagctaataaatttagagatgatggattggttcaaactccatccaacgatgatacagcacctaatatggataatgggagtatcattccaggaatagtgaaatttgtctatgggaatgatattaatcaacttgaaattcttagaggtagtcaactttatagaaagttagaatttaatgcaccctcaaaaacaaaagaattgcgcctgacacataaacttaatgcagaaatggcaggtttttctaagttatttgagttatataatactgatttatttgtaaaattaattacaggtataaagaaaaaaataaatgagaacaagatagatgataatggaaaattatttaaagatttagtagaagaagctcaaatagttgttagaaggggtggtcccttaatagtcgatgagattaaatccaattcagaactatcagctttttatgatgaaattaaaacgtgctcgtttgaagaagttagtagtaagagtaaagttaataaagaatcgctattatcttataaatttaatggattaagtagtagatatgaagcgggcacagatagggataggattcttaaaaggttggatttagtctatgagctagtagaactatataaaacaggtaagcataatgaatttttacgtattactaagtttaaaataacttcgtccaaagataaaattagtctatcaaatgttatgacagaaatctctgatgatgatgatatcacaattggaagagtaatagagcttgcagaggaatgtgaactaatttcaaaggatgacttatttactaattttattaaaaatagaggacattatttatggtcgcgacttaagataatgccatttcaagaatatgtaaatagtattgattatctcagagaatatgtatctgttataacgcagcataaggtcaaaggcagtgaatatgagaatgtcttagttttattagataatgggaaatggaatcaatataattttgataccttgtttggaaaaggctcttctaatgagaacgttcaaaatagaactaagaggttattctatgttgcaattactagagcgatgaaaaatttaattgtttacatgccgagtaatgatcgtcagattattgaaaaagcaaaagattattttgaggagagtgatattgttgatgttctgtcattagttgatgagtaa

SEQ ID NO: 73092 - DNA, 2034 bp, Streptococcus mutans M2A
atgaaaattaaaaaaattaatattaaaaattatcgtctattgaaggatttttctttagaattgaagagtgaattgtctttaattgttgggaaaaacaattgcggcaaaacctcagttttatctgtattggataagataatcaataaaagatctagtttaacctgggaagatataaatttagatcatagaaaagtaatttttgaaaatataaaaaaggtctcggatactcctgattcagaattagagtctattttagggattaatcttcaaatttggattcaatactcagaattagattcttatcaaaacattcaaggatttatgatggatttaaatccggataacaatcttattattcttgaattctcgtatataatacctactaaaaagcttcgcgagataagtagtttggcttgtgattttatagatgatttttcaaagtttgagttgttcatgaagaaaaatatgagtgaattttttgaaatgcaggtttactcactaggatacaatccttctactcaagaattaacagaagaaaaatctaatttacttgaaatgaaagatgttcataaaattattaaagtaagagggatcagtgctagtcgagaagtctctaataaagaaaataatcattcattgtctaagacgtcaaatcgattttataaattaaataatggtgaagatattgacagcaatgcaaataatttacttcaatctgcaattttaaaggcagatgagactttaacgaaagcttatagtggtgatgatagcaacgaaggtatatttactcaagtctttgaacgagtaaaaaaatttggtggaaatgatagtgaagcagagttggcaattcattcatcactgtctgagaaagatattttaagtaacaatacgacgctatattataagcatgatgatagtctattgccggaaacatataatggcttggggtatttaaatctatatggaattatttttgaaattgagactgtaatggcagatataaaaaaagatcctgcagatattaacctagtttatattgaagagccagaatcgcatacacatccacaattacagtatatttttatcaagaatatcaaagatttgttaaaagtacacgatgatgaactaaaaacacgcggagctactagtggtattcaaactttaattacaactcattcctctcacatagtttctgattgtaactttgatgatctaatttattttaaacgtgataacggcacagcagtatcaaaggcttttaattcattgaaagaagaatatggtgatgaacaactaggatataaatttgtaaagcagtaccttactctcaatagtagtgaattattttttgctgataaagtcatttgtgttgagggtgatacagaaaggattttaattcctacgatgatgcaaaaggtggatatatccaatccaataaatcaagcttctaatacaatgccattgctttctcaaaatatttcaatcattgaaacaggtgctcattcacaagtgtttaggaagttatttgattttttaggaataaaagtattgataattacagatattgacccagcgaataaaaatggaaataatcgcttgacttcttgttcagcagtagaggctacttctacgacaaatgcttcaattaaaaacttttttgatatttctgaagatgaagttttttcaatagtagctcaaaagagttttgcagaaaaaataacatcagataatagaattcgtattgcctaccaaattcctgaagatgaaaatacttatcagcctgctagttttgaggatgcctttatcagtttaaataaacaattcattattaatcaaaaagatggtcttattaaatttgaagctttaaaaaacttcgatgatagtgaaatagaagatttctataaatttgctagggataaagtgaataaaaaatctgcattagcgtcaagtttattatactttgaagatgaaggaaatacttggaaagttcctaaatacatttcggaggggttgttatggttgagaagacaatag

SEQ ID NO: 73093 - DNA, 1923 bp, Streptococcus mutans M2A
atggttgagaagacaatagagccggaagtagaaatggtatttgaagcaattaaagaaaataaaaacttcattcttgaaggtggtgctggaagtggaaaaactttttcattaatttccataattgaaaaaatctcaagagatgaaccagacaaatccattgtatgtattacttatactaataatgctgttgccgaaattagagagcggataacaaatgataaattaaaagtatcaacgattcatgaatttatctggagtatcatagaacaatttcagaatgaaataaaatactgtttaattgatctaataaatgatgatgagcagaaagcatttattagacctctcgattatccaagtgaaggtcaacttacagatacttattttgaaaacattcgtgtagattatgatgagcgttattcaatgagtataattgataattgcgttcaaattagtcatgaccatattctaatagttgctgaaaaaatgttttctacatatcctaagttatgcgacattttgatcgatatagctgattatatttttgtagatgaatatcaagatactagtcctttagttgtaaaaattttattggaatatatacagaatagaacaaagaaaaatattgtaggattttttggagattctatgcaagctatctatgactcaggagtaggagacttaagttcttataatctaaaaaagatagcaaaagctcaaaatcgtcgcaatcctaaaaaagttattgatttagctaataaatttagagatgatggattggttcaaactccgtccaacgatgatacagcacctaatatgtataataggagtatcattcaaggaatagtgaaatttgtctatgggaatgatattaatcaacttgaaattcttagaggtagtcaactttataaagagttagaatttaatgcaccctcaaaaacaaaagaattgcgcctgacacataaacttaatgcagaaatggcaggtttctctaagttatttgagttatataatactgatttatttgtaaaattaattacaggtataaagaaaaaaatcaatgaaaacaagatcgatgataacggaaaattattcaaagatttagtagaagaagctcaaatagttgttagaaagggtggtcccttaatagttgatgagattaaatccaatccagaactatcagctttttacgatgaaattaagacatgcttgtttgaagaagttagtaataagagtaaagttaataaagaatcgctattatcttataaatttaatggattaagtagtagatatgaagcaggcacagatagggataggattcttaaaaggttggatttagtctatgagctagtagaactatataaaacaggtaagcataatgaatttttacgtattactaagtttaaaataacttcgtccagagataaaattagtctatctaaagttatgacagaaatctctgctgctgatattacaattggaaaagtaatagaacttgcagaggaacatgaactaatttcaaaggatgacttatttactaattttattaacaataagggatattatttatggtcgagacttaagataatgccatttcaagaatatgtaaatagtattgattatcttagagagtatgtatcggttataacgcagcataaggttaaaggtagtgaatatgagaatgttttagttttattagataatgggaaatggaatcaatataattttgataccttgtttggaaaaggttcttctaatgagaacgttcaaaatagaactaagaggttattctatgttgcaattactagagcgatgaaaaatttaattgtttacatgccgagtaatgatcgtcagattattgaaaaagcaaaagattattttgaacaaagtgatattgttaatgttctgtcattagttgatgagtaa

SEQ ID NO: 73094 - DNA, 1272 bp, Nodularia spumigena CCY9414; identical to SEQ ID NO: 72170

SEQ ID NO: 73095 - DNA, 2325 bp, Nodularia spumigena CCY9414; identical to SEQ ID NO: 72171

SEQ ID NO: 73096 - DNA, 2184 bp, Clostridium ultunense Esp
ttgctattaagatcagtacaacttatggtagtgacaataggttgtcctggattttatatacaattatatttagaagaagatagtattgttgtttgtgagggggatttgatgtatatttctgaattaatacttgaaaactataggggctttaaagggagaaagtctatattttttaaagaagggaccaatattttaattggtcataacaattcaggtaaaacctctattctaaaggcattggagttactttttagtgatggaaaatcaaaaagtttgagtatagatgactttaataaaaatatttctattgaagagctaaaagaaagtcctcctaaaattaggatagcagcaaaacttactgaatcaaaaaatgaggaagaatactcagatgatttgattacagtttcaacttggcttacaaaattagacaaaccttatgaagctctaataacttacgaattttttcttcctgaaaaagaagaaaaagaatataagaatattataaataatattaatagtgatgatgtacatgattattggcgtgaaatagaatacaattttattagaaagtatatatataaaatttatgtaggaaatccagaccataagaatgttgtagaaccagaaactataaacaagtttgattttcaatttttaacagcaatacgagatgtagaaagggatctatttactggcagaaattcattgttgaaggaggtaattgattttttcattgattatgagattaagacggatcgtgacatggaaaatgatgagaagacaaaaaagatagaagagagaaagaaaaagttttcagaagatgctggaaagctaattagttctttgcaaagtagaatggaactgggaaaaaagtatatgttaaaatacgcagaagaaacgggggctgcatttgataatttgaaaccatcttttgaagggagaatacttgatacagaattatattcggctttaaaattaatagttgaagatgaaacaggatttaagcttccagttagtcaaaatgggttaggctataataacctaatttacatttctctcttacttgctaagatgcaaaaggatgcatcaggagaatatttaggtagtaatgcaaaaattttttcaatccttgcaatagaagaacctgaggcccacttacatccaaatatgcaatataagtttttaaagtttctaaaacagaatcaagagaatcaagttagacaaatttttataacatcccattcgcctaacataacagcagctgcaagcctagatgatttgattatattatgtaaagaaaaagatgaaataaacatctcatatcctggaaaagtgtttacagattgcaaagaggacataatttcgaagaattatgttcaaaggtttttagatgttacaaaatcagatatgttttttgcaaaaaatataatttttgtagaaggaatttctgaacaattgcttatacatgagtttgcaaagattttaggatatgacctagttgatttccacacatctattattaatattggaggccgatattttgaacattttttaaagttatttgatacttctaagagtagttatgcaattaataaaaaagttgcatgtataactgatttagatcctgttaagaagaaaaaaggagataccaggtggaaaaaatgtttaccttttgaacttgatagtgatgacaaatatgaatataaggattgttccaatgatattgtcagtgaatatataaataatcctgaagaaaacaatattagagtattttctcaacagaaaggtattagctgtacatttgagtatgatattattttacataatccaactactaaggaattgataactgattcagtaatgaattctgaagagattaaggatttaatggatgcaattaagaacaaaacagatgtttctgatattattaatataataaggaatggcaaatttaaggatactctatccatacatataaataatggcaattttaataatgaagaaaacattgtacatatagttgcagcaagatatctaatgtctattaaaaagggcgttgttgcacaagaattggcagatgttatttctgaaaaccaaataaataaattattagacgaagcccattttgattttattgtaccaacttatataagtgaggcgatagaatggatttacaaaggataa

SEQ ID NO: 73097 - DNA, 1722 bp, Clostridium ultunense Esp
atggatttacaaaggataataacattagaaagtagcgatgaattattagaaaatatagaaagtcattttaaactatgtgcaggtccaggatcaggaaaaactaggttcctaattaatcatattaaaaatgttattaaaaactctaatcgattaacaaatgctaggaaagtagcatgtattacttatactaatataggggtagatactataaaaagaagattaggcaatgcaattaataaagttgaggtaagtactattcatagttttctttatagacatgttgttaaaccatatttgtggattattaatgatgaatacaacatacctttagaaaagtttgaaggacacagtgaaataatgccaacttttagtattatgcaagagtggttaaaaagaacaaatcaacaatatgtaaaggattataacaaattaaaaaaggaacttttagatttacaatgggtagttcaagacggagatatcaatttaaaatttaagtacccaagtgcattgatgataagaaatgattctttaattgagtataagaaggtttgctgggaaaaggctttaatagctcatgacgatattttgtatttaagctataaaatattaactaagaatagtagaattctagaaattttgcgtgctaaatttccatatatatttgttgatgagtttcaagatacaaatcctattcaagctatgatgctaaaaatgattgctgataaggagacagtagtaggagtagtaggagattatggacaatctattttttcttttcaaggagcagatgtacaagaatttattaattttgatttagaaggtgggaagttatataagctagaaaacaattatagaagcactcaggaaattattaatattttaaaccatgttaggaatgatacgaattttaaacaaattagtccatgtaataaaactggaccattaccacatatacttgtgggagggtttttagatgcatattataaagctgtaaaaatatctggagataaaaaactttgcacattatcatatagaaatgatgtatctaatgccatgaaatttaaatatgacagttttttcgattcagaaaatattaatgaaccaatatttacagatggaaatagtgataggggatggataataacatatacaataacagcaatagagcattgtatacagggaaaaatcaaagatgcaataaaatatatgaaaattgcctatagaaaaacagaaggttttagcgataaagaggctttgcaaaatctaaaaaggcttgtcaatgaatatgaaaaatataaagatagttcagttaaggattattataataattacatcgcaggttattatgatattaaatcaaaaataacaagtggcagcatcaatgaatactatagcaatctaaaatataaaaaaattgcaattggtgttaaaataagtgatgatgatagtttaaatagaactatacataaatctaagggtgatcaatttaaaagtgtgttggtaatcatacctttagacaatgatggttttgatgaggaaaaaggtttggaatttatattaaatccaaatttagacaaagaggagaatagagtatattatgtagcgttgagtagagcaaagaagaatttgtttataaatgtatcaaaattatccaagggaaataaacaacaattagaaactattggttttaatgtaattgatttagaaaataataagatttag

SEQ ID NO: 73098 - DNA, 2088 bp, Streptococcus tigurinus 1366
atgaagttaacaaaaatggttattaataattttagatcttttggggagtgtcaagcaattaactttaataatcaaactgtactgatagggaataatagttcaggaaagacaactgtattacaggcattgagtaagttgttttcagataaacaaagtgatagaatcattcgaaaaagtgattttcatttaccaaaagggttaaaacctggtgaaaacacaagaaatctttttatagaaactatttttgagtttgatgaacttgctggaactgtctatagaccagccattccaatatttttcgagcactttacagtttctcaagatggtgcaaaaccttttttacgaatcagattagaatcttcctgggaagatgatggaacagttgaaggaagtattgatactcaaatttattatatttcatctgatgaagatactattagagatgaagacaaacatcgtgctcctagaaaggatttggataaaattagggtactttatgtaccagcttcaagaacacctgagaaggagttgggtaatgcttcaggtagtatgttaagtaggctggtaaatagtataaattggactaaagatgagataaatgaaattaaagataaaattgatgagttgaataacacctttttatctgaaaatggagcattaattcagattaacaatgagattcagaaatcatgggaattatatcatgaagataaccgtttttctcaagcagagttaattattaattcttctgagatggcggcagcacttagacagattgccttaaaattttcaccaacaaccactgaagaagcatttacagtttcagatctaggagatggactgagatctattttttatttttcacttgttgattcgatacttgatattgagttagaaattaccaaagaccgtgaagagaatcctgataatccaagatttaagttggtacctccaatactaactatcttagcaatagaggaaccagaaaatcatattgctccacatcacattggaaaactagtaaaaaggtttaagcaattaagtaataatgataactctcaagtaattttaacgtcacattccccagctattgtaaaaagaattgaaccagaagaattgaggtatttaagaattgaaagtaatggcagagttcttcaaaccattgtttctgatataaaactacctcaagatactgatgaatcttataaatatattaaaggagcaattcaagcatatcctgaactatattttgccaagttagtagttctaggtgaaggtgatagtgaggaactgctattaccaaagttttttgatttacttgggaatgagatagatagctctcagatttcaattgtgcctttaggaggaagacatgttaactatttttggaaattattaaattctctaaaaatacctcatattactttactagactttgataatgaaagatacggaggtggttgggggagagtacaatatgttatccaacagttactaaaaataggtattgcgcgtaatgatttagtgagaatgaaagatggtagaatattggacgatcaagacattgctagaattagttctaatcagatatctgatatcctctctcaaccattgttatcctggataaatcatttagaaaaattcaatgttttcttttctgcaccccttgatattgatttcttaatgttacagtattataaggattattatctggaaactttatctaccaatgaggggcctgttgtttcttatactgacgaaaatagtgacaataaaaaaataaaaataactaaaatggacagaacaaatgattatcaattaattggttttaaaaatcgcatcagtgaagctatacaagcgactttaaaagataagagtggccctggtgatagcttcactgaagaagaaaaggaactcatgatttggtatcaatatttctttttaggtagaggcaaaccgacgactcatatgcaatttttattatctattcgtgatgaagaattaatcgaaagcctaccttctgtatttgagaaaatagttaaacgagctaaagaattacttggagatattgaatatggtgaagagtga

SEQ ID NO: 73099 - DNA, 1818 bp, Streptococcus tigurinus 1366
atggtgaagagtgatgattggcttcctaaaggagatattattttagagaatgcagctttagaagctgttaagaatgtaaacaattgtttagttattgctggaccaggtgcggggaaaactgaattactagctcaaaagttagactatcttttttctacaaatgaatgtatttttcccaaaaaaattttagctttaagttttaaaacagatgctgcagcaaatatgaaaaatagagttaaaaaacgttatggtgatgagtatgcttcgcgatttacatctttaacctattcagcatttgagaagatgattttagatcaatatataaatgctctcccagaagaaataagaccagatagagactatctggttgatgattgggatgttataaaagcaacacttattaaaaatggtattaatgttaatgggaggagaatgtcagatataagaaagtctgtcgaaaacaacgtacttaatgatgaggctaatttaaagtttaaaaaggacttattaaaagggacacggaataataaggctgtgctcctttataaacaaataactaagctagctacgtatataatatatacaaataaatatattcggaaagcacttcaaatgacatatgaatttgtctttttagatgaatttcaggatactacgtatgaccagtataatttattaaaaacatgttttttaggttcgacgtgtaaattgactgcagttggagataataaacaagcaattatgagatgggcaggtgcaaatcctgatatttttcaagattataagctagacttcaaagcaaatgaatatcaattattgatgaatcaccgctctgtacctaaacttatagaatttcaaaaagaggttcatcagatattaaatagtaatcacagttctattcagtcaaattattatccagaatttcaagagggtgaaataacattatttgaatttgaaaatgaaagtttagaatctaagttaattgcaaatgatatagaatcaaaaattcaaggaggtatacgaccatcagaaatttgtatcctagcaaaacagaaggttgatgattatagttcaaaattgataattacattaagcagtaaagggattaaagcaagaattgaaaatgaatatcaagaacttttaaaagaccctacttgtaacttattattagatttaatatcatgcagtcaaggaaaacgagatcctttaatttgggaaaatattagtaatttttatggaaatatcaatggaatagatgaacttactgatgaattaattttagcaaaatcctataaggagattgacaatatagttagtgatattacttacctaatttcaaatgttattcccaatgaagaaagtatgctaaaattaattgattgtattattgaaaaaatagatgaaaaaagaattatttcaaatttttcaacatacaatagaaaaagtgacctagatatcattgtcaagaacttttcaaagttattatacaaagaatattctcaaacacaaggtgaatggctagatacagtctctagtttcaagggtgaaaactcaattccaattatgactatccataagagtaaagggttagaatatgaggtagtctattttctaggcttggaggattctgcattctggagttttaatgatcaaccggaagaagataaaagtgcgttctttgttgcactttcaagagcaaaaagtcacttaatattcacatactgtaaattaagaaataatagtccgcaaaataatagaaatattaatgagatatattcattgctgactcaatccaatttagttgatgttattaattaa

SEQ ID NO: 73100 - DNA, 1968 bp, Desulfovibrio africanus PCS
gtgttcattgagcgcctcactctatctaatttccgctgttttggtccagcaccgcacaccatccatttgtcacaggggcttaccgcctttgttggggccaatgggtgtggaaagacggctgtcatgcaagcgttgcagcgattattcggtgtcacgggcgaacaacgtcgtgtgcgccgacaagatttccacgtcccgaacgctgaagattcttcgccaggacataagcggttctttatcgaggctatcatcgcctttcctgaacttgactcacctacaggagaccatgcggccattccagagtttttccaccagatggcggcggatgaaactggtcgtctcaaatgccgtttacggttcgaggcttcatggactgacgacggctccctagatggggcctttgaacagcatttttgggccattcgaacttttggcgattttaatgacgaggattgcatagagatcaagccattcgatcgtacacgtatccaattggtatatgttcctgcgatacgtgatggtgcctcacaggttgctgctttccttagaggtcgactctggcgtgcggcgcaatggtctgagcgggtaaaggaagctttctctgaagcaggacggcagctcagtgacgcattcggcgcagagagtgcagttgctcgggtgactcaagcggtgacagcgcgctggcaggaagtgtttaatgcaggcaccgataccaaacccaaatttaggcctctagatcttagatttcaagaattcatccgcaaggtcgaggtggtgtttcatccagatgaagctggccgcgaacgaccgcttgatgatctcagcgatggtcagcgttctctgttccatctcgccatgactgccgcaacgctcgacattgaagggtatatcgcggcaaatcctgtaacaacaggatttcaagatgacggggtgccgctacctgcgttgacgctcattgctattgaggaaccggaaaataaccttgcaccattttatctatcacgcattatccgccaaactgagagtttagcttcaggcaatcgcgcgcaggcactcgtatccagccactctgctagcattcttgctcgtgtcaatccagctaatgtaagacactttcggctggacccatctacccgaactgctagagttcaagctatccaactcccgagagatgacatggaggcttccaagttcatccgagaagcggtctattcctatccggaactctatttcgcacgtttcgtcgtgcttggggagggtgcctcagaagagatcgtgcttcctcggctggcagaagccattgactttccaattgatagatcttttgtcgctgtcgttccgctcggtggacggcatgtaaaccacctgtggcgactacttaatgatctcgagatccctcatgtgacgcttcttgacctcgactggggacgtgcaggaggcggctgggggcgcataaaaactacgtgcgaacagctcttaaagaacggaatcgcgccacatgtgctgtttggagatcagctgagcccggaaggatctacagccaatctggctgccttcgacagtgcgtcattggaggattttaaataccttactgagtgggtgaattatctccgccatttcggtatttttttctgcactccccttgatctcgactactcaatgctgcacgcatttcatgaagcatatatggttgccgaacccggtcgacggggaccgtcggatgtaggcgatccacgcatagctgtacttggggatgacggagttcacgcactttatggtgagcacgaagatttgtggctgcgttggtatcgttatctctttcttggtcgaggtaaaccaagtacacacgtccgcgttctgagccagcttgagcctgaaacattagctaaagatatgcctgaagagctacgagaacttctcagcgttatcattaagcgtcttgagcctgcgcgggttatcaaggcgtag

SEQ ID NO: 73101 - DNA, 1884 bp, Desulfovibrio africanus PCS
atggcgcgcccccacccagatgattggcgacccagcggtattgcgaatcttgagaccaatgcctggtgcgctttacgagaagcgaactgtacctgcgttattgcaggaccaggggctgggaagactgagttcctagcacaacgagcggtttatttgctcgaaacaggaacctgtccattgccatatcgagtgttggcaatctcatttaagagagatgccgccgaaaatcttgcagcgcgagtgcgcaagcgttgtccacccgacctgtcaaaacgctttgtttctctaacatttgatgcctttacgaaagggctagtcgatcgctttattaacgcaattcctgccatttggcgtccaacgaggccatataatcttgtttttctgaaatctcggcaggttcaagatttccttagtggcgtcatctatgatgctccaagacaatggaggtcggacatagctgctctgacttcaaacgaattcgaaccacggtatattggctcctctcagttgcccctcatcctagagaagccaacatcggggatacaactcgccatatctcgctggtgggcggagcggcttcctaaaaatgcaaaatcttcacttactttcaccagtattaatcgcttagctgagctattattgcgaaccaactcccatattcggcatgcattgcgcataacctatccatttgtttttattgatgagttccaggatacgacctacgcccaatacgatttcctcctatctgcctttgccaatgggcatgctgttgtgactgcagttggtgacgacaaacaaagaattatgacttgggccggagcacgggttgatgcatttcaacgcttcgagacaaacttcagggcaacccgcatccctctccaatttaatttccgctcatctcccgacctaatccgaattcaacacgtggtagcacaggccctcgatcccggcactgccccgacagtggcgcaggcaacacggatagttgatggagatgtggcccaggtttggatgagttcgaccaaggtagctgaagcccagtacttggcagcatggctctccaacgatatggcgcaaagagaccggtcgccacgagattacgctattctcgttcgccagaaggcagacaattatgaagccgaaatttccgatactcttgttggtgcgggcttacggctaaggaatgaaagtcatgaactgggacgcacgagtctccaggatttgcttgctgacgaactctgccgcattactgtagccattctgcgacttggactaaagcgtcgttctccagatgcatggtgcattgtcgctgctgcactccaagacctacgctgcattgcccctggcgatgatattgcagtccatcgagtggaacgagtactcatggcgttcatcaaagagctacgtgaaaacatggatacattagctccgagtcgagaaaatgcagctcttctcgctgatcgcatctttcggttcctggacttgggtgcagttcgtagatcatatcttatctacggaaccggtgacctattaaatatcatggttgaggcctttaaattgcactttgcatcttgtgcgaacaatgctgccgattgggcgacatgtcttgatgcctttgaaggcgtcaaccatatacctctcatgaccgttcacaaaagcaaaggacttgaatacgacacaattatttttatcggcctggacgacaacgcttggtggagccatacgccacgcaatccagaaggtcttgcgacatttttcgtagcgctatcgagagcaaaacaaagagcagtttttgctttctgtaaggaacgtgggcagcgtcgcctcatagcggacttatacgaccttctaaccgaggcaggggtgccagagattccgttgtaa

SEQ ID NO: 73102 - DNA, 1824 bp, Corynebacterium callunae DSM 20147
atggcgactgatcccgactccgctacggtgatgtggctggagagtgctcggattaaggggttcaggtcttgtgagaaaacggaggtagcacttagtcctgatctcactcttttggtcggcgaaaacaacgcgggcaaatccaacattatcgatgcgcttcgcctggcaacggctccactgagtggaagacggacgaggtacttcgagattgacgacccgtcgatcggggccgccactaaccccgatattgagcttgttttcgcggacggagacaatttccagcaggcgttattcatcggggctttggacctggaaacaaagaagatccaccaccatgtccgctattttccgccgacagatcagtacccgcgcggtcggacagaacgtttggcaggactggttgcctctccggatcctgaatcggaggtgcgctcgaagatcaaccacgtgtacctcgagccactgcgtgatgcgaagcgtgagttggactctgccaacgggcggcgcttgggggctgtcttacgttacttgcttgatgagaaagagcgtgaggaattcctgaagcaggcccatgctgccaccgatcagctttccgtaagtgacgctgtccaaggtgtaagcaagaagattcaggagcacctttcctcgctgaccgatgcggtccgaggacaacaggtggcgatcggttttgaacggcctacattggagcacctcgcacggggactccgcctcaaaatggcagagcaagggatagatataactgatctcgcatcgtccggattgggttatgccaacttattattcatgtcgacggttttgcttgagttgcaggaggcaaacaagtcagagctcacccttctcctggtggaggagccggaagcgcatttacatccgcagctccagggtgttctgcttgatttcctcctcgagcaagccgaagagtccgttaagcaggccaaagagggacgtcctgctgggcgaatccaggttatcgcgacaactcattctcctaacctggccagctcggttggcatagaaaggactgtcgttattcggtcagctaaacgcgatattcgaagtagctcagtcgcacttgcgctgaagcaggtagaattcgcaaacgacaacgaccgtcggaaaatcgaccaatatctggacgtaactcggtctgatcttctttttactcagcgggtcattctggtcgagggaatttctgaggcagtgttgctccccgcgcttgcgagacactgcgtgtttgatcgaagcgatcccgaacaggcaaaacgactccgccgcttcaaggccacgccgatcgtcaatcttggatcggttgactttcgcccatacctgacgctgctcttgcatgacttcggtggagggatgcgtatcgcagacaaggtgatcgcacttacggatgaagacccacctcttgaagattcggaggccaagagtattaacagatccgaggatctcgagagcattgctaccaagttaaaggctgaaaacatcctgagggtggagacatcaaaatatacgttggaagcaacccttttgaccggtgcgagtgagaacaaccgaatccttagaaaagcattcttagaacagcacccgaagtcaggcgggaagtgggatgcgatcgaagaggcaaaagagccaggcagggagatgtaccgcagactccaggtcaagaagggcgccgagaacttggatattagtaaggggcagtttgctcatgacattgcgcttgctattgcggagccaggcgtagttatcgactgtccggctcagctcaaagcagcgatcgaggcggcagctgaagagtag

SEQ ID NO: 73103 - DNA, 1683 bp, Corynebacterium callunae DSM 20147
atgagtcttgagttcacatcggcgcagaggtcgctaatagagtcggagtccggcggtttctttgaggcctgtccgggtgcaggtaagacgcagaccatcgttgagcggtttgcaaggcgaggtgactcggaagactcgcggcgcggtaccgccttggttacctttaccaacgccgctgccgaggaagcgcagaggagatgcgcccacaaacccgaactacttcaagcaccgaacttcgttggcactatcgacagctttatcaataggttctttgccgcaccattctacaaaggaaagcatggcaaggttcctactttctgggattcctggagcagtcttgattcggctgttgtgaggattaaaggtcaacctccggtgtctttggatcactttcaatgccacaatgattgggcaacgctgttggatgagtacaggtgtaggtactcagagtctcaaatttgtgcgttggagtctgcggcgtatagcaaatggaaccagctggttaggtcggggcacctcgacgcggacacttcgagactcatagcgagaatagagattgaagagaacaggtacggaatcgtcgagttactcacttcacgattcgaggaagtcatcgtcgacgaagttcaagactgcgactccgccgatattctggttctaaagtcgctgcgagatgcgggaatccgtcttatatctgtcggagacctcgaccagtccatctacgagttcagaggcacttcggctccagaagtccgcaacttcttgcggtcggccagccctcagccgcgcatcgatacaaattttcgtagctctcccgctatttgcaaggttgtgaatagtttacgtgaggggccaaccatcgacattcctgtaggagaggcctcgacctgcgatatccccgttcatctcatcggctaccgaaatcattcggagatcgggccatcggtcgagacagtaattgaccaataccggggattggcaaaaccggtgtttctggcgcacagcaaagacaatgcagctttcgctgctggtggccacggaaaaggtaagtcgtcaaaaagcaaggttgcagcactagccaagtcgggcaatctgctcctggactcctcgtcgacctcagcgaaaaggactaaagccctcgcagaaaccggaattttgctgcagcaactgcattccgacgagcagctagcaaaagctggcgaagagatttatcttgagactctcgggctgaccaagagttcgtatcatgaactgtgtttgaggttcgttgtggcagtaggagatcccgcaaggcagtcccgcagtgcgtacagggagaaacttatccaggttgcggaaggattcgggatcgcgctcaaccgtggccggaccaagacaccatcagccgatgcctggccatgggatggtataccgacagccgagcatcaatatgagcattcaacagttcacggtttcaaaggactggagacagactcgatcgtcctggtcgttccaggcgacaagcggacgggggccactattcgtggctggggagaaggagaaggctctgaagcgagaagagtcctttatgtcggcgcatcaagggctaaacgtctgctcatactggccgtgcacaataaatacacagatgctgtgaagctaatcctggagagagacgaggttcctcttgcattgtctgggtag

SEQ ID NO: 73104 - DNA, 1617 bp, Corynebacterium callunae DSM 20147
ttgaagctcatagctattcgtctgaagaaccacagtcgccttgccgatctggagctccaggtgagaactcatcttgtactggtcggagcaaacgatgttggtaaatcatcactgctccggtgcttaaatcttattcttggctcttcaacggcggcactttactctcggatcacaaaggatgattttgctgacccgaataaacctttcgtgattgaagtcgacctagcagatttctcactagatgaacaggccgcatttcccgatgaaatccaaatcggaaacgaacataagcccaacatcctcactattcgcctagaggctcagcttgatgaaggtgagactttgcagatcagccgctttgcgccgaatggtggagcgcaaagacaactcagtcgagttcagttagaaatgctgggatggaaaatggtgggagctgcacacaccggcgcccgtgacttccgtaatgatcggaacagctccctggacgatattcttgacgccatcgagctcggggatgaggagaagctttttaaagaagtggccgagggcttccaatatcggctctctgaatcgaaggttctgttaaaactcagagaaaaactggcagctcagctttcacaagcagtgccccaggagattaataccgaagagttgcagttcgttagtggcagtaccgccgaggatgatttattggccgatgtcaggcttcaaatcactcgggacggaacaagtcgcggggtgcaggagcaatcggacggtgcgcgtgcgcttttcgcaatcgcaatgtatgaccttgtctcatcagccgcaaacatggtttcgattgatgagcccgaaatccatttgcaccccacgagccagcgcagtcttgcacgtttgctccgaggggctcagaaccagaaaattatcgccactcattcgcccgacatcgtcggtgctttccccccagaggacattgttgtcgtcagtaggggcggtattgtcaaacagcccaaggaaacttttctcgacggcaattcgaaattagcagcccactggtgggtgagaaacaaactggaaccgcttacttccaatctggttatcctagttgaaggggtatccgaccgaattgtgcttcagcgagtggccgagctcctagacaaagatcccgaccggttgggcgtctcagttgtcgagacggatggcgggaatgaaattccaaacgctcggaaagtgttcgggccggatggttttgacatcccgctcctgatgctgattgatgaggacgccaaggtaaaaacggctgagaaactgggggtccagaatgccgaccttgcacgtcataatgtggttatctccgacccagatcttgaaggagaatatacgtccgccattggcggaaaagaactctggaagcggttagaaaattctaatgaattcaccaggaaccaactccggacctgtgaagcttcaggacgtaatggggaacggaccgacgaggacgtagctgctttctgcaggaaaaataagaacaaggttcaagcctcactgatcgtcgcccagactcttactcaggaagaagctgcctgcattggctcaatttccacccttctcaacaaggtggagcagggggaatag

SEQ ID NO: 73105 - DNA, 1683 bp, Corynebacterium callunae DSM 20147
ttgaaaccgactatccctcaggagcagatccgagattatgaacccttgggcttgattatcactgccccggcaggctgcgggaaaacagaggctttagcgcttcgagtacgcggaatgattgatcgacgtgttgttacgcctccgcgaaaaattctactagtgaccttcactaacagggccaaggagaatatcggtgagagattgcgaacctatctcacaccacaagaaatcactcgttatataacattgcacaacctgcatggactatccgcccgaattatagctgctcacggccaagtgataggcctcgattcatcgtggaagctaccggactcggactggatcgcctccaagttccgagagcggggtctggactatcaccagaaaaccctcatcagtagccatctgcagcaggcaaagcttgaaacccgtaccgacgatgaagtcctagattacctcaggcttatccaagaccaggacgccattgaaatcgaacgcgagcgccaagacagtaagcagcttacttatgatgatctcccccgattagcagaccttatcctccgtaatgagcagattgctgcactctaccaggaacatttttcctgcatcgtcattgacgaattccaggacctcacccttcaacagttaagcatccttcaacgtattggcaggggccgcatcacttatgcaggtgacctcgctcaaggtatctatggcttcactggtgcgaaacctgaacaagtgctggcagccgcaagatctgaggggattgacgaaattacgtttacagagtcacaccggtcatcacctgctgttctcgaacttgtcaactccctacgcccccgtaccggcggtgtagagctgaagtgttcatctccagagtcctggcccggaggtggtttcgcttcccatcaggttttcgagtctgaaaaggatgaagcagacggcatcgtaagattcgctgcggggatcttgtctcgaggaaaagaacagcgcatcggagtgctgacgcgtacaaagaagcgacgagaaaaccttgacgagctgcttaccaggggggctccattctcttggtatcgctgggacgacccaatattcgattcacacatcgcgcctcttctccgttcagctctccgcaaagcaaatccagcgcagttgggaggcgctgatgctcagcagcatctattggagtttgtcgacccattagagctccaagatccatcaacatatgaaggcttggtgcaaggatgcgcctggatttacgatctcgctagcgaaggaatttcgaagtcagagatcaatcaacgcatcaaagccgatgagaatgagacgctactttcggctccaggacttcacctagtgacaggacatgcgggcaagggtcaacaatttgattgggtgattgttatgggacttgagcagggctctataccgtcgtttcaagcaaaaacagaacgagccattgttgaagaatctagagtgctgtcagtaatgatttctcgcgctcgccacggtgtacttactactttctctaaggtcggtataaaaccctggggcgcccgatttaaaaataatccatcagtgtttatggacctgctgtgtgactcagattcctatactgactgggaaggggggcgtgattggcttaatgctgcggactgggaggccatttccattaggtag

SEQ ID NO: 73106 - DNA, 1143 bp, Meiothermus ruber H328; identical to SEQ ID NO: 71878

SEQ ID NO: 73107 - DNA, 2430 bp, Meiothermus ruber H328; identical to SEQ ID NO: 71879

SEQ ID NO: 73108 - DNA, 1842 bp, Stenotrophomonas maltophilia AU12-09
gtgtatttggcagagctgtctatctcgaactttcgcaagatcaacaacgctgtactgcacttccaaagtggactgaacgtcctggttggtgcgaataacgcgggcaagaccgccattgtcgatgcgctgaggtctctccttgccgggcacgatgaaccttacccgcggttggactcagacgatattcatcggccgaagacaggatcgcctagcggcaacatcgtgttcaagtacatcttccgagggttgagccccgatgatgaagctgacttcatgactgccctgaagcctgccaaggacgggcagatggaggcgcatatcaccatcagcttctccgaggcggataagacggggcgacttagagcgaagcgctggtgcggagaccatgatgatgtcggcttgacagcggacatgatggaaaaccttcgtggcgtctatctacagcccctgcgcgatgcttctcaggctcttaggcccggccgcacaagccagctgtcccgactgtttcagctgctcgttgatgacgatggcaagatcgagatcaataaggcactgaagctgctggatgatgagctcaagacgaaagcgccgattgtgagcacccataaggcgataacgactcgccactccgagatgttggggccacagctgtcccagctgctcgagctgggggttagcgtcagcgatttccaacgcctggcttcgcgtctctctcttaccgtagatctgttcgagcttgagcaaaatgggctcggattcaacaatctgatcttcatggcggtcgttctcagcgagctgaccaagaacccgcaagctagctatcgaggcctgatcattgaggagcccgaggcacatctgcatccccaattgcaggctgtgctcctgggatactttgagaccatcaaggcagtggacaaagagaagcctgtccagctgttcgttaccagccactcacccaactttgccagcatcgccaacctcgacagtctcacctgtcttgttgacaccggaatcaaggtggagactttctttccccgagacatcaagttttctgtcggaaagcgtgagaagcttgagcgctatttggacgtcactcgggctgagcttttctttgcgcgccgcgcaatcctggtcgagggtgctgcggaattggtccttgtcagtgtgctcgccgagaagtgcggtcacgatctacgtaagcatggggtaagcctcatcagcgttgaaggtctcaacttcgactcattcattccactgttcggcgagaaggcgctgaagattcctgtctccgtacttacggatgcggacccaacaggtccgagtgaagaggatgaagaggaagaggaaaagggcgatggcagcgcagaagcagacgaccatgcgccggaagatgggacctcaagtggaaagaagaaggcggcccctgtctacccttcgatcggcgacaaggtgcaggtgtccgccaacaccttgaatatgctcaggttcgcggattcatatctcaagatcttccatgggctgaagacgcttgagtatgacttggccttgtacgccagcaatcgcaagatcatgcttgcggcgcttaaggagctacacccgaagatttctgcgaacctggagaagaaggtagacgccgctacgggagatgcagagaaggctcgcgtactgttcagcgggatgttcgagaggaagaacggaaacgtccagaaggggcgctttgcacaagctttggcgtacctgatcgccaaggcgaaaaaggaagaattcactgttccggagtatatccaggctgcagtcgagcacgcttgtcagcctggcccgaagaaggctgaagacgaatga

SEQ ID NO: 73109 - DNA, 1800 bp, Stenotrophomonas maltophilia AU12-09
atgagcacggatactactccttcagttgaacagggtgagatcatcacggcaccattgcatccgatgtcggtcattgcttgcgcgggaagtgggaagaccttcacggctgtacgtaggctggcccacatacgtcaatgcctcggtgatcaccggggccgggttgcgctcctgtccttctcgaacatcgccgtggagaccttcaggcgcgagtaccaggcactcgcaatgggatcgctcaagatcccgtcccaccagcgtgtcgagatcgacacattggacgggttcattacgacaaatattctgcgaccccacgcccatcggacgatggggtgtaccacgaccccgttcttgctatcagggagcgagtcattccttttaggtaaggactatcgcttctgggtggaatcgccgagaaccgatagctacccagtgccccaagggcatatccatcgcgttgtcataggcccttctggagctgcaacgggcttcttctatcagaactccggcatgctggcgaggatcaacaatggcccaaaggttgccgcagcattgggaaaactgggggcttacacccacgagctggcgcgctactgggtcgaccttaccctccgcgaacaacccgagatcctccgagtccttgcgcgtcgctatccccacatcctcattgatgaagcccaggatatcggcattctgcaccaggtgatcattgagaggctcagccaagcaggctctcagatttcccttattggggatcccaatcaaggcatctacgagttcatgggcgcgaccggctcgttcctgtccagctaccacagcaaacccggtgtttctgcggccgccctgacgcggaactatcggtccgtgccggccatactcgatctcgccaacgcaatctcggcacgtacggacgatccggataggacagcgccacctacgctccacggggcctacttcgttccgtacacgactgccgatacgaagaaggtcatggcggccttccaggcaacactggtctccgctgggttggacccagcacgctccgccgtgctctgccgcgcacgcaagtgggccaacgagctggctgggcatgagggtgcgcctggcgtgggaacgaccaagatccttgcccaggcagcgatggcgcgcgatatccactccgactactcaacagcattcagactcgtggcaactgccatcatgggtttgaccgacaacgcgcccaagggcatcgttgctcgcctgactcagcctgccaggtacccagaggaacgagcacttcgtcgtgtaatttgggcttttacgcgagatccggtctcgggcctgcccagcgcggcgctgcccgctgttagcgattggcagccggcactgttgcaacgtataagggtcctgatgaccaatctgagcacagcccacggtctcaaccacacatcgtccacgctcggtgctcggctctcgaagaggagtttgcccggctcaccgctaatgagcccgcctgacctaggtgccgatcagcccttgcgggtcaaaatcagtaccgtgcaccaggtcaaaggcgaaagcctggatgccgtcctctacatggcaacgaaaccgcatgtatctgcactgctaggcggaggttccaccgaggacgggcgaatcgggtacgtggctgtgacccgggcaagggatctgctgtggttggctgtccctgcaacagctttgaagagccttcgtgccgatctccaagcaaagggcttcaaggacgcaaccgctacggctgcaaccccaacggccggacatgacaacggttccctctga

SEQ ID NO: 73110 - DNA, 1191 bp, Bifidobacterium thermophilum RBL67
atgatcccttccgatttttcgaccacccagcttgagccgggtaggaagactatcgtggatgactacctcaaagaggtggatgcctctggagacgagtcgaaattggccgaggccatcgaatcacttagtgatgcgattgacgagtcagatgccttcaaagaagcattgggttccctggcagatcagcttgaccccgtgctcgacggaggcattacggcaaacaagcttcacttcgtccccgaagcggcaatcagcggggatttgctaaatgacgtccgacttcagattgagggcaaatcaggaaccgttcgtcaggctacagaacagtctgacggcaccaaagcgcttattgccttttccatctttggcctgctcaattcggacggaatgattgctattgatgagccggaaacccatttgcatccatcggcgcagcgaaacttgatgcgcattctgaagagcactggtcgacagcttgtcatagccacacattctggtgttgttgctggcgagttcgatcccgtcagcgtcgcggttactcacgagggcattccaccagtacaaccaagtcgagggttcctttcaggcaataaggaccagacaactctcgcaaggtggtggataagcagcaaagttgaacttctgacggcaaagcagattatcgctgtcgaggggccatcggacaggatggtgcttgaagaagctgcggtgaagatggggcgccaccttgaaagagacggcattgaaatcctcgaagctggcggatgcacagaaatgcagcatgtattagacatctttggcgaaaacggattcggcatcagagtggacattttgattgatgaggacgacggaagaaatctaggaaaactagcgaataggcttgatgtcacggtcgataatctcgcagagaaatctgtctttatatcaagaaaagatcttgaagatgagtatgtttccgccatcggggcggacaggctgtggagcgcaatgaacgattcgagtctgtttactagaaacatgttgagcaactgcaagattgcacctggagcctcagtgccaaacgagcaagacctggcggagtattgccgatccaacaaaattataagcgcagtggttgcctgcggaacatttgacaaagcgacggcagagaaagtgtcgagcgttgccgaggtgctccgaaatgccatctaa

SEQ ID NO: 73111 - DNA, 1719 bp, Bifidobacterium thermophilum RBL67
atgccatctaattcttatggagttaccgatgagcagcaggagattttcgattacgagccttttggcatggtgattactgcgccagctgggtgcggtaaaaccgaagcgcttgcctacagggcaaaaggtctccttgagcgatacgatttttcagggaacggtagaagactgctcatcacctctttcactaaccaggcgaaggacaatattaatgagcggcttaagaagtacatcggcgtgcagactctaagagatcatgtcaccgtctgcaattttcatggcctagcctcacgaatcattaaagctcatggtcagctcataggcatcggcggtgattggactcttgcaaatgttgactgggtaggtagagagcttcgcactggcggatacactcgagatgatagtaaacaggctggtcaggctttgcgtgacgcaaaacttacatgcctgaccgatgatgacgtaatgaaacagcttgagagcatcggtggacaagctggcgaaatcgctcgtacgattgagaaaaagcgcatcaacgagaagatgatttcctacgacgatcaaattagagttgcgctgtggcttctaagcgatcatagggtggccggcctttacagaaaccatttcttcgcggcactggttgacgagttccaagatttaacgccccaacagctgaaatttgtgcaaacactttgcggaaagaacatcacgtttgccggagataccgcgcaaagcatctattcgttcgcaggagcagatgtagcttatgtacaacaagagattaccaaagattccggtaggcaaataaagctgctgaggtcatttagatcggcacctagaattctaaacgcagttaactccctttccccgttgactggcagcgagcatcttagtgctgcctttcctaatcgctggggctcgggtggagtcgtgggactttcgtcctttgatgacgagggcagtgaagccgcttgggtggcgggcatgtcaaagtcgattttgcgccattgtccacatcagcgaatcggaatcattacaaggctggataaccgcgctatcaccttaaagaggactttaacgcaaaacaatatcgaatataccgattggaagagtggcatcttcagacccgaggtagcaggagtccttagcgacatttgctctgacatacaagcccggacctttgaaaataaccttgaggctcttcaatacattcagcagaaggccgctacctaccacgtgggccaaatagaggagcttgaagagggctgcggttggctctttgaccagctttttcaacgcggttttgattcttcaaaagcctgtgaaattaaagaaaagattaccgtgaggagaggaaacgagaccatcgcaacacgtgatggtattcactgtctcacggggcatgctggaaaaggccagcaattcgactgggtgtttgtgcttggtatggaggatggaaccatacctgactttagagcgaaaagcttcgaagagaaatgcgaagaagcaagagtgctttctgtaatgatttcccgtgcacggattggcgtctttggcacatatacaaaagggaaagttgatagatggggaaaccatcacgtgaacacgccctcggagtttttcgagtatctgaaaaaagtgcctggacttttgtgcggcaaagatgacattgtgacgtggtgtcgtaaagctgactggccagcaatagcattgatgtaa

SEQ ID NO: 73112 - DNA, 1698 bp, Vibrio cholerae O1 str. 95412; identical to SEQ ID NO: 71760

SEQ ID NO: 73113 - DNA, 1377 bp, Vibrio cholerae O1 str. 95412; identical to SEQ ID NO: 71761

SEQ ID NO: 73114 - DNA, 1701 bp, Edwardsiella piscicida C07-087
ttggaaatatcatctctgaaactcaaaggttttagaaactttaaagatgcacacatcaattttaactcaaatactctgatcatcggtgccaatgatgttggcaaaagtaatatgttgcattcgctaagaatgctattagataaaagtatatcagattcagaaattgaaccaaatgaacttgactttcatttagaaaatggaaaatcatgtgaagaatttgaaatcattattcattttaaagatatcaatgaagatgcagtactttcaattttgaaagggaatgtcagtgactcaggtgaatcgttcattaagtacattgcacaaaaatccgatctcagctataaactttttattggtgagtctttagagtctttacaagaaatcaactctcgctactatcttaaattcgttaatttaaaatatattcaatcacaacgagatttagagagatttattcgtaaagaaaaaagacaactattaaaaatcgcacagcaatcattgaactctgaagaaagagaagaagatgacgatttgttaggagagataagtatagatttacagtctattaatgataaaatatctcaacttatatatgtagaaagagctacaaaagatgtcaacgatgagctaaaaaaacttgcgcatcattactcagagtattctgtgcaactagatactggggcaattggaataaatgactttattgacaacctacaacttggagctaatacaaatggttctaatgttatgcttggaggagacgggcgaaacaatcaaatattattagctttatggaaagcgaaaagtattaaggaacatgatatcgagaacgaggttatcttctatgttatcgaagaacctgaagcacacttacatcctcaccaacaaagaaaactggctgattatttgatatcagaacttccaggtcaaacgatcatttcatcccactcaccacaaatagctgtaaactttgaaccagactcagtaataaggttgcttgaccgtgctggacacacagtagccgcaagtgaagggtgttctaaagatatttcagatggctgggaaggaatgagctatcggatgagtatattgccagcagaatcgtttttttcaaatggagttttcttaatcgaaggaccatcagaagttttattctaccattctttagccgaaaatttaaacattgatcttgattatttaaatatttcactggtttcagtggacggaatatcatttaaaatttacgtagctatactagatgctttagagatcccatgggtaatgcgaacggataacgatatatctaaacttaaagatcaagacaagtggcaatattcaggtataaaccgatgtttagatatagccggtttggaaaagtttgaacatagcgacatacaaatagtacctataaatactctgaccaacggtgattggcaaacagtttctgaagaaataaataaatgcggggtatatttatccaaagttgatttagaaactgatctggtaggagaattaagtgcaccaattttaaacgctttaggtaagaaaaatgaccaaggtgcgatagagtacttacaaaataaaaaagcattaagaatgcgagaacttcttaaagatataaaaacagaccttcacatgcttaattccggtgaattaattaaaccgttaaaccatcttgtaaaaataattagaggtgaatga

SEQ ID NO: 73115 - DNA, 1626 bp, Edwardsiella piscicida C07-087
atgagttctttctcaccaacacctcagcaaacattagccattgactacactggaagcatggtaataacagcatgtccgggaagcggtaagactacggttataaaagaaaaaatcagaaatattaccgactgtcttccagagcataaaggggtcattgcaattacattcacaaagaaagcaagttcagaactggaacgtagatgcaaggctgaaggacacaatgtaaaacatagtttctttggtactattgatagtttttgcttaaaggaaataattattccatttctttcaagggtatggggaggaacatcaacagaatgcaaagtcttaaagaaattggaatctccatataaccatttcatagaaagcaattttgctggcacaccatcagttattaatatcaatcaggaccctgggtataaaaaactatatgacgagggaatactttggatggggtcattctcggccttagcattaaaaataattaatgaatcatctgctgcgaagcggtatatcaaagcaagatatagccatatattcatagatgagtatcaagattcgtctttatctcagcatgagctatttctaaaaataaacgaacttggcttatgctccattgctgttggtgatgtttggcaatcaatctatgaatttagaggagggaattcggagcttcttttagaattggtaagtaatacagaatgctttaagcattttgagataaatttcaaccatagatgccacccatcaataagcaattatgcttcaagattgcttgaaccatcctatgttttactacctgcggatgagataagagtatttaggagacgacttaatggaaatcttaaagatgctgctgttacgatttcctcctggatttcaggatggctgagtagtggcgaatggaatttagaaaaagcaaatcaaatagccattttagcaagaaaagaaaaatcactaatattattctgctctgggttaaacttaaacttcaggctttatgttgacacacctctagataaaattggtactgattgctcagatctatacaaagatctgttagcatacaagtacggctctataagtacagcacaagagtttattaacaaagtttttgatggggttatagtagatgataacactctactcttactaagaaaaaaaataaaaacaattagaaatgaattaaaaaatgaagatttaatacataagtttcatgatattgcatatattttagggataaattcaacagaacatactgatggggctgtaataagaacaatctcagacgatattttagtcaaacaattcaaaccattagatgataatgagatacaagtaatgacccttcataaatctaaaggactggaattcaaattagtatttcacctagatttagatgaatggtctttcccatttagagaatataacagcgaagacagatacacacctcgatacccgacgcttcaacaagaacttaacctccactacgttggtataaccagagctgagaattgttgcatccttattaattcatctctcagagaaaatgcatctggggactttaaaaacacagatgaatcatatttcttcaaattaccgcaattaaataatctgtatagttga

SEQ ID NO: 73116 - DNA, 2031 bp, Klebsiella pneumoniae 700603
atgcaacttaagaaaatttttatctccggctttaaaagcatttccaatcaaaatccccaaaccattgaccttgagcatgaattaaccacgtttattggccataatggaactggaaagagtacagctatggaggcgcttaataagcttttttcggtggataattcccttcgaagcttatcaataaatgacttccataatgcggatgatgggaaagatgaaaaaaccagaagcttaattatagaaacttggtttagctttcctaaacccaaagaaggcaaaatttccatccctccgttaattgaacatcttaccattgataaatctgatgggaatattctttttagggtgcgattagaggggaaactttcttttgaagcaaatcccatgggggatattgacgaagatatctgggtagtaagtaccagcgacgaggttgttgaagagagcagtaagcagaagctttccgccgcagtaagaaacgccattcaagtgagttatgttccagccaaccgagatcctttattgcaattaaaatattcatcgaaagcggtgcttggacgcttattgaaagcgattgaatgggttggagggagccaggaagtattagaggagcaagcagctaagttaaacgcattaacgaagagtaatcctgcattaaatgagattgcggcggcgattaacgccagttgggggaatatctacaaggggcgttatttatctcaggcgtcgctgaattttccactcgctaatatcgatgaaatactaaaattaatacaacttcaattcaaccctgatgaaaccggcaacacgattaatgtagaccgactaagcgatgggcaaaaatcattggtctatttttctcttatcaaggcaatgtttgatattgataagaagactagggagttgatttcctcaggcgcggcttctaattttaatcctgaaaaaatgagattgcctatttttagtatgatctctctggaagagcctgaaaaccatctttctcctcattacttaggtagaataattaagttagtgaaagattatggtcgtaatgagctgtgccaagttattatttcttcccattcatcttccattttaagccgaatcgagcccgagcaaatacgtcactttagattggatcagatatcgaaaagcacggtagtaagcgcattaacgctaccggaaaaagaagacgagctttctaagtttattaaagaggcagttaaatcataccctgaaatctatttttctaaactggtgatatttggcgaaggggatagtgaggaaattataattccaaaggtgcttgagctgtattcgacggagattgatagccattctatctctgttgttcctcttggtggacgtcatgtgaatcatttttggcgtctgttgaagtcattacagattccctttatcactttactggatttcgatatcgatagaaatggcggtgggttcggccgacttagatatgctattgagcaactgtctattttctgtggtggaaaatatggcaagacaaaagaaaaaatacctgcatgggatgacgaacgagatccaacaacatttaaaattccgcgtactgacggtgattcatataatgttgtggctgcgttggagaatcataatatttatttttcatcgcctctagatatcgattacgcaatgattgaagcattccctgatattttctgtgaaaaagatgtggtctatggggaaagagggcctaaaaatattgaacaggaagaacaggaagaacaggaagaacaaaaaaaagagctgataaatgcagtattgaaaaaaggcaactccggcgtccgttacgaattttctgttgattatctaaaatatttcctgtggtatcgctatcgctttttatccaataaaagtaagccagcctctcatgttagaatgttttctaaaattgaagaaaaatatacgccggatgaaatcagagaaaaattgcctccagtgttaattcgggtagctgacaagactgtatcgttattggcggaggttattgaatga

SEQ ID NO: 73117 - DNA, 1674 bp, Klebsiella pneumoniae 700603
atgaccagtcaatggctaccttctgagggcattgagccgacacaggagttaatggatattatattctgtgatcaatccgtttctgtacttgctggcgcgggggcgggtaaaacggagcttttagctcagaaagctaattacttgttgcagacaggaaagtgcatgtggcctaaacgcatattatgcctttcatataaaaaagaggcgcaagagaatatcaaaacacgtgtgatgaaaagatgtggacaaagaggtgagcgctttgattcgtatactttcgatgctttttgcaagagtattgttgaccgttttaaagatgttttgcctgagaataaaagacccttaaacaattatgatttagtgtttaatcagaaagccaataatggcaaggataagatatcatttgatctaataaggagtttggcattagatattttaacaattagaacggatattgttgatcttttttcgttgacgtattcacatgtttttatcgatgagtttcaagatacccgctctgatcagtatgaaatgattaagcttctttttaaagacaaaggaacgcaattgctagcggtgggcgatatcaaccaaagcattatgttgtgggctggtgccaagaaaacagtgtttgaagattgtgaaaaagagtttcatacaaccaaaaaactattggtgcataattttagagctagtgaggaaattcaagaggtcttaagatgctttattcattttgtacaaaatgatgctaactttacgccaataatcaaaagtatcgataattgcactattcactattatgataatgagctttctgaagcggatgatattgctgataaaatcgcaagattcatcacttctggcattgaagaaaaagagatttgtgtactggtgaaacagcagtcggagcaatatacggaaaaacttcgagataagttaacgactaaagggattagaaatcttgatttatcggaattgcaagatgtgttaaaagaaccattagggcaaatattttctgcgctcttcaaggtttatacatcacgctcatcatcaagctataccgagctttgtaatttatatcttgagttgcatcgagtctcccgcggcgatgaaaaagaagatgcattaattaaagtattgtcggataacatagcggaaaataagaagaatttaggcgatgagcctagccccgattcattgataacctgcattaaggatattataactctatttggtgtgaaaagaatggtggggcgatggaatcagtataggtccgctgattattgggataagatctggcgtaatcttgagcaacatttgcgctacacaatagatgcaacacactctcttaacgaggcggcgttgatgtttcaggcggataattccgttcaggtgatgaacgtgcataaatgcaagggactggaatataaagtggttatttttcttggcttagaggaccaagctttttgggcttataaaaacgcaaaatttgaaaatgattgcgctctctatgttgctttatccagggctaaagaaagtataataataacctctacaaaatgtagagagcatagaatcactaattggcgagatgatagaacctctacctataaaaatattggtcctatatattcgttcttaacgaaacattgcaagtttagggaggtgagataa

SEQ ID NO: 73118 - DNA, 1797 bp, Halanaerobium saccharolyticum subsp. saccharolyticum DSM 6643
atgtatttatcaaaattgaaactttggaattttagaaaatttggctcaaaaaaatttgatattgaatctccagattttaatttagattttaacaaaaatttaaatgttcttattggagaaaatgattcaggtaaaacagcaataattgatgcaattaagatggtattaaaaactcatagttatgaatggattagggtaactgaagatgatttttataataattcggatagatttagaatagaattagaatttaaagatttacaacctgaagaagcaaaatattttacagaatggttaagttgggaaggtgaaaaagaagaagctgaaccctttttaaaagttaattatgatgtgagtaaaaatgaagatagaattctcccatcagatattcgagctggaagtgataaagatgggtatcctttaaatgctgaagcaaggcattatttaaaaacaacttatttaaaaccattaagagatgctgaaagtgagttaattcctaaacggtactcccgtttatctcagattcttaaaggccatgatatatttaaagatgaggaagataataagctatatcaagaatttgaaaagtttaatgaaaaaatttctaattattttaaaaaagctaataacgaagaattccaaaatgagggttatcagattaaaaaagtaattgatgaatttattagaggcttttatgataaagatagtaaaagtgagtttagaacttctgaagcaaatttaagaagtgttttggaaactttagaattgatgatctcagatgttgataatcctggtttaggaactttaaatcgtttatttatggctgttgaattattacatttaaaaagagatagttggcctggtttaaaactggggttaatagaggaattagaagcacatcttcatcctcaagtgcagatgaaagtaatagaaaaattacagaataataatgatatccaattaattctaacaactcacagtccaaatttagcttcaaaaataaaacttgaaaatttaataatttgtactaatgataatgctttccctatggggagtgattatactgaactaaatgaaaaagattacatattcttagagaaatttcttgatgttacaaaatcaaatttgttttttgctaaaggtgttattttagttgaaggttggtcagaagaaataattattcctaccttagctaaggaaattggatatgatttaactgaaaacgaagtttcagttattaatgttggcaatgtaggttttgatcattattataaaatatttttgcgaaaagataatcctgatgccatgaatgttagagtatcggttgtaaatgatgttgacgttacagcatatacaaaagataatatggaaaaaaaggatgaagaattttatcaaataaaatgtaaagaagaaatcactaaaaagaagaataaaattaaatatcttggaaaaagcagtgtagaaaaaccacaaacaattgtaaaaccattcatttcatctggatggactttggaatggtgtttttatgaatctgattttttgaacagaatttttgtaaaatctacaaagcaagttcatcctcaaattttcgatactgaagattatgaagaggaattagcaattagattgttagattctaatttaagatttaataaaacaaaaattgcttaccaaatagaagagtcacttagaaatgaaagtgttttaaaaggaattaatctaaatgaagaagagacataccaggatgatactatatcatatttaattgaggcgataaaatatgcctgcggagactaa

SEQ ID NO: 73119 - DNA, 1962 bp, Halanaerobium saccharolyticum subsp. saccharolyticum DSM 6643
atgcctgcggagactaatataactgataaagatatcaaatatgctgaatcaatattattagatgcggatgaatctttcgaggatgataaaaatgagagaattgattttataagaaatcttgaaacaatagatttgcatgctgttccaggaagtggtaaaacaacagcattattggctaaattattgattttagaaagaaaattgccatttgaagatggttcagggataatggtgatttctcataccaataatgcaattgatgagataaaaaatgaaataggagaatattgtcctaaattattttcttatcccaattttattggaactattcaaagttttgttaatcaatatctggctaaaccgttttttaaccaggttactaaagagaaaatttcaaaaattaatgatgatttttataatgaaagagtagaaaattattataataatgttttaagagataatttttggctaaataaaagagcaaatactttaggttttttgcaaaacataagatttaatgaaaataatatgttgatttctgggattaatagtaaaactgatgattttgcattaaaaaatacttctggaaaaacatatagaaaactatcaaaaatgaaaaatattttactcaatcaaggaattttatgttatgatgatgcttattatttggccaataaatatttaaaaaaatatcctgaaatcaaaaacttactacagaaaagattttcctatgtttttgttgatgagatgcaagatatggatattcatcaacataatatattggaaaaaatattttataataatggtaatagtaaatctatttatcaaagaattggagatagaaatcaggcaatatatagtgggggaactaactttaagttagaagaaatctggaaatctagagaaaatactcttaaaataactggaagttatagattttcaaaaaatatagctacagttttacaaaactttgcattaaattctgcagatattaagagtataaaatcagaaaacactaaactaaaaccgcacttgttaatttataatgattataattctcagtgtgaagtaattcagagattcattagattaattaataaatttaaaactgaaaataaaattcctgaagattacaaatatccaattaaagcagtgtcttggattactaaagaaaaagaaggtaataaaatcactcttccagattattgtcctaaatttaataagaatagatctacttccaaaacagaatataattcattagagagttacctaatcaattctaagaataatttcaaagaaattaacaatgatttattgaatatgcttttaaaaatacttaggatagaaaaagtagttaattcagataatgatagatattacacaaagagtagtctcttttggtatttaaaaaagaataataaagagcaatatgaaaaattgaagttaaaattgtatgattggagcactaaaataattaaagggaataattctgaggtttctgaagatattaaagattatttggacggtttccttggtgtttttggaattgagaaaaataaatctattgaatttattaataaggatcctaagaaaattattattgaagatgaaactgattttgattgtcatttgtgcaagattaataataaaaaaattgaattaggttcagttcattcggttaaaggagaaactcacactgctacattatatttagaatctttttatcaaaaagatggaagtggtgagaatgcaaaatcttatgaatctcagaggttgaataagcaattcaagaatgagaaaattacagattcagataataaaagaactaaaaagtctgctcgaatagcttatgttggttttagccgtccaactcatttattagcatttgctgttcataaagataggtatgataaatatctatccgatattaatgaagatgtctgggaggtaattgaggtataa

SEQ ID NO: 73120 - DNA, 2034 bp, Clostridium termitidis CT1112
atgtatgtttctaaattaattatccgaaatttcagagtttttgatagcaaaggtattacggccaccttcaaaaagggtgtcaatgctgttattggtgaaaacaattgcggtaaatctgcgctagtcgatgcattgaggcttgcgttttctaccacttcataccgcaaggaaatatatttcaatctctctgattttcatacagacagccgaggaatacgaagcaatgaagcctttatcgatgtatatctagatgaaattcctgctgatttatttgagatatggaatcctgagaataatacaaaaggtgaattccatatcaaatatttcgctgttcaattgccggatggcaaagaaaaaatacgttatcagatatggggcggtcctgtagagggaaacaacttatcgtcagaaacacttgagtcgattcaaactgctcacttgggtgcgctaagagattcggaaagtgaactaaagccgacaaagtctggcaagctggcaaatttattttcctctatagtaaatacggacgaagcaaaagagcaggtcctggcggcagtcaagctcgcaaatgtcaatattgaagggcagcagtcagtaaatcagcttcgagacattatcaatactaacctttccgtgcttgaacaggatttacttcggcaaaaagttggcgttgggttagttgaacccaaatttgaagcaattgccgcttcgctgagagcatggctaaaacctcgttggatatacataagaaacgataacctgatacttcaactggttaaagatctctattctgaagatgaatggaatcaagccacagattctggcgcagaaggggtttttgtagacgtttggacaactgaaagcaagaccctttcagacgaaatcaaagaagctctatcttctgagttaagtaaaaaatttgagattatgcaaaatgggctcggatataataacctactctttatggcagcggttctgggtgatatcgaggccgcaacaacagaaactttgttcagcttactgctggtggaagaaccagaagctcatttgcatccccagcttcaagagcttgtccatagcttttttgaaaaaaactcagataaagataatgttcaagttatatatacatcacactcgccaacgcttatatccagaatcggtatagacaagatcgttctattattcgaaaataagcacaatattgattgcttgtctctctccgaaagtaatttggacgacaaggataagtattacttggagagatatcttgacgtaacaaaatcacaaatgctatttgccaaaggcattatatttgtggaaggcatttgtgaagcacttatcctcccttacttggcaaaaattattgatcgcccatttgataaatatgccgtaacagttgttaatgtcgatggagtttcctttgagcctttttcaaaattactatgctttgcaaacgacccgcaaagacaaaccattaaagcagcgatagtaacggatgatgacaggtgcacagataaatccaatcaaacacagtatatctccaaagatatagactatgactgttcccaggcagacttaaatacagttatctcaaagctcgaagctggtagtccatctgacagatataacaaaattgttgcgctttgccagactgctcatataggcgtttttggtgctcctaaaacgctcgaatatgccctggcgttaactgaagcaaatattccatatatgctcagcgctataattgatgtatatccgcaagccggtaaaacactattcaatcaggttgagcaactgacagatataaatgcaaaagctgcctgtatttggctgtttatgcgtgaacgtttgcaacaaaaagctgaggttgcccaggcgttgaccaaaaggattgccgataaaaaaatctggattaaaaaggatgatggcacttttgaagatagcactagtaatggggattttatagtaccggaatacattcaaaacgccatctttttggtaacgaaggagaaaacagatggtagagctaactga

SEQ ID NO: 73121 - DNA, 1761 bp, Clostridium termitidis CT1112
atggtagagctaactgatgaacaaaatgcctttctggacgtcgaagggaaagtagttttatgtgcctgcccaggaagcggtaaaacttttatagtgggtaaaaaactattgaaatatctcgaaacgtggacatatgcttatcgaggtatagcagttttgtcttttacaaatgtggcaagtgaagaaatacttcgacaaataaaggaattgtctgaagctaaatttcagaacatcggattccctcactttattggaacgcttgatagttttataaatacgtttatttttctacgttttggatatatgatatatgaagatgatagaaaacgaccaagagttatttatgagaattttgggcagtttttatatcctcaaagggaatgccatcttaatggctgcgtaaaaaacttaaattggtttcattggagtgataatcaactattgaagaacggccagcctatttcgtgtggcgtttcaaaaaaaccgtgtgtggcgtttaagaaggttatgataaatagaggctatgcgacgcaacgtgaagtcccggcattatccttgcgtctcctcaagaaatatcccgatatagcaaatgagatagcttacaggtttcctgttataatggtcgatgaagcacaggacacttctcgtgaacaaatggaaataatcgagttgcttgcggaaaaaggtgcgacaaccgtaatacttgttggagatcccgaccaggctatatacgaatggagaaatgcgacgccggaatatttcaaagtaaaattaactgatgcccagtggaactctttatatcttacagcgaattttcgcagctctcagcatatttgcaacgcaactgcaaaattctcggctgtcttatctgggaaacgacctgcagaagcaaaaggcgagcattcgaattttggtacaaaaccagtattgctccaagtgacagataaaaaaacaaaaggggaagtaattaattggtttttacagctttgcaaacgcaacggcattaatccagagggcgcttccgtcgcaatattaacacgagggagaatacatttaaatactgatataccagacctttggcagacgactgaaatacacttactggctttagcaacatacctgtggcactgtgcatcaaaaaaagaagcgtatacccaatgcgagaaggccttattttacataatgataggtgatgctaacggattgtcgactgatgatatgaggcgagtaattgaaaatacaatggagtattcagtatggaagaaaaaattgatttcactgctttcatcgcttccgaaagccaactcaacgttgagggactggaaaagttcacttaccacaaaaatggaggagttaaaacagcaggggattatttgtatttctgattcgcggaacattacagacataatgaagcttaaaactcgcgttaaggtcggccaatcatttagtacagaatttctggacagaacgctgaatgaatatttcgaaaaacgaacgataacaggtattacgcgctcttctgttcatggggtaaagggagagtcatttgatgctactcttttaatggtcgaaagcagcacgggtggcacaattacgccatcgcttctaaatacgggtcatcttgatagtgaattaatgcgaattgcatatgtagctatgacaagacctaggaagctgttggcagtatcaattccaaagcaaaacgcaaaaaatagtattaatagatttccgcctgagttatgggattatcaagagatttga

SEQ ID NO: 73122 - DNA, 2124 bp, Desulfotignum phosphitoxidans DSM 13687
atgaggttatcaaggattgaaatttcaaacttcagattattgaagcatttttgtttggatttagaggataatctatcccttgtgatcggtaaaaataatacggggaagacttctattctcacatgcttagaaaaactggtaatccaatcagagtctaaggcgatatcttttgaagattttaatgttgatctcaaatttttacttcaaaagatattatctgatgaagatgaaataggttctgaacaagattactcccctctgggaattgagttaaaactctacattaattattcgagttcagatgatttatcaatgataagcccgttgatcatgagcttagacccggatgataataccgttgttctttcttttgagtacaaaatttcatttgaaaagttaacggaaatgaaatccgattatcgaactgaagctgaaaaattcgacaacaagcccgatcttttcctgaaagaaaagctgccagattactttggatctatcgccagaaaaagccttctgtatagtgaccatagccaattcatcgatcttcgaaaagagcgcataaatcttagagatatcctatcaattcaacttatcagtgccaaaagaagtgtaacgaataaacaaaatgacaaaacattatctaatcagacatcaagtctctacaaacaagtcgatgagtttgaggaacaggaagaggcgtctgacgagtttaaacacgaactacgaaaaactgatggtaaacttagtggtatttaccaaaagatgtttgcgggaatcattaaaaaagttaataagtttggtgggataagtcctaatgacactgatcttaaaatagcttcaactttacaacatagagagttacttgaaggtaatactacggtcatgtatgcacagcagcagcatgacttaccagagcattataatggtttaggctatatgaatttgatcagcatgatctttgaaattgaaatgctgatgagtagactgaggcgctcggttaaggaaaaacccgctgcaatcaatctactctttatagaggagccagaggctcacactcacccacaaatgcagtatgtgtttattaacaacatcaagacgttgttaaaggaaaacagattgcgagaagatggacttgaaatacatctacaatctgtaatcacaacacactcttcccacatcgtttctgaaagttgttttgatgatattaagtacctgaaaaaatcggctcaagctcaacaggtcgacgcaaaaaatcttaaagaccttgaaaaagcgtacagtgccgatgatgatcctgacaaagataaagctttgaagcgagcttatcgcttcctcaagcagtatcttactctcaatagggcagaactcttttttgcagataaagctatcttcatagaaggagatactgagcgcataatattgcctgcaatgatgaaaaaaatagatcaagaggaaccctgtggtgatgaagaacaaccactcttatcacaaaacatatcgattgttgaggttggtgcgcattctcaaacttttgagaagtttattgattttattggaattaaatcgcttgtaattactgatatagacagcaacaaagaagtgccggatgaaaaagaccctgagaaaacaaaacgtgacaaatgccgtccttcagacacagatgcctcgcaaacctccaatgcttctctaaaatttttctttggaacaaaggatttggatttctacaaaaacttagctttagaggataagtctttacgcaaatctgaagatggtacggggtggcagcagtctgctgatggattattaaaaatcgtctaccaagttgaagaagacggctattatgcaagaagttatgaagatgcattttttagcttgaacagatcgatacttagcgtgggacatgaggcgtttccttcgttagtcaaaaaacacttggacgcatttacgtctgacactattgatccatatgattttgcagacagtgctgttggtagcaaaccgtcccttgcaattgaaattctccttaatagtgagacgaatgaagttggtgagaagttttctaactggcaagttcctttatatataaaggaggggctattgtggttgcgccaaaattctctttag

SEQ ID NO: 73123 - DNA, 1908 bp, Desulfotignum phosphitoxidans DSM 13687
gtggttgcgccaaaattctctttagagaaactgtcagaagaagccaatcaaatcgtcaatctaataaatgaaaagaaacactttttgttaagtggtggagcaggaagtggtaaaacatattctctcgtagaagtattacatgctgtcaccgacaagtatccttcttttaatataggatgtataacttatacaaatgccgcagtagatgagattgaagatcgaatttcttatgacagtattcatgtttcaactattcatgatttcttatgggctaatattaggaacttccagtcagagcttaaagaaacacttgtggaaatgataaatgatcccactcaatcaaaaataaaaattccaaatgtagaaagtgttgaggctgatttctttgatgacatagagtccattcaatacaaagaatatttgagattggcaaaggggattatttcccatgatgaagttatacttcttgcttctcaaatgtatgaaaaatatgagaaactttgctctatcacaaaagataaatttcctttcatttttgttgacgagtatcaagataccaaccctttagtcgttaaaattttgcttgaagatatggagaaatcaccgaaagaaaatgtggttggtttttttggtgatgcgatgcaatcaatatacgatgggagtgtgggcaatcttgatacatatatcgatactgaaccaaagcgagtggtagaagtacagaagcttcaaaataggcgtaatccaggaaaaattattaaccttgcaaataaaatacgaactgatggattaactcagcagccttcagatgatgcttctgccccaaatatggatgaaaatggcgttgttaagtctggtgacatcaaatttatttactctgctaatttgaatatagatcctgtgagggaatatttaggatgggaatttgaagacaatacccttgtaaaagaacttaatctaactcacaaccttatagcggataaagcaaacttccctgaactgatgaggatttacgacaaagataaaatacttgaattcttacggaataaagtaaggagacacctcaaagaaaatgatcctgagcttgatacatctgagaaaacattatcacaagttcttgaacatgtaggtgctgctgttaagcctactaaaggccagcaagaatatattgataactaccctgaaatccatgcatacgcgctgtctctgccgtacgatttaatttctaaattatatgtagataaagatcagttacttgatgataaaaagaattttgcagaagatgaaggaaaacctggctcgaacagagatgatttgattaagcatctatttaaaattgagacatgcattcggctatatcagagcaaccagtttaaccaattcataaaactgacagatttctcaatctcatcaattgcggacaaaatacgacttagagatgccattcaatccttcacaattgataataactcaacaattcgtcaagtaatcgatatggcagatgatttaggcatagtaattaaggatgatcgtttgaataagttcatcgagaagaggatatatttatataagcaagtatgcgatatttcatatcaagaatttcgtaatgtatatgattatcttgaaggctattcacctttttcaacccaacacaaaacaaaagggacagagtttcccaatgtacttgtggttttggataatggcagatggaatcaatacaatttcaagtatctttttgaaggaaatggtactgacagtgtcagacagcgatctgaaaagattttctacgtttgttgtactcgtgcaatggagaaattagcagttttctttcccaatcctactgcactggttttgggaaccgctgcaacttggtttgggaaagagaatattgtcaatttagatgaattataa

SEQ ID NO: 73124 - DNA, 2133 bp, Escherichia coli KTE212; identical to SEQ ID NO: 73044

SEQ ID NO: 73125 - DNA, 1677 bp, Escherichia coli KTE212; identical to SEQ ID NO: 73045

SEQ ID NO: 73126 - DNA, 1785 bp, Escherichia coli KTE228; identical to SEQ ID NO: 73042

SEQ ID NO: 73127 - DNA, 1782 bp, Escherichia coli KTE228; identical to SEQ ID NO: 73043

SEQ ID NO: 73128 - DNA, 1980 bp, Escherichia coli KTE234
atgaaaattactgaaatggagatcaaaggctttaagagctttgataatgtagggcaaactataaatataaattcattcaccagcttaattggagggaatggaacaggtaaaacggctgttctcctcgcattgacaaggatgtttggtgtcaaaagctcagatagaattattcaagttgatgatttttatgttcctcctggagatgaaattgatactcaagatgaaagagagctatcagttcgtgtaaaattcgaatttgcagacctaaaagacggtgaggacgactcggttgcagatttctttaagcatttaatttcaagtgaagcaggagagatcccattctgtatagcaaaattaaaagcaaaatggacaaagactaatcttgctgaaggcgatatagaaagcgatctggtatgggaaataggggagtctgaaaaaaatataacggcatatgaaagatcaaaaattcatgtccactatgtccctgcttaccgagatcctgcccaacaactgaagcaaacagccggaaccatcatgcaccgtttgataaatgcagtcgaatggtctgaacaaatgggagcaacagttgatgaggttgctgtttcaatcggaaatcaattccaagaagaagtaggagtccagacaataacatcttcattaggcagaaattggaaatctcttttcactggtggttacttcgaagaacttcaaatcaagccagtagtgaatggaattgatgatgtattaaaacatatcgatactgtatttttacccagtccagatactcaaccattaccaactgaaagattgagtgatggtatgaaatcattattttatttatctttagttaaatctgcatttgatattgaagatgagataataaattctgagggcaaacatttatcgatatcagtagaagcattagatcctccaaatttaacgataatattaatagaagaacccgaaaaccacctttcaccacaatacttaggaagaatagttaagctgtgtgaagagatatcagaaaatgatcgagcacaagttgttttaacaacacatgcaccatctttacttaatcgggtagaacctgagaatataagatatttccgtcttaatgataataaaaatacagtagtcaaggaaatattattaccaagcaaaggtgaaggtgatgcagaaaatgttgataccttcacatatgttaaggaggccgtaaaagcatatccagaaatatattttgcaaaagttgtcatacttggtgaaggggatagcgaagaaattgtaatacctaaaatagcacaagtaaatgggatagagcttgatacttcattgataacatttgcgccattaggtgggcgatatgttaatcatttttggaagcttttaaatgagctttcaattcctcatgtaactcttcttgattacgatttcagaagaggcggtggtggatggggaagaattaaatatgcagtcaaacaattaatttctattggtgcggataaaaatgaattattaagagtcacttcaggaactttaagcgatgaagaacttgaagaaatgcatacatgggatgagaatccagatagtgaatcgggatggatagagtgtctgaaagattataatgtttatttttcctatccctatgatttagattggataatgcttaataaattctttgaggattataagacatttgttccagtaaatggaggcccaagattgccaaaggatgatgaccctgaatataacaagaaagtggaagcagcaatagcttcagttttgaaaaaagaagaaaaagacattgatattaagaagttcgatgactttgaaaaatacttttggtatcgctacttatttttaggaagaggtaagccattatcgcataattatgttctatccaaaatggaagacgataggttaagagataatagtcctgaagttcttaatgagcttatcgaaactgttagaggattactttaa

SEQ ID NO: 73129 - DNA, 1848 bp, Escherichia coli KTE234
atgccgactattaaagatgcagattgggttttaaaggatatccaagaagttgaagacgaggctatgaaggtaattcgaaatagcacagaacataacctcgttcttgctggacctggtgctggtaagacagaattattagctcagaaagcatgttttttaattgaaacaggaaagtgtagaagcaaaaaaataattgcattatctttcaaaaaggatgcggccaaaaatcttcaagatagagtaaactcacggcttgatacaaaatatagacacaaatttgaatcaacaacatttgatgcattctgtaaaagtattgttgatcgctttaaaagcactattccggaatcttatcgtccatcaaatgactatgaaataatctttccaaataataatgatttagttgaagaaattaaaagagaggccgtaggctttgaaggattaacatctgaagaattaaataaattacaaccttataattttgaagagaattatatagtaactccttataataaagcattagaacattctgttgatggcaggataagacggtttgtgtggttacacttattaaaaccaaaatcaaggctttcattcaagatgattaattttcttgctaattatattattagtaggaatcaatatttatctaatgctataaattcaacatatgactatgcttttatcgatgagtttcaggacacaacatataggcaatatgagatttttaagagcattttcttgggtaaaaaaataaaaataacagcagtcggtgatacaaaacaaagaataatgggttgggcaggtgcaatgcacaatgcttttgatgtgtttaaaaaagattttggaatcgaacaatctaatgaattagttagcaatagaaggtcattaaaaaacctcataaattatcaacgcatgatggaagctttcatgaatcatgctgatataaagcctgatatgatgttgattgaaaatgaaggttcagctaagttactacaatttgacgaaagtagtattgaaggggcatatatagcattatgtatccagcaatggattgctgaaggagtaaatgaaagagatatatgtatactgctaagaaacccggctaaacaatatacagacgatatcatttcagcattgcaatatttaaaaatacaatgtcgccttgagaacgagtatcaggatcttttaaatgaagctgtagtacagttacttttacaaatgctaatgtttgtctgtaatagaaaatccatagaaagctgggccactacaatggagcttctatgtaatataagaggagtaagtaaaagaggtgatgttacacgattagaaaaagaacttagccagtttattaaatctcatcgggtaattaaaggggaaattgtcgattatttatattcattattaagtatatttggtgtcgataaaataaagtcttactttccgcagtatatgagtgggaatggtttagaatatagcatagaattactttctcgccacttcgataagttagatgtaaaagaaaacacatcagaagccattgatttattacttggcaataaaacaatacctcttatgaccatccataaaagtaaagggttagagttcaggaaggtcatcgttgtggggcttgaacctggtgcctattttggtaaagaagaagagcaaatagaaaatcaaaaaacagtctttgtggcattttcaagagccattgaagaagtattaatgactcgttgtaaaataagaaacaatagttatggcaggtctatcaagcagaattgtaatgatataccgttaataacaaacatgataacttattgtggtatcgaggctgaagattatcaaggttga

SEQ ID NO: 73130 - DNA, 1812 bp, Escherichia coli KTE119
atgtatctctcacgtatcaagattaaaaatttccgcaactttagcgaccttgatgttgcgcttggtgggaatgtcgtcattgtaggcgagaacggtgtcggaaagagtaatttgcttttggggcttcgactaattttcgacccttcattgcctgatagcagtcgtcagctcggtcttgctgacttctgggatggactggaagatattaccaccgaaactacaattactatctctatagagattaaagattttgaagaagacctcgatgtcttggctgtcttgaccgactaccgcctcgatgatgatccacaaacagttcgccttacatatcaattacgcgcccaacctaaccttacccatgctcctgtcagtgacgacaacttttccttcttatgctttggtggagaggatgagtctaagcgtttcggccatgaacttcgtcgccgtatcacgatggatttattacctgcgctacgggatgctgagggtgatcttgctgcgtggcgtcgttctccgcttcgccctcttgttgaggaagcatttatcggtgtagacaagaacgcacttaaagaaataggagacaagattgcacaggcgagtgctgcagcgattaactttaaagaagtgaaaatgcttgaaagcaacatcgcagctctactcatgacaatggctggatcgaagcagaatattcaaccctcccttggattcagtgctaccgatgctacgcgaattaatcgtcagattcggctattaatagatgaagggcggcgtggtgttgccgatgccagtctaggctcggcaaaccttatttttcttacgctcaaactgctcgatcttcaacgtttgattacagcaaataaacgcgatcagtctttacttgccattgaagaaccagaatcccacctccacccacaccttcagcgtttagtctataagcatcttttcgaaaccattatagatgacgaagatgtagaaaactggaagacttctggaccactttcagtaattctaactacacattctccgcatattgcaagcgtagcgccacttagttctatcctgcttctccgcgcccactccatcgaggggactgtgggttattctacggccaatgcgggcttcactacgaatgatattgaagatcttgagcgctatcttgatgtcacccgagcagaaatgttgtttgctcgcggcgtgatccttgtcgaaggtgatgcggagcgtttccttatcccagcatttgcaaagaatatggaagtatcgctcgatgaacatggtgtatccgtatgctcggttgcagggacaaatttccttccctatgtaaaattgctttgcgctttgggtatccctttctctgtaattactgattatgatgaagtcgactctatcccccgagcttacaatcgcgcactcaaactggtgcgtaaaataactgatgctgcagacggcaataataccaatgcaattattcaatctatcaaagataaagaaacttgggaggaaacatttgatgaaatccaaaagtttggaatctttgttaactggagcacgctcgaaactgaactgtttgaagaagattatgctcaggaaatgatagatacattacgtgagcataatttcagtgacaatcgtaaagctgctcttgatgcttgggaaatgcagccggaggattttgacgctgatgaactactcaagatgatagaacaaatgggcaaaggtaggtttgctcaaaggttagcgacacggatccctcaaaaaccagtacccagctatatcgagggtgcaatcaactatgtcatcgatcatgtctaa

SEQ ID NO: 73131 - DNA, 1797 bp, Escherichia coli KTE119
atgtcatcgatcatgtctaacgaaaaactctatctcagggctgctgcagatcttttttccaacacgaagcagtggcaggcttatgaatcaacaggtcattgtgtgctgttagcagggcctgggagcggtaagactaagacactgacaatcaagctcgccaggatgcttagtgaagatgttgaggagcctcgtggaatcgcctgtatcacttacaataacgaatgcgcgcgcgaactcgaaaaccgattggccgctcttggtatcgcacccagtaagcgggtctttataggaaccgtccactcattttcacttacacaaattcttcttccctatgccaaggtagccaatatcggactacctgataaatttacagtggcaaaccgccagcaaaccaaggcttgtttggctgcggctcatgcgaagattattggtgggtcggaaaatccgcaaaactgggaaatgcggttgggcaatcataggcgccgattcattaaccgtgagcgacctgaatggaaatcatttaatcctgtgcttactaaacttaccgagacgtatgaagccgaacttcgtgcacgaggattgatcgattttgacgacatgccacttcttgcagttcgagcccttaccactaacaaatggcttagaaccgcaatggtggccaaatttccaatactggccgtagacgaataccaagacttgggcattgctcttcacggtatggtgatgggactctgctttagtgcgggtatgcgcttgtttgccgtcggtgatgttgaccagtcaatttatggtttcactggcgcgacacctgaactacttaggcggttgtctgatcgtgacgatgttgaaacggtacagcttgacctcaattatcgctgcggatcgaggattgttagtgcatctgaatatgcactcggtgaggctcggggctacaaaacacctgagaatgccgagaaaggaacaattttctttcacccgtgcgctggcgactacgccaggcaagcacggtatctcatcgaaggtctgatccccgaaatatgcgaacgtcgaccacacataaatcttggcgagattgcagtgctctatccagcggcgtttcttggagatgaagttgctaatgcggctgcagagcatggttattcggtgataaggaccgatggtaatgcgctgtatccacgtggcagccggttaatgcgatggcttgagcaatgtgcaatgtggtgctgcggaggatggcgctcaggaacaccatctctgtcccgcgtgattagtgaaggcataagattgtttcacgaatcaataaccgatgaggatgagagacttatttttcagcgcgacctcactgctgtattatggggaaatcgtgacgagatgcttggcctatccaattggctcacagaacttcgagatgatataattcggccgcatgtcgctatcaccagaacacttgttgatgaatacgcgaccttaaataatttcctaactcgtctcaagcctggcggtgatattgaggattttccgatcgccgagtttgcgggaatcggcagcggtcttcagcgtataactctttcgacgctgcatagttcgaaaggacgtgagtttgatgtggttattctgttcggcatagaagaaggccggttaccgcggaatcgcgcttcgggcaatgacttacgcgaagctcgacgtcttttctatgttggtttcactcgcgcgaagcatgagatccatcttatgtatgggcagcaaaatccatctcgcttcgtgacagaagtatcgaagcgacttgaagaggaataa

SEQ ID NO: 73132 - DNA, 2073 bp, Escherichia coli KTE45; identical to SEQ ID NO: 72136

SEQ ID NO: 73133 - DNA, 1734 bp, Escherichia coli KTE45; identical to SEQ ID NO: 72137

SEQ ID NO: 73134 - DNA, 2265 bp, Escherichia coli KTE45
atgagaataaatttcattgaaattaagaatttcagaaagttgaagtctgtccgcatagatattgcagaaaaaaccactctctttgttggtgctaacaatagcggtaaaacggctgcaatggaggccttaggacatttcctcgttgatgcctcgcggtttagcgtaaatgatttgacactttgcaattgggcaaaaataaaagatatcactgaacaatggttaactgaggaaaatatagatcttgataaatcacaggaagctttatcagatctctttcctttcatggatatttggatcgaagcgaaagaaaatgagctccaatatgttaaccatatactaccaacgttagagtggaatggaggtttaattggagtaagactgagatatgaacccaagaaatttgatgttttctttgaggatttcatatcttcccgccaaaattcattagatatacacgaccgaatttctgagcggattgataaagaaaattacacaatagcattgtggcctaaagatatttatgaatatctttcaagaaagttgaattcactgtttacaatcaagtgttatagcttagatccttcaaaactagaattatctgataatgggatagccaaaccccaaagaatagacagtaagcaaacattacttgatggcatacctctcaaagatctaataagaattgatgagatcaatgcacaacgtggctttggaagcccctccgctgccgacaaagagaatagcaaattaaacacacagttaagagattattattctaaacatctcaacccaatagaaagccctgaattatcagatattgaagctctacaagccattcgtgatgctcaggatacatttgatgaaagattaaaaaactgtttctcccaagccataaaagaagttgaaggcctcaactatccaggagtaactgatcctaaattaaaaatctccacaaaaatagaaccaattgatggcttaaatcacgattcagcagttcaatatgagttaactaatgctttaagcaatgtatctttagactatctaagattgccagagagttataatgggctaggttatcaaaacttaatctcaattgcatttagactaatggggttcagagatagttggatgaaagttggcaaagctacaaataaaaaattagcagacgacaatcaagaggattttccagctcccctgcatttggttttgattgaggaacctgaagctcacttgcatgcacaagtgcaacaaatcttcattaggaaagcatatgatatattgaggaatcataacaatttaggcgataaagaagagcttcatacacaactcattataagcacacattcgagccatattgcccacgagtgtaaattttcttctttacgatactttagaagaattcctgcttgtaaagaacatgagatccctgtatcaacagtaatcaatctttccaatgtttttggtgtaaatgatgatacagaaaaatttgtaataagatacctaaaggcaacacattgtgatttattctttgcagatgctgtaattcttgttgaaggtcctgccgagaggattttagttcctcacttaattagaagacactaccctttcttaaatcaaagctacattaccttattagagattggtggtagccatgcacatcggctaaagaatctgattgttagtttgaatcttttaactctaattattacggatttagaccctaaggattcacaagatggcaaggttaaaccctctaagaaaggcagcggtttcgttacaagtaatacaacacttgcaagttgggttccagaagttaccggtgtcgatgaattgtataaactcacggaagataagaaagaaaagaaatataatgaattcttttatgtttactcagcttttcagattcctgttttggctgaattcaaaggtgttaaccaagagtttttaccaaacactttcgaagactctttagtctacaataatctagattttttcagtaatcttactggtaatggtttagtgaagaaatttaaagcatcaattactaattgcaaaaatgcagaggaatttggagaggaatcattttcacatttatctaaaggtaataaagctgaatttgcattagatatactttaccatgacgaaagcgataaattaaacacacctaattatataagtaatggtctaaagtggctcgaagaaaagataaaaataaaacaattagagcttgtttctgatttagccagtgatggagaaaccaaatga

SEQ ID NO: 73135 - DNA, 1839 bp, Escherichia coli KTE45
atgactatcaagcaaactgaggaaatattagattctaatatatataattatttaacgggcactcaaaagcatagtttcctcctttatgctggagctggctctggtaaaaccagaactttagttaatgttctggaaatgattttgaagagtcactcagaagagttcaggctaagaggaaaaagaatagccgtgataacatacaccaatgcggcttgtgatgaaataaaaagaagagttaaattcaacaaattaatagatgtgtctacaattcatagtttcctatgggagctaattagatatcactccagtgatataaaatcttggttaatggaaaacatttctgcggagatagctgatttaagggacaaacaaagcagaacaactagagtttctcaagcttctttagaaagagaaagaaaaatagtttccaaagaaaaacgtctgcaaaacttatcagacgtatataaattcacatataaccctaccggagataatagaactaaagactctctaaatcattcagaagtcattaaactcggatcttattttctagataaaaaatatactatgcagaaaatattggttaatcgccatccaattcttttaattgatgaaagccaagatactaacaaactgctaatgaatgcattactcgaagttgagaaaaataacagagatacattctcggtgggtctgttaggggacatgatgcaaaggatatactctgatggtaaaagtgatttagaggcatgccttgacgaacactggaaaaaacctgaaaaaagcattaactatcgttctccaaaaagagtggtcgctttaattaatttaattagaagccaagtggataatcataagcaaaaggccaaagaagatgccgaggaaggatatgtaagaatttttataaaagaatgtcattctgataataaagatagagatgaatcttttgtaaagcaaagaatgagagaaattactttagatgatgattgggaaaaccatgattcattagtaaacaccctaatattagaacatcatatggccgcaacacgtatgggctttatagacatgttcactcctctctatcaaattgagcgattaaaaactgggcttttagagggctctcttggtaatataaatttcatttgtggaattgtttcccccttaatatccgcctgcattaaaaatgatacttttactatcactaacattttacgaacaaatgcccccttattaaaaagagaacatcttttaaaaaatacaaataatgcctcaccacttacacagatcagaagctctcttgatatgttgaagagttttatttctaaaaaccccgaactcatcacaattaatttactgcataagataaatgaaataaaattacttgacatcccagattctatacaagaaatactagaaagtaatgataactcacaagatgatatcattgaagcttggcagaaatcttttagctctcctttatgtcaatttgataaatattataattatgtcaaagggaagacaaacatcgatactcatcaaggagttaaaggtctagaatttcctcgtgttctagttttaattgatgattctgaggctaaaggttttatgtttagttatgacaaacttttcggtattaaagaaaaaaccaaaactgatttagataatgagaaagaaggtaaagatactagtgaagacagaactagaagactattttacgtcacatgtagccgagcacaaaaaagcctcgccattcttgcttatacagataatacagaaatgctaagaaaaaatctattacataaaggatggtttgattcgagtgaaatagaaataatttaa

SEQ ID NO: 73136 - DNA, 2073 bp, Escherichia coli KTE46; identical to SEQ ID NO: 72136

SEQ ID NO: 73137 - DNA, 1734 bp, Escherichia coli KTE46; identical to SEQ ID NO: 72137

SEQ ID NO: 73138 - DNA, 2265 bp, Escherichia coli KTE46; identical to SEQ ID NO: 73134

SEQ ID NO: 73139 - DNA, 1839 bp, Escherichia coli KTE46; identical to SEQ ID NO: 73135

SEQ ID NO: 73140 - DNA, 2139 bp, Escherichia coli KTE48
atgcacatttccaaactgaccttggtcaactataagaacttcaagaacacgtctctgcggtttcataagggagtgaataccattatcggggaaaacggttccggtaaatctaacatcctgcgagctatccgcctcctgcttgacgacactatggtgcgcgctgcctatcgcttggatgagtctgatttcagtcgctcactcggtcaatggcagggccactggatcgtaattagcatggagttcgatgacatcaccactgatgaatccgttcaagcactcttcctccatggaactgctcccttggatgacgtgccgattcataaggccacctataacctgattttccggccaaaaaaagaaatcaggttgaagctggcagccttgagaatgtttgagcatgagcaactatcagagattcgtgactcaatcacgatcgatgattacgaaacgattttcacaggacggagttgggccgacttcggcaatcctgcagtatacaaaagcatcgttggcgattttgatgtttgtaacttttcatcagagacggagtttccagaaattggggcaaaggtgcctggtttcctttctgttacgaaagaggtatctctgactttcatccaggccttgcgcgatgttgtttctgagttccacaacaaccgcaccaaccctttactcaccctgctcaagagcaagagtggagagatcaatccagcgaagatggagccaatcaccgagatggtccgcgaactaaatacctcgatcgaaggcttagaggacgttcagtcagttcgcaatcacattagagagaccatcaaggacgccgcaggtgaaacctactcgccagcgtcactctcaatcaaatccgatcttcccgaagaagcagataagctcttcaagtctctccgactattcgtgggggaatccgaggaagggtatgaaggtgcaattcatgagttgagcctcggtggagccaacctcatctatttgacgctcaaactactggagtttaagtaccagcgcgaaaagctgaccatagccaatttcctcctgatcgaggagccggaagcgcacatccatacacatattcaaaaaaccctgttcgaccgcatctcatacagcgacgcgcagatcatctacaccactcactccactcacatctcagaagtcagcaatgtaagcaatgtcaacatcttgggccgtcatggatcgttctgcgaggcctatcagcctgccagaggtcttgagccaacccagatcaacagtatccagcgttatctagatgctgtgcgtagcaatctgctctttgccaaaagcgttatactcgtcgaaggtgatgtggaggaaattctgataccaatcctaattaagctagtactgggagtaagcgttgacgagttaggcatcagtgtcatcaatattcgcagcacaggcttcaagaatgttgcggttctcttccataaccttcgcattaagaaaagatgtgccatcgtcactgatttggaccaagccttttttgacatcactgaacagacaactgatacagaaagtatggctaagataaaggcaaaagccgccgggtcccagaaagcaggcttagaacggcaggccgatctgaccgagttcacagtagacaatccatggcttgcaaccttctatgcgaaatacaccttcgaggtcgactttgtcgcagtcggtaatcatgaggccgttatccaaaccattccaaaagtctataaggacgagggaaccaggaaagaggccaagcagcaactccaatccggagacctgcgacaaatgggttgccgtacgctaacgatggctaagcaagtgggcaaggggtggtttgctctcttgctcgctgagtacctcacccctcaagtccatatcccagcctacatcatgcaggcaattcattttgcacatggcacgtttcctcttccccttcttgccagaatgctccaacatcgcgctgaataccgatacggttccgatgctttgaattcggcagtgaagcaggcatttcttctggaagttgagcggtttgcgcgagggtatattggcttggctgagctcaggatagcaatcgaacacatgctgccaggagacgccattgatgcatttttagcggagatgcagtga

SEQ ID NO: 73141 - DNA, 1782 bp, Escherichia coli KTE48
atgttcgtttgggacccaagagacctcaatcctgagcaggcggaggcagtgatcgagccatcaagtatctttctaaacgcttgtccgggtagcggtaaaacccgcaccttgacatacaaaattgcatacgaacttacacgtcgtactgacaagcggatcgttgtagccattacctatacccaccgcgctgccgacgagattcaagagcgtattgaagatctaggagtcgacacttcgggcctatggattggtacgatccatgcgttctgcctagagtggatactcaagccatatggcatctactcccctgaacttgcacacggttaccgtgtgatcgacccgcatgatcgtgaacgtctacttgagagactatgctctccatataaaggtgttactcactgggattgcgattactacgttactgagacggggtatcagcttggctgtgtagacaaaggaaaacaccatatcattcataagattttgaaggcgtacttcgacgagctttcagtgaaccgacagatcgacttcgaacttatcctttggcatgcctacagattgatgcatgacagagcccaaatcgcagtgctgctctcgcgtgtgttttcccacatccttgttgatgagtatcaggacaccaaacagatccagtacactattttgacatccatacttcgtgcaggcagcggaaagaccaaaacattcattgttggcgatccgaatcaagctatctatggatcactgggtggttacgctatgccagtggatgaattccgtacccgtgcagggatcttgattaaggagtttgcactcagccgaaattaccgctccagtgaacgaattatcagttatttttcgaactacagcgtacacgcaacaaaaatcaacggtgcaggtaagcatgccaagtatcccagccgagtgacctacaatcaaaacgtaacatgcagcgatgtgcacgatgagattgtgagattgattcgggtcagtctcgccaacgctcactctcccgaaaacatctgcgtcctcgctccacagtgggttttgcttgcatccacgacacgaaaactagtggcgatgttgcctgaccagcaatttgatggcccaggtctcgtccctttcagtaataacttcgataatttctggttcaaggtctccaaaattttactaacggactcttcccccagactgcttgtcaggcgaatgcgttgggcaaacgacgtgatcaaagacctcgatagtttcggcgttgacaccaaatcattaactccgcgcattttactgcgggagattaatgctcttacaatcgatgaaacagacggactcagttatttggaccaggccttcaacgatctgctcaagaggctcgatattccccaagaaatccatcctgcgctcttgacccaccgtgaggcatttttcagcagttcggcagcgcgaatagcgcggctgcagaaggaaggggcgacttacatcaatcaagtttcattcttcaaaaaagtttttcgcgagcgagccggtatcactgtctccaccatccatggagtcaagggggccgaattcgacgttgttattgcctttggcttactggagggtatggttccgcactttaatgaagcaaatagacatatcgctgcaagcaagctcctctatgtattgagttcccgtgctcgtaaaaatcttcacttgatctcggagtcaggacgacagagaggaaaatacggtgtctatacctcgactgagttactaacgacttgccaattcagttacgacctggactaa

SEQ ID NO: 73142 - DNA, 1971 bp, Escherichia coli KTE165
atgttgattgaatcagtgaaactgaccaattttcgtagttttggcccccagggccaacaaatcaagcttgatcccatgttaacaacgctgattggcgcaaatggtacgggcaaaacagcagtgctacaagcgcttcagcggctattcggcgtgaccagtgaacagcgaactatctcccgacaggatttccatgttccgtccacagaaaccgatttacccaacgctcgtaatttatcattagaagccattattgcttttcctgaactggatgacgcacaaggagaccattcggccataccggagttttttagaagtatgagcatcgcggatgagcatgggaggcttaaatgtcgtttacggttagatgcccaatgggatgatgatggaaccattgacggttatgtaaccagccagtttcatgccataacgtgttggggtaatgatgaacctgatgattcggatttccacaaggtgcgccccgccgatcgcgcaaaaatccagcttatctatatccctgccacccgttcggcaactgcgcaggtctcctcgtttcttaaagggagattatggaaggccattaactggtcaacgcaagttcgggcatctttcgctgaaaaagcgcacgagcttaatagtgccttcgaaagtgagtcagcaatcgatgctatcacgggaaggctgacgcaacgctggcaacagcttcattcagccggtaccgacagcacgcctaaatttcgacctgttgatgtccgttttgaggagtttgtcaggaaagtggatgttttgttgcaccctgatgaaagcggcagagatcgcagcatcgaagaattaagcgacgggcaaagttctctttttcatatcgccatgacttcggcaacgcttgatgtcgaaagggaaatccggctaaattcaagaggttctgcgtttctctacgatgacttgccattgccctcactcaccttattggcgcttgaggaaccggaaaataatctttcaccacattatttgtcccgcatcgttagtcaacttaatgagctgacaggaaacattcatgcgcaagccattatctcaagccattcatccagcattctggctcgaatcgccccaactcagataaggcatttccgattagacgttgtttcaaagaacactattgtaagagcgctgacattgcccaaagaggataatgatgccgcaaaatatatccagcaagcagtacgcgcctggcctgaactttattttgctaaagtggtggttttgggtgaaggtgcttcagaggaggttattttgccagccgtggctggagcgatggggactcctattgaccgatcttttgtcgcgatggttccactcggagggcgacacgttaaccatatgtggcgattgctcaatgacttgcagatcccctttatcacgttgcttgatttggattggggacggcatggggggggctggggcaggattaaaaatattatttcgcaacttattgaagttggaactgtgccacaagttttctttcaaaatgtagatccaaggggatataaatataatttgttagagttcgacacgtactctccttcaaacaaagcacacattgatagctgggtcgattttttgaaacgttttagtatattcttttcaaacccattagatatcgattactcaatgctaaaagcattttctggttactatcaaacaccgccagaggaaaacgctagtgggccgtcaatggcgggagatcccagagatgccgtcttagggaatgagggaatacctgcattctacgccgatgatattcatattcttcgctggtatcgttatttatttctgggacgtggaaagcccagtacacacattagggtattgggccagatcccatcggatcaactggcacaaaatgcgcctgatgagctaaaagctcttgtccaaactcttcaacaccacttaagcaatcggggcagccagcaatga

SEQ ID NO: 73143 - DNA, 1902 bp, Escherichia coli KTE165
atgaaattcatttcccctgagcaatggcgtccgaaagagattgatgatctggaacccaacgcatggaatgctttaagaacatccggttctgtaagcattatcgccggaccgggggcgggaaaaacagagtttctggcccaaaaagctgcctatttactggaaaccgggatttgcccaccgagccaacaaattttggccatttcctttaaaactgacgcagcaaaaaatctcgctgaccgggttaagttacgttgcactgaggaactgagtcaccgtctggtttcgatgacattcgatgctttcaccaagagtctggttgatcgtttcagattagcgcttccgcaggaatggagaccgtcaaaaaagtacagcatcagttatcccaataagagagatgttgcccagttctgggcgcgacgacagcaccgcgtatcatccagtgatgccagagatattgaatacgaaacccgccatatggacgccgcttcatttgagtctcatgttgttggttcatatcgaattccggaaaatatgtctccaccacaatcaatcaaacattatctggtgttctggtggcttcgcgagcaaataaaaaacgagaacgaagaagaatcagcactgtcatttatgacgatcaatcggttagctgagtatattgttcgctctaatatccatattctgcgggcattaaaagcaacttatccttttgtttttgtagatgaatttcaggatacaacctacggtcagtacgattttctactgtctgcttttggtcaggcaaagaccacgataaccactgttggggactataaacagcggatcatgggttgggccggtgccaaaacagatgcttttcatcagtttgagcatgatttttctgctacccgatatcagttacagttaaaccatcgctcatcgccagaattagtcagactccagcatattgttgcaagggaaattgaacacggcgtttgtatggcccatacaaaagttccccaaagaatagagaacggatgtgcttttattctgaatagtcgctctgttgcgttggaggtgaattatattgccaaatggataagtcgaaatatgcagtcaagagaactgcggcctcgtgattatgctattttagcgcgacaaaaaccagaaaattattatgatcaattaaatcagtcattgattaattatcatttaaaactaagaaatgaaagtgttaaaattggcaacacaacacttcaggatttgctgacagaagaattcaccattcttttttcaaatctacttaggtttgtgatcgggcaaaaagaaccacggatctggggacaggtatactcaagtattgaacaattaagaggtactttgccagatgatatccgcgcgcacaaaacaatagaaaatcagcttgttaatttaaaacattctatgcaagctcttcttgagcaaccttacagtacaacgactgctcaacccgtcctggagcgcattatttcatttatatccccttccgatatgcgtaaagcgtttagccgttataatactggtgatcttttgaagattacgctagaagcgttggaaattcattttttacaatgtgtcagcagtaccagtaactggcaagactgtgtggatgaatttgatggagtagatcatataccactgatgactattcataagagtaaagggcttgaatttgataccgtcatttttatagggttggatgacaatgcgtggtggtctcaccagccaggcaatgcagagagtatggcgacattttttgtcgctttatcccgggcgaagcaaagggccgtgttctctttttgctccgaacgaggagaacgccaaaagatatcagatatttatgctttattggaaaagtcaggtgttaaagagtataatatcaattaa

SEQ ID NO: 73144 - DNA, 2073 bp, Escherichia coli KTE194; identical to SEQ ID NO: 72136

SEQ ID NO: 73145 - DNA, 1734 bp, Escherichia coli KTE194; identical to SEQ ID NO: 72137

SEQ ID NO: 73146 - DNA, 1992 bp, Brevibacillus borstelensis AK1
atgcagatttcaaaagtgaaaattagaaactttaggagtttcggagagactgaaaccaccattcatttatctaaacttactacattagtaggggcaaacagttcaggaaaaaccgcattaatacaagcattgttaaagttgtttggtatgaatcctagtgacagaactttggctagaggggattttcatgttcctcatttcttcaatgtagatgagtgtaaagaactggagttatcaatcgaagttcgaattgaccttcctgagttaatctcacatgataaaacaattgccaaaaaaagtattcctccttttttcaatcaattggttgtaaattctccaggagaagttccctatttgcgaattagattatctggtaaatggattcaagggaatactccagaaggggaaatcgagcaacatcttcattttatcacggttgcggaaggcgaggatgagacaaatgcacttgttgcagtatcacctcatcaacgatcaactattcagatgatatatgtacctgctattagggagccattaacacaattgaaaaatgcttcaggcacaattttgtggcgtatactaaacaaaattaaatggcctgaaaatattgacgaacagataaaggataaaatgaagattgtaaatgatctttttgatgggatagagggggtagatcagataaaaaaaataatacaagaggaatgggagaagttccatcgtgattttcgatataaaactacaaatattgaatttaacagtacaaccctttcttcaatactaaaaaagatagaagtacaatttactccaactcaggagccaggagtttatacaattgataaactcggagatggattacgttctttattttacctatcccttgtatcgtccttacttaaggtagaagagaaaattaacggtgagtcatctgcagcatttacaattttggcagtggaggaaccagaaaaccacatttcaccgcatcttctcggaagggtaatggacaatctaaaaacaatttcgtcccgagaaaatgctcaggtattattgtcctctcatagtacggctataataaaaagaatcgatccggaagatatttatcatttgcgtattgacagcaataatggatcaacaattgccagaaaaattgaattaccattaaaagccgatgaggcctatacgtatattaaagaggctgtaaaagcatatccagaaatatattttgcaaaattagttattttgggagaaggggacagtgaagagatcattttacccaaaatattagaggcgaatggagtaatagcagatgacgaaggaatatcaatagttcctttgggtgggagacatgtcaatcacatgtggaagcttttacatcagttaaatatacctcacattactttattagatttagacagagaacgtggaggcggtggctggggtaggataaaatatgttcttcaacaacttctaaaaaatggacatgatcgaaatgaattgttgggagtaactaggaatggcaagtcccatacaataacagatgatgaactcgaaaagtttcacgagcgtccgttaacagaaaagcatattgaaactatgcaaaagctctggataagtaggttagaaaagtacaatgtatttttttcggctcctttagatattgattttctaatgttagagtctttccaagggccttataaacaaacagtccctcgtggaccaaacctgcctgataaaaatactaaccctgaacaatatcgtcaaaagcttcaaaacggggtaaagaccactctaaaaaacgagaatagtacaggagaaacatataccgaagaacaacatgaattaatggtctggtacaatacattatttctaggaagaagtaagccaagtacacatatcgaggctttgcttgcacttgataaggagcatctaataagaaactgtcctaaagtgctaaatgaccttgtgttaagagtgaagacaatattagaactatag

SEQ ID NO: 73147 - DNA, 1911 bp, Brevibacillus borstelensis AK1
atgacaatatttgtttcaccagaacaatggatgcctgcagatggattaattttagaaccagcagcggacattgctgttagaagtcaaaataatacgttaatagtggcggggcccggtgcaggaaaaacagagcttttggctcaaagggcttgttatttactgcagacagggaaatgtgaacctccacaaaaaattttagcaatcagttttaaagtggattctgcagaaaaccttgcaaaaagagtagaaaaaaggtgtggtaaagaattagcacgtcgctttgaatctcgtacatttgattcttttgcaaaacatttgcttgatcagtttcgactagcgataccaatagagtatagacctgccagagactacgatattgctttttctgtaagggacattagggaaattgcaacgtcgtatctaacagagagacaccctacccatccaaattggcaatacgagattgattttgacgaactctttaaaaaacttacgagaactcctcttcctttaaaagaagtgaattctgatatttatgattggatagttattcaactctggggcattctcatccacggaaaaaaatcattaaaaagcaccttgacatttcctattatttcaagactggcagaattattattgagatcaaattcatatatcactgccgctctaagagctacatacagccatgtattcttagatgaatttcaagataccacttttatacaatatgatttgttaaaaactgcgttcctaggttcatctgcaatactgacagctgtaggggatgataaacaacgcatcatgggatgggcaggtgctatgccaaacgcctttgctcaattcatacatgattttaatgcttcagaaattcatttggaacgaaatcatagatctgctcctagactcgtagaaattcaaaatatacttgcaaaaattatcagggaaaattcagtcgaggtaagtagttctgataaatggaaacaagaggacggaatatgtcaggtttggacttttagtgatcatttgcaagaggcgaattatgtagcatctaagcttgatgaactaattaataaacaaaaagtaccacctcgagatctatgtatcttggtaaagcaacaagaacatatatatgctaaagcgttgttaacggaacttgagcagcggggaatcaaagcgagaattgaaaaagaatatcaagatttgttagcagatgagttaatacaactctgtatcgatgctttaacattggctgtgtatttgcattcaccagaaacttggcaaagaatgatcagttttttagttgatcttaatggtattgaagcaaatgatgaacaagatcaaattctaagaatggaatatcaattaagtgaatttatagagactttaagagagaaaacaaaacagattcaaacaaagaattgttttgaaagtatcaaggagttgaataattacattttggattatataggaattgagaaaataataggtgcttttccgaaatacgctagaaagaggtatttgacggaaattatagaaaagggtgctgaaaaattagctgaatcatttgagttatatggtgattggaaggaatcaattgaagactttttaggttttaatagtataccgatcatgactatccataaaagcaagggcctagaatatgatacagtgatttttttggggttagaagatgatgcgttctggagtttcagaaatcagacggatgcagatttgtgtgctttcttcgtagcactttctagagctaaacgacaagtaatctttacttttagcggttcgcgagaagtgcttaggggacgccaattacagacagtggagcagtttaaaatacaaatatcttcactttatcaaatgctggaacaagcaaatgtggaagtgatctctcactag

SEQ ID NO: 73148 - DNA, 1671 bp, Acinetobacter baumannii ABNIH19; identical to SEQ ID NO: 71826

SEQ ID NO: 73149 - DNA, 1782 bp, Acinetobacter baumannii ABNIH19; identical to SEQ ID NO: 71827

SEQ ID NO: 73150 - DNA, 1671 bp, Acinetobacter baumannii ABNIH6; identical to SEQ ID NO: 71826

SEQ ID NO: 73151 - DNA, 1782 bp, Acinetobacter baumannii ABNIH6; identical to SEQ ID NO: 71827

SEQ ID NO: 73152 - DNA, 1701 bp, Escherichia coli MP021561.2
atgagaattgaaactgtttatattaaaggattcaggaattactgtgatgctgttattaattttaatgaaactaatttgattataggtgcaaatgatgttggaaagaccaacctattatatgccattcgattattacttgataaaagtttatctgaattagatctagaaccaaaaagcaatgactttcatgtaaattcgacaggtgaacaggttgaaaatatagaaatcactatcaagtttacagatgttagtgaagatgctgtaatatctaaattaggagggtatgttagcgatgaaggggaaacatacattaagtatcttgcttcatcattaactatggattacaagatattacttagtcatgaacataacaattttgatgaggttcctaatagattttacttaaagtgtttaagtctaaggtatataaattcgcaaagagatcttgaaaaatacattaaaattgaaaagaagcatcttttaagattggcgcaagaagttcgtagtgaaaaggatactgaaaatgatggggcggtttttactgaattaaataagctacttactgaagtaaatgaaaaagttaaaggaataagttatgttgcatcagcaacagaagagcttaacgaggaacttagaaagttatcctatactcatgatagattaactgttcaacttgatactggtgcaatagggattgaccagtttatagagaaattagaattaagtgcgaatacaaatgggaagaaactaatgcttggtggcgatgggtttaataaccaaatccttcttgcgttatggaaagcaaaaagtgttcgcgagcatgatgttgaaagtgaagtagtgatctattgtatagaggaaccggaagcacatctatttcctcaccagcaaagaaaattggcggcctatttaatcgataaacttccaggccaagcaatcgttacaagccactcaccccaaattgcagtgaattttaaacctgattcaatcataaaactatactatgatgatggagagactctagccgcaagtaatggatgttctgattgtattagctctgcatgggatggaatgggctaccggatgagtattattcctgctgaggcattttttgctaacgtggtttttttggtcgagggaccatctgaggtgattttttacactgaattagcaaaagcattaagtattgatcttgattattataacatcagcattctttctgttgatggtatccaatttgaagtttatagaaaaatattaacagctctaaatattaattggatcgtaagaacagacaatgatgcttcaaaagtacctcataagaatgaatggcaatatgctggtgtaaatagggcgttagcactgtgtggagagaataaagaaccaaactcaagtattcctatagatagtaaagctttgcatactaagtggggaaccatttcaccaataataaatcctaacggcgtttatatatctttttttgatcttgaaggagatcttgctaatgacttttcgaagcatgttcttgattatgcaagtaaggataatcttgatgatgccgctgattatttgagaggaaaaaaagctatacgtatgcgtgagttaattaaagagaaaaaagcttttttaactgaactgaagagcaaagatatagccagacctctaatacatgcactgaaaattgctagaggtgaattatga

SEQ ID NO: 73153 - DNA, 1623 bp, Escherichia coli MP021561.2
atgaagctaactaaggaacagttagatgcaattgattacgaaggtaatctggttataactgcatgcccaggaagtggtaaaacaacaatactcgtccataagattgctgcctgtttatcccattccaaggattatcagggagttgttgcgttatcatatacgaataaatccagcgaggagctaaaagccagatgtagaaaattgggagcagagttaaattctagcttctttggtactattgataagtttttcattaacgaaataatattaccttttgtaaggcaagtatggggcagaaacgaaagcgctctcgaagtagtaaagtatatagatctttctcaagaattaaaagataagacaaataagtactttgaccgagtggatttttattctaatacttcatttgagggcatgggttctctgagggatatttatttaaaggggatgttgattttagacttccttcctcacttggctttttatatagttagaacatcatattcttgtcagcggtatttaatggcaaagtatattggtttttttgtcgatgagtatcaggataccggttattttactcatcaggttttcaagttcataccaacgctagggatgcctcttattatcgttggtgatttggatcaatcaatttatttgtattctcaccgcagttcggattcactaaaagatttcatgaatgatagtggtttctgtcataaggaaattacagtaaatcacagatgtcacccatctatagtaaattacgccaatagaattaaagattttgaatgtcaactagctccgtgtgatgagatttttgtttatagaaaatgtgttgatggcaatcaaattgatatagctaaatggattggtgaaattcttgataatgtaaaaaataaattttcaatatctgataataaggagattgctatattggtaagaagcaatgcttgcgcggagctagtttctgataatttagttgtttctaatagggcttatttggataatgatttaacaaaggctggtggtaaggtttctggtcttgttaatgatttattatgttacaggtataacttaaataaaactgctcagtctattttggagggggttttgggaaggagtgtcaaaaggagcgaggctactcgtatccgtaaggctattaagcaggttagaagtgttacagatgcctttcttattgacgtaataaataaaattgtagtaactcttttagggactgaaatcgagcagcatcataagtccgctctttcagagatattagttactccgaggatgcaaaataattatttggatgttagaagtgatgaagtacaaataatgacgttacataagtctaaaggtcttgagtttgactttgtttttcatttggatctgtatgattggattttgcctaaaagagttttcatagaaggaagctatgatgttgtattcgaaaatgaacagcaatgcataaatcttcattacgtaggaattacacgagcaagaaaaggcattatgctaatgcattctacgaaacggtataatggttcaggtgatcttaagaacggggctccatctcaatttcttttgaaacctgggttagatggcctttataaaaaaataaattaa

SEQ ID NO: 73154 - DNA, 1701 bp, Escherichia coli 180600
atgagaattgaaactgtttatattaaaggattcaggaattactgtgatgctgttattaattttaatgaaactaatttgattataggtgcaaatgatgttggaaagaccaacctattatatgccattcgattattacttgataaaagtttatctgaattagatctagaaccaaaaagcaatgactttcatgtaaattcgacaggtgaacaggttgaaaatatagaaatcactatcaagtttacagatgttagtgaagatgctgtaatatctaaattaggagggtatgttagcgatgaaggggaaacatacattaagtatcttgcttcatcattaactatggattacaagatattacttagtcatgaacataacaattttgatgaggttcctaatagattttacttaaagtgtttaagtctaaggtatataaattcgcaaagagatcttgaaaaatacattaaaattgaaaagaagcatcttttaagattggcgcaagaagttcgtagtgaaaaggatactgaaaatgatggggcggtttttactgaattaaataagctacttactgaagtaaatgaaaaagttaaaggaataagttatgttgcatcagcaacagaagagcttaacgaggaacttagaaagttatcctatactcatgatagattaactgttcaacttgatactggtgcaatagggattgaccagtttatagagaaattagaattaagtgcgaatacaaatgggaagaaactaatgcttggtggcgatgggtttaataaccaaatccttcttgcgttatggaaagcaaaaagtgttcgcgagcatgatgttgaaagtgaagtagtgatctattgtatagaggaaccggaagcacatctatttcctcaccagcaaagaaaattggcggcctatttaatcgataaacttccaggccaagcaatcgttacaagccactcaccccaaattgcagtgaattttaaacctgattcaatcataaaactatactatgatgatggagagactctagccgcaagtaatggatgttctgattgtattagctctgcatgggatggaatgggctaccggatgagtattattcctgctgaggcattttttgctaacgtggtttttttggtcgagggaccatctgaggtgattttttacactgaattagcaaaagcattaagtattgatcttgattattataacatcagcattctttctgttgatggtatccaatttgaagtttatagaaaaatattaacagctctaaatattaattggatcgtaagaacagacaatgatgcttcaaaagtacctcataagaatgaatggcaatatgctggtgtaaatagggcgttagcactgtgtggagagaataaagaaccaaactcaagtattcctatagatagtaaagctttgcatactaagtggggaaccatttcaccaataataaatcctaacggcgtttatatatctttttttgatcttgaaggagatcttgctaatgacttttcgaagcatgttcttgattatgcaagtaaggataatctagatgatgccgctgattatttgagaggaaaaaaagctatacgtatgcgtgagttaattaaagagaaaaaagcttttttaactgaactgaagagcaaagatatagccagacctctaatacatgcactgaaaattgctagaggtgaattatga

SEQ ID NO: 73155 - DNA, 1623 bp, Escherichia coli 180600
atgaagctaactaaggaacagttagatgcaattgattacgaaggtaatctggttataactgcatgcccaggaagtggtaaaacaacaatactcgtccataagattgctgcctgtttatcccattccaaggattatcagggagttgttgcgttatcatatacgaataaatccagcgaggagctaaaagccagatgtagaaaattgggagcagagttaaattctagcttctttggtactattgataagtttttcattaacgaaataatattaccttttgtaaggcaagtatggggcagaaacgaaagcgctctcgaagtagtaaagtatatagatctttctcaagaattaaaagataagacaaataagtactttgaccgagtggatttttattccaatacttcatttgagggcatgggttctctgagggatatttatttaaaggggatgttgattttagacttccttcctcacttggctttttatatagttagaacatcatattcttgtcagcggtatttaatggcaaagtatattggtttttttgtcgatgagtatcaggataccggttattttactcatcaggttttcaagttcataccaacgctagggatgcctcttattatcgttggtgatttggatcaatcaatttatttgtattctcaccgcagttcggattcactaaaagatttcatgaatgatagtggtttctgtcataaggaaattacagtaaatcacagatgtcacccatctatagtaaattacgccaatagaattaaagattttgaatgtcaactagctccgtgtgatgagatttttgtttatagaaaatgtgttgatggcaatcaaattgatatagctaaatggattggtgaaattcttgataatgtaaaaaataaattttcaatatctgataataaggagattgctatattggtaagaagcaatgcttgcgcggagctagtttctgataatttagttgtttctaatagggcttatttggataatgatttaacaaaggctggtggtaaggtttctggtcttgttaatgatttattatgttacaggtataacttaaataaaactgctcagtctattttggagggggttttgggaagcagtgtcaaaaggagcgaggctactcgtatccgtaaggctattaagcaggttagaagtgttacagatgcctttcttattgacgtaataaataaaattgtagtaactcttttagggactgaaatcgagcagcatcataagtccgctctttcagagatattagttactccgaggatgcaaaataattatttggatgttagaagtgatgaagtacaaataatgacgttacataagtctaaaggtcttgagtttgactttgtttttcatttggatctgtatgattggattttgcctaaaagagttttcatagaaggaagctatgatgttgtattcgaaaatgaacagcaatgcataaatcttcattacgtaggaattacacgagcaagaaaaggcattatgctaatgcattctacgaaacggtataatggttcaggtgatcttaagaacggggctccatctcaatttcttttgaaacctgggttagatggcctttataaaaaaataaattaa

SEQ ID NO: 73156 - DNA, 2133 bp, Escherichia coli 2860050
atgtttattaagaccctctcggtaagaaattttagaaattttaaggcaacgtctctttccttcaaaaaagaatgcgtcaatacaattgtaggtgaaaattcatcggggaaaacaaatatctttgaggcgatgagacttatacttgacgataccttgccatattataagcgatatcttgtagaaaatgactttcatcgaggactagggacagcgtttggtcattgggttataattagtttggagtttgatgaaataggtggggatgaagagtcagagttactatgtcaattaaatacaaccgttaatggtggtggaacagggcgaataacttatatttacagaccgcagttttacatcagagaacaacttttcaatttaaatgatattgaagatattgatcagcgtagaagcgcatataacatactgaaagaacaatattcgattgataagaccacgtatgaatccttagtgttatgtcaaggcacagcagattttaccgatgatggattatactctcatgtggttggtgattttaatgattgtttattccctgacccaaagttagagcggattgatttaattggtaatagacaacgtgggtataatattcaggataatatcagttgtacttatgctcgtgctttgagagatgtggtaagtgaacttaagaataatcgattcaatccatttcaaaagcttttagaatatgtttctaaaggaattgataatgatgacgcattgagcgaaaacatcaagagcgtgaatgacagaatatcatcgattgaagaggttaagaggctttctgagggcatattattatcaataactaatgctgttggtactacttactcgccagttttgaatgttacatctgaattgccctgtgagctaaaagagttggtaaaggttcttcaactcaaggctggtgactctctttgtgaaggatatgtatcagagctatcagagatgagtcttggtggcgctaatttaatttatttagctttgaaattgtatgagtacgaagaaggtatcagtaaaaatctcttagctaattttttaataatcgaagagcctgaggctcatattcatacgcacatacaaaaatctttatttagcaatctgaaaaataataaaacgcaagtttttatatctactcactcaactcatatatcatcagtatcaaatatatccactacaaatgtgcttgtaaaaaatggtcttgaaacaatttcttgctctccatctaacggattggaaaaagagaaaattaatcgcattgaaagattccttgatgccataagaacagatattctctttgccaagaatgttattctaattgaaggtgatgctgaagaaatattaatacctcatctcgttagaaatagtttcggtattacacttgacgaacttggaatatccttgatatctgtgcggggtactgggtttgaattactatcatctttatttcactcagaccgaattaaaaagaaatgtgcaattttgaccgatgacgacataaatttgtatggagataataagcctgattatttatctcaagatgattataataaagctgtgaactcagcagagtctggtgtcgctcgtaaagtaattctggatgaaatagttagaaataacgcttttattcgcgcctatttttctaagtatactttcgaaattgatttagtgctatcaggcgcggtaagatactttgatgcgatagccgctgaatcatttgagaaaaaagcatattacacaccataccaagaagcattccaatcctctgatagacaaaaaataggttgctacgctttaaagttagctaataagcataaaaaaggttggtttgcaatgatgcttgttgacaagcttgatgcagattttcctatccctaaggcactctgtcagtcgttagggttcactggtgattttaataaattcactctagcaaagatggttcgatatcgtagtgagattattaagaataaagatgggtctgatttattaaataatatattgggacaggatgatttagcatttattatagataacatagatgcagctttggacatatttaaagcacattaccctaacgatcctttaactactttgcttgaggttcatcatggatga

SEQ ID NO: 73157 - DNA, 1677 bp, Escherichia coli 2860050
atggatgatcaaaagagacaattaattaatattaaagacaatctattggtcagcgcctgccctggggctggtaaaacaaaactattgattggtatgttagaggataatttatatcgaaatgaaagttttcgttggcatattgtgttaactcacactaacgcagcagctgatgagatctctagcaggatagataatctaagtatagaggtagatagagtttggtgcgggactattcattctttttttttagagtgggttgttaaaaagtatgctggagctatatcaagattaaaagatggattttctttactttcagaatataaacaaaagaaaataatcaagagcatagaaagtgataaaaagctaggagtaagaatacgttataattgtgatgagcgaggtaacgcatttgtggaaccttattgccattcgttagatgataagcacaaagagttacttgtaattcaggagtataatgccttcaaggaaaataatagactgattgattttgatgatattattaagcttggggtggaatttcttgaaaacaatcaaaacatatgtgagcatctttccaagttaattggtaatatttatttagatgaatcacaagatacaagtctgatccagcttaaagcattgtcatatataactaggtataatcgcgtctcagtatttattgttggtgataatgaccaagccatttatcaagatcttggcgtttctataaaggataaagatataattaaatctgagctgcaattgtctgaattaaagcatgaaactttgtctggatgttatcgatcttctgaattactggttaaatattataagaaatattctgcttcgcgaaatgatgttacttctctgcgtgaatttgaggggaagtctccaataatcaaagatatttctcaagatgaattgccacaaagggtgtttaatttaataaatcaataccaagcaaaatataatagcgtttccggtattgctattataggacctgataagtactatcttatggcgctaataaatgctttatatgacctttcagaaaacttcgtttatgattttcaatcaacaaatcccctatattgtgctaggaatactgtattttacgagttgataagtttggttgttttggatgtaaatgttattaactaccaaagaagaagttctcttgcaaggaaaattgttgattctgttcctgaattgagtcatttgacgccattacaacttaagcgtgatttaaaagagtttcagtcagtaaaaaataattttatattgtggttgagggagttatatgattttttagaaatgaagtatcagaaatccattaaacttgagacagattacaaaatatgtaatgcagcagcatctgtggcaaaaatcagggctggtatgggcgcaattagtaagatgattaacaaagacaaaaatgttgtctctgtatctactatacatggttcgaagggggaggaatatgattatgtaatctctattgggtatcatgatcaggtggtgcctcataaatcatcttttgaaaaaggaaatgaatatgctcgcgatattgctaatagattaatgtacgtggctttttctagagctaagaattatatgaatatattcatagatgatcgaagaaaagttagtcctttctttattagagaacctgactaa

SEQ ID NO: 73158 - DNA, 1701 bp, Escherichia coli P0304777.1; identical to SEQ ID NO: 73154

SEQ ID NO: 73159 - DNA, 1623 bp, Escherichia coli P0304777.1; identical to SEQ ID NO: 73155

SEQ ID NO: 73160 - DNA, 1785 bp, Escherichia coli Envira 10/1
atgcggatttcccgaatccggttaattaatttcgccaacttctccgatgttgatgttgaaacgggtgagagtattgttattgttggtgaaaacaaggttggcaagagcaattttattcgcggcctgcagctgattcttgacccagggttgtctgagcgtgaccgtcaactgggttttgaacatttttgggatggattgggcgaagacaaactgggggagaccatcgaaatttcagtggatcttactgagttcactgacgatccccgattgatggctcatctgaatgactgtgtcctaaatccggggcctccgatggtggcccgtcttacctaccgctttcagcccaaaaccgcgttaaatcgagctcctgaatcgttaaaagattatgagtatgtgatcttcggtggagctgatcctgacatgcatattggtggtgcctttcgccgtatgttgcccattgatgttcaaggcgcgttgcgtgatgccgagaaggacctttcaagctggcgtaattcacccttaagaccgcttattgaagaactgtccgcatctctggacgacgagactcgtgaggagattcaaacccaagttgatgaggctcagcgggaactggctgatcatgatgaggtggcagcgacagccgaacgaattagcgaaaggttgatagctatcgcaggtgagcaacatgccgttccggtatcgctcggacttgcaccgactcgcgttgatgcgctgctacgtagcctgcgtttgctgcttgatagtggcattcgtggcattggcgatgccagtctggggacagctaatctgatttttcttgccctaaaaagcctcgaacttgatcgtcttgttaatgacggagaacgagaccatacgtttttcgtagtcgaggagccggaagcgcacctacatccgcacgtacagcgcctggtttaccgttatttcctagggactgacggagacaatggtgatgaaggaacaccgttgacaacgatcctgaccacccattccccgcatatcgccagcgtcacaccaatcagatccatcgttttgctgcgccatgatccggagggagggaagacgattgcggtttcaacggcaaacgcaccgtttacgccgcgggacgaagatgatctgcagcgctatatcgatgtcactcgcggcgaaatattcttttcacgtggggtgatcttggtggaaggggatgctgaacgctttcttgtcccagcattcgctgatgctcttaatattcccctagatatgcttgggatcacggtgtgctcgatcggtggaacaaatttcactccgtatgtgaagctcctagggccgcggggactcaatattccacatgtgattctgacagaccgcgatcctgaggaggatggagagccgctggttcgtaagagatttatcaatatcttagacgtgcttgagagcgatgttgatcatgatgatatgactaccgaggaggtgattgcacgtgccggagattttggatgcttcgtcaatgagaccactctggagccagagctgtttaccggtggactgggcgaagccatgaagttggttatcgagcaggaattgtctcctagacgagctactctgaacaggatacaggcgtgggtggatgacacggaccagcttgataatgtccggttgttgaaactgattgagcgaattggcaaagggcggttcgcccaagcgctggcaccctcggtgtcggaggatgtatgcccggattacattcgtgaagcactggagtatatctgcgatgccgtcacgtag

SEQ ID NO: 73161 - DNA, 1818 bp, Escherichia coli Envira 10/1
atgccgtcacgtagtgtcagtgcagcctacttagctcaggctgccgagctggccgggaatccgggccagttatccgcgtatcactcccagggacactgcgtggtgctcgcgggcccggggagtggtaagacaaagacgcttgtgctgaagctggcacgaatcctagctgaggatgttcaagctccacgtggtgcggcatgtatcacatatagccaagaatgcgcacgcgagctaacccgtcgtctcgaagcgctggggcttagagaggcaccgaatctctttattggaaccgttcatgggttctgcttgcgccatctgttgatgccctatgggcgactggccgatctgccaatcccatttccgctgtcagtagcgtctcagcgcgagagcgaacggttacttcgacaatctggtgaccgtctctttggcgcaaaccatccctataaggctattgatctcggacggcatcgccgttcggtgttgaatcgcaacagcgttgcctggcgtacagaggaggaactcgctgcatgggccgaggcctacgaagctgcattgcggcagcaagggctgatagactacgacgatatggtgatatttggtcagcgtctgataattgagcatgattgggttctgcccctagtacaggcgaaatttccgatccttgcggtagatgaatatcaagatttgggcgtggcactccatcgtatggtcaaacgtctggctttcgagggaggcgtacgcttatttgcagtgggtgatgcagaccaatctatttacggtttcactggtgccgatggtgcgttactactagaactggcaggcaggagagacgttgaaacagtccggctccagttgaactatagatcaggagcggacatcgtgaatgcatcggagatggtgttgggtgaggttcgtggttatcgcgcaaacgacccaaaccgccagacaaccattgcgttccagctgtgtccggatggcttgggggatcaggctgtctatgctgtcgagcagattattcctgctgcgttggctgctaagccgggccgaacactgggtgatatcgccattctgtacaaggactaccgtgccggcgatgttgtggccgatgcggtgacagctagcggttttgattacattcgtgtggataccgcagcaccttatcgcaaagttgccttgacgagctgggtggaggattgcgcagcatggtgtgctggcggttggcgtatcgggcgccctcaactgcgcggacttatagaccgttatctggcatttcatcgggcaaggctggatgatgcatgcgcccggagtaaggggcaggagttaaccaggctactttgggcacttcgtgccgaccaacattctgcatccgattttgtcgcgtcgttgcgcaacggtctcgttgattccctgctggcaactgaaccaacgctttctgatcaggctgagcaactagatcgcatgactgcagcacttgccgaaggcggtgcgttagcgatgttggatatcacgagcctaggtggtcgtgacggttcacctgagcacctcaatttgctgacacttcactcagccaaaggttgcgaatatgacgtggttatcatggtcggcttagatctggggaatttgccgtggcgtaatgagacgccagagaagctgcgtgaaagccgacgtcttttctatgtggggctgacccgcgcacgggacgaggtgcatatgctgtattccggttttgttgatggtcgctacggccctatgcgtctagggcgttccccatttctggatgaactggaggagcgaatgagaggggcaggtttaaggtag

SEQ ID NO: 73162 - DNA, 1785 bp, Escherichia coli Envira 8/11; identical to SEQ ID NO: 73160

SEQ ID NO: 73163 - DNA, 1818 bp, Escherichia coli Envira 8/11; identical to SEQ ID NO: 73161

SEQ ID NO: 73164 - DNA, 1701 bp, Escherichia coli Jurua 18/11; identical to SEQ ID NO: 73154

SEQ ID NO: 73165 - DNA, 1623 bp, Escherichia coli Jurua 18/11; identical to SEQ ID NO: 73155

SEQ ID NO: 73166 - DNA, 1701 bp, Escherichia coli 199900.1; identical to SEQ ID NO: 73154

SEQ ID NO: 73167 - DNA, 1623 bp, Escherichia coli 199900.1; identical to SEQ ID NO: 73155

SEQ ID NO: 73168 - DNA, 1980 bp, Escherichia coli P0299917.10
atgaaaattacacaaatggagatcaaaggctttaagagctttgataatgtagggcaaactataaatataaattcatttaccagcttaattggagggaatggaacaggtaaaacggctgttctcctcgcattgacaaggatgtttggtgtcaaaagctccgaaagaattattcaagttgatgatttttatgttcctcctggagatgaaatcgatactcaagatgaaagagagctatcagttcgtgtaaaattcgaatttgcagacctaaaagacggtgaggacgattcggttgcagatttctttaagcatttaatttcaagtgaagcaggagagatcccattctgtatagcaaaattaaaagcaaaatggacaaagactaatcttgctgaaggcgatatagaaagcgagctggtatgggaaataggggagtctgaaaaaaatataacggcatatgaaagatcaaaaattcatgtccactatgtccctgcttaccgagatccggcccaacaactgaagcaaacagccggaaccatcatgcaccgtctgataaatgcagtcgaatggtctgaacaaatgggggcaacagttgatgaggttgctgtttcaatcggaaatcagttccaagaagaagtcggagtccagacaataacatcttcattaggcagaaattggaaatcccttttcactggtggttacttcgaagaactccaaattaagccagtagtaaatggtattgaagatgtattaaaacatatcgacactgtgtttttaccaagtccagatactcaaccattgccaactgaaagattgagtgatggtatgaaatcattattttatttatctttagttaaatctgcatttgatattgaagatgagataataaattctgatggcaaacaattatcgatatcagtagaagcattagaccctccaaatttaacgataatattaatagaagaacccgaaaaccacctttcaccacaatacttaggaagaatagttaagctgtgtgaagagatatcagaaaatgatcgagcacaagttgttttgacaacacatgcaccatctttacttaatcgggtcgaacctgagaatataagatatttccgtcttaatgataataaaaacacagttgtcaaggaaatattattaccaagcgatgatgaagatgatgcagacaatgttgatactttcacatatgttaaggaagctgtaaaagcatatccggaaatttattttgcaaaagttgtcattcttggtgaaggtgacagcgaagagattgttataccgaaaatagcacaagtaaatggaattgaacttgatacttcattaataacatttgcgccattaggtgggcgatatgttaatcatttctggaaacttttaaatgagctttcaattcctcatgtaactcttcttgattacgatttcagaagaggcggcggtggatggggaagaataaaatatatcattaaccaattgcttaaagtcggatgtgatgaagatatagtacttcaaacagaaggaggcaaactcactttaaaagaacttaatggaatgcatgaatggaaagaaaacgagaaagatgaaaagtcatggatagattttttcgaaacctacaatgtttatttttcatatccatatgatttagattggataatgttaaattcattcccaacaagctaccattcttttattcctgataatggtggcccaaaaatcctcccaaaaactgatgctcagtatattgataaaacaaaaaatgctatcgcttcagtattgaagaaagatgctgaagatatagatatcgattcttttgaggatcatgaggaatattattggtatcgatatttattccttggcagaggtaaacctctctctcataactatgttttgaagaaactcgataacaattcattgaaaaataatgcaccagatgtattgaaaaatttgatcgaaaaagtgagggggcttctctaa

SEQ ID NO: 73169 - DNA, 1848 bp, Escherichia coli P0299917.10
atgacaataataaaagatgatgattgggttcttaaagacattcaagaagttgaagaagaagctatgagggtaataagaaacagtgcagaacataatctcgttcttgctggccctggagcaggtaaaacagaattgttagcacagaaagcatgttttttaattgaaacaggaaagtgtagaagcaaaaaaataattgcattatctttcaaaaaggatgcggccaaaaatcttcaagatagagtaaactcacggcttgattcaaaatataggcacaaatttgaatcaacaacatttgatgcattctgtaaaagtattgttgatcgctttaaaagcactattccggaatcttatcgtccatcaaatgactatgaaataatctttccaaataataatgatttagttgaagaaattaaaagagaggccgtaggctttgaaggattaacatctgaagaattaaataaattacaaccttataattttgaagagaattatatagtaactccttatgataaagcattagaacattctgttgatggcaggataagacggtttgtgtggttacacttattaaaaccaaaatcaaggctttcattcaagatgattaattttcttgctaattatattattagtaggaaccaatatttatctaatgctataaattcaacatatgactatgcttttatcgatgagtttcaggacacaacatataggcaatatgagatttttaagagcattttcttgggtaaaaaaataaaaataacagcagtcggtgatacaaaacaaagaataatgggttgggcaggtgcaatgcacaatgcttttgatgtgtttaaaaaagattttggaatcgaacaacctaatgaattagttagtaatagaaggtcattaaaaaacctcataaattatcaacgcatgatggaagctttcatgaatcatgctgatataaagcctgatatgatgttgattgaaaatgaaggttcagctaagttactacaatttgacgaaagtagtattgaaggggcatatatagcattatgtatccagcaatggattgctgaaggggtaaatgaaagagatatatgtatactgctaagaaacccggctaaacaatatacagacgatatcatttcagcattgcaatatttgaaaatacaatgtcgccttgagaacgagtatcaggatcttttaaatgaagctgtagtacagttacttttacaaatgctaatgtttgtctgtaatagaaaatccatagaaagctgggccactacaatggagcttctatgtaatataagaggagtaagtaaaagaggtgatgttacacggttagaaaaagaacttagccagtttattaaatctcatcgggtaattaaagaagaaattgtcgattatttatattcattattaagtatatttggtgtcgataaaataaagtcttactttccgcagtatatgagtgggaatggtttagaatatagcatagagttactttctcgccacctcgataagttagatgtaaaagaaaacacatcagaagccattgatttattacttggtaataaaacgatacctcttatgaccatccataaaagtaaagggttagagttcaggaaggtcatcgttgtgggtcttgaacctggtgcctattttggtaaagaagaagagcaaatagaaaatcaaaaaacagtctttgtggcattttcaagagccattgaagaagtattaatgactcgttgtaaaataagaaacaatagttatggcaggtctttcaagcagaattttaatgatataccgttaataacaaacatgataacttattgtggtatagaggctgagagctatccaggttga

SEQ ID NO: 73170 - DNA, 1965 bp, Escherichia coli P0299917.2
atggagatcaaaggctttaagagctttgataatgtagggcaaactataaatataaattcatttaccagcttaattggagggaatggaacaggtaaaacggctgttctcctcgcattgacaaggatgtttggtgtcaaaagctccgaaagaattattcaagttgatgatttttatgttcctcctggagatgaaatcgatactcaagatgaaagagagctatcagttcgtgtaaaattcgaatttgcagacctaaaagacggtgaggacgattcggttgcagatttctttaagcatttaatttcaagtgaagcaggagagatcccattctgtatagcaaaattaaaagcaaaatggacaaagactaatcttgctgaaggcgatatagaaagcgagctggtatgggaaataggggagtctgaaaaaaatataacggcatatgaaagatcaaaaattcatgtccactatgtccctgcttaccgagatccggcccaacaactgaagcaaacagccggaaccatcatgcaccgtctgataaatgcagtcgaatggtctgaacaaatgggggcaacagttgatgaggttgctgtttcaatcggaaatcagttccaagaagaagtcggagtccagacaataacatcttcattaggcagaaattggaaatcccttttcactggtggttacttcgaagaactccaaattaagccagtagtaaatggtattgaagatgtattaaaacatatcgacactgtgtttttaccaagtccagatactcaaccattgccaactgaaagattgagtgatggtatgaaatcattattttatttatctttagttaaatctgcatttgatattgaagatgagataataaattctgatggcaaacaattatcgatatcagtagaagcattagaccctccaaatttaacgataatattaatagaagaacccgaaaaccacctttcaccacaatacttaggaagaatagttaagctgtgtgaagagatatcagaaaatgatcgagcacaagttgttttgacaacacatgcaccatctttacttaatcgggtcgaacctgagaatataagatatttccgtcttaatgataataaaaacacagttgtcaaggaaatattattaccaagcgatgatgaagatgatgcagacaatgttgatactttcacatatgttaaggaagctgtaaaagcatatccggaaatttattttgcaaaagttgtcattcttggtgaaggtgacagcgaagagattgttataccgaaaatagcacaagtaaatggaattgaacttgatacttcattaataacatttgcgccattaggtgggcgatatgttaatcatttctggaaacttttaaatgagctttcaattcctcatgtaactcttcttgattacgatttcagaagaggcggcggtggatggggaagaataaaatatatcattaaccaattgcttaaagtcggatgtgatgaagatatagtacttcaaacagaaggaggcaaactcactttaaaagaacttaatggaatgcatgaatggaaagaaaacgagaaagatgaaaagtcatggatagattttttcgaaacctacaatgtttatttttcatatccatatgatttagattggataatgttaaattcattcccaacaagctaccattcttttattcctgataatggtggcccaaaaatcctcccaaaaactgatgctcagtatattgataaaacaaaaaatgctatcgcttcagtattgaagaaagatgctgaagatatagatatcgattcttttgaggatcatgaggaatattattggtatcgatatttattccttggcagaggtaaacctctctctcataactatgttttgaagaaactcgataacaattcattgaaaaataatgcaccagatgtattgaaaaatttgatcgaaaaagtgagggggcttctctaa

SEQ ID NO: 73171 - DNA, 1848 bp, Escherichia coli P0299917.2; identical to SEQ ID NO: 73169

SEQ ID NO: 73172 - DNA, 1980 bp, Escherichia coli P0299917.4; identical to SEQ ID NO: 73168

SEQ ID NO: 73173 - DNA, 1848 bp, Escherichia coli P0299917.4; identical to SEQ ID NO: 73169

SEQ ID NO: 73174 - DNA, 1980 bp, Escherichia coli P0299917.5; identical to SEQ ID NO: 73168

SEQ ID NO: 73175 - DNA, 1848 bp, Escherichia coli P0299917.5
atgacaataataaaagatgatgattgggttcttaaagacattcaagaagttgaagaagaagctatgagggtaataagaaacagtgcagaacataatctcgttcttgctggccctggagcaggtaaaacagaattgttagcacagaaagcatgttttttaattgaaacaggaaagtgtagaagcaaaaaaataattgcattatctttcaaaaaggatgcggccaaaaatcttcaagatagagtaaactcacggcttgattcaaaatataggcacaaatttgaatcaacaacatttgatgcattctgtaaaagtattgttgatcgctttaaaagcactattccggaatcttatcgtccatcaaatgactatgaaataatctttccaaataataatgatttagttgaagaaattaaaagagaggccgtaggctttgaaggattaacatctgaagaattaaataaattacaaccttataattttgaagagaattatatagtaactccttatgataaagcattagaacattctgttgatggcaggataagacggtttgtgtggttacacttattaaaaccaaaatcaaggctttcattcaagatgattaattttcttgctaattatattattagtaggaaccaatatttatctaatgctataaattcaacatatgactatgcttttatcgatgagtttcaggacacaacatataggcaatatgagatttttaagagcattttcttgggtaaaaaaataaaaataacagcagtcggtgatacaaaacaaagaataatgggttgggcaggtgcaatgcacaatgcttttgatgtgtttaaaaaagattttggaatcgaacaacctaatgaattagttagtaatagaaggtcattaaaaaacctcataaattatcaacgcatgatggaagctttcatgaatcatgctgatataaagcctgatatgatgttgattgaaaatgaaggttcagctaagttactacaatttgacgaaagtagtattgaaggggcatatatagcattatgtatccagcaatggattgctgaaggggtaaatgaaagagatatatgtatactgctaagaaacccggctaaacaatatacagacgatatcatttcagcattgcaatatttgaaaatacaatgtcgccttgagaacgagtatcaggatcttttaaatgaagctgtagtacagttacttttacaaatgctaatgtttgtctgtaatagaaaatccatagaaagctgggccactacaatggagcttctatgtaatataagaggagtaagtaaaagaggtgatgttacacggttagaaaaagaacttagccagtttattaaatctcatcgggtaattaaagaagaaattgtcgattatttatattcattattaagtatatttggtgtcgataaaataaagtcttactttccgcagtatatgagtgggaatggtttagaatatagcatagagttactttctcgccacctcgataagttagatgtaaaagaaaacacatcagaagccattgatttattacttggtaataaaacgatacctcttatgaccatccataaaagtaaagggttagagttcaggaaggtcatcgttgtgggtcttgaacctggtgcctattttggtaaagaagaagagcaaatagaaaatcaaaaaacagtctttgtggcattttcaagagccattgaagaagtattaatgactcgttgtaaaataagaaacaatagttatggcagggctttcaagcagaattttaatgatataccgttaataacaaacatgataacttattgtggtatagaggctgagagctatccaggttga

SEQ ID NO: 73176 - DNA, 1965 bp, Escherichia coli P0299917.6; identical to SEQ ID NO: 73170

SEQ ID NO: 73177 - DNA, 1848 bp, Escherichia coli P0299917.6; identical to SEQ ID NO: 73175

SEQ ID NO: 73178 - DNA, 1980 bp, Escherichia coli P0299917.7; identical to SEQ ID NO: 73168

SEQ ID NO: 73179 - DNA, 1848 bp, Escherichia coli P0299917.7; identical to SEQ ID NO: 73175

SEQ ID NO: 73180 - DNA, 1980 bp, Escherichia coli P0299917.9; identical to SEQ ID NO: 73168

SEQ ID NO: 73181 - DNA, 1848 bp, Escherichia coli P0299917.9; identical to SEQ ID NO: 73169

SEQ ID NO: 73182 - DNA, 1701 bp, Escherichia coli P0304777.10; identical to SEQ ID NO: 73154

SEQ ID NO: 73183 - DNA, 1623 bp, Escherichia coli P0304777.10; identical to SEQ ID NO: 73155

SEQ ID NO: 73184 - DNA, 1701 bp, Escherichia coli P0304777.11; identical to SEQ ID NO: 73154

SEQ ID NO: 73185 - DNA, 1623 bp, Escherichia coli P0304777.11; identical to SEQ ID NO: 73155

SEQ ID NO: 73186 - DNA, 1701 bp, Escherichia coli P0304777.12; identical to SEQ ID NO: 73154

SEQ ID NO: 73187 - DNA, 1623 bp, Escherichia coli P0304777.12; identical to SEQ ID NO: 73155

SEQ ID NO: 73188 - DNA, 1701 bp, Escherichia coli P0304777.13; identical to SEQ ID NO: 73154

SEQ ID NO: 73189 - DNA, 1623 bp, Escherichia coli P0304777.13; identical to SEQ ID NO: 73155

SEQ ID NO: 73190 - DNA, 1701 bp, Escherichia coli P0304777.14; identical to SEQ ID NO: 73154

SEQ ID NO: 73191 - DNA, 1623 bp, Escherichia coli P0304777.14; identical to SEQ ID NO: 73155

SEQ ID NO: 73192 - DNA, 1701 bp, Escherichia coli P0304777.15; identical to SEQ ID NO: 73154

SEQ ID NO: 73193 - DNA, 1623 bp, Escherichia coli P0304777.15; identical to SEQ ID NO: 73155

SEQ ID NO: 73194 - DNA, 1701 bp, Escherichia coli P0304777.3; identical to SEQ ID NO: 73154

SEQ ID NO: 73195 - DNA, 1623 bp, Escherichia coli P0304777.3; identical to SEQ ID NO: 73155

SEQ ID NO: 73196 - DNA, 1701 bp, Escherichia coli P0304777.4; identical to SEQ ID NO: 73154

SEQ ID NO: 73197 - DNA, 1623 bp, Escherichia coli P0304777.4; identical to SEQ ID NO: 73155

SEQ ID NO: 73198 - DNA, 1701 bp, Escherichia coli P0304777.7; identical to SEQ ID NO: 73154

SEQ ID NO: 73199 - DNA, 1623 bp, Escherichia coli P0304777.7; identical to SEQ ID NO: 73155

SEQ ID NO: 73200 - DNA, 1292 bp, Escherichia coli P0304777.9
gtttaagtctaaggtatataaattcgcaaagagatcttgaaaaatacattaaaattgaaaagaagcatcttttaagattggcgcaagaagttcgtagtgaaaaggatactgaaaatgatggggcggtttttactgaattaaataagctacttactgaagtaaatgaaaaagttaaaggaataagttatgttgcatcagcaacagaagagcttaacgaggaacttagaaagttatcctatactcatgatagattaactgttcaacttgatactggtgcaatagggattgaccagtttatagagaaattagaattaagtgcgaatacaaatgggaagaaactaatgcttggtggcgatgggtttaataaccaaatccttcttgcgttatggaaagcaaaaagtgttcgcgagcatgatgttgaaagtgaagtagtgatctattgtatagaggaaccggaagcacatctatttcctcaccagcaaagaaaattggcggcctatttaatcgataaacttccaggccaagcaatcgttacaagccactcaccccaaattgcagtgaattttaaacctgattcaatcataaaactatactatgatgatggagagactctagccgcaagtaatggatgttctgattgtattagctctgcatgggatggaatgggctaccggatgagtattattcctgctgaggcattttttgctaacgtggtttttttggtcgagggaccatctgaggtgattttttacactgaattagcaaaagcattaagtattgatcttgattattataacatcagcattctttctgttgatggtatccaatttgaagtttatagaaaaatattaacagctctaaatattaattggatcgtaagaacagacaatgatgcttcaaaagtacctcataagaatgaatggcaatatgctggtgtaaatagggcgttagcactgtgtggagagaataaagaaccaaactcaagtattcctatagatagtaaagctttgcatactaagtggggaaccatttcaccaataataaatcctaacggcgtttatatatctttttttgatcttgaaggagatcttgctaatgacttttcgaagcatgttcttgattatgcaagtaaggataatctagatgatgccgctgattatttgagaggaaaaaaagctatacgtatgcgtgagttaattaaagagaaaaaagcttttttaactgaactgaagagcaaagatatagccagacctctaatacatgcactgaaaattgctagaggtgaattatga

SEQ ID NO: 73201 - DNA, 1623 bp, Escherichia coli P0304777.9; identical to SEQ ID NO: 73155

SEQ ID NO: 73202 - DNA, 1980 bp, Escherichia coli P0299917.8; identical to SEQ ID NO: 73168

SEQ ID NO: 73203 - DNA, 1848 bp, Escherichia coli P0299917.8; identical to SEQ ID NO: 73169

SEQ ID NO: 73204 - DNA, 2346 bp, Mesorhizobium sp. STM 4661
atgcatatcgagtttgttgagatttcgaatttccgtaagttgatctcgactcgcgttggactatcgaagaaaacaacggtctttgtcggagccaacaacagcggaaaaacgtcggcgattacagcgcttcgatacttcctcgttcaacgggagaagaataatttcgcattcaacgacttcactctgacccattggcccaccatcaatacgatgggcttggcttgggagcaggcactggtggcacagaaaccgttgcctgacccggattggggtgcggtgctgccatcagtggatatctggctcgatgtccccgaaactgagctgcactacgtgcaaccactgcttcccacactcgaatgggtcgcgggccgtttgggcgttcgcgtccgttatgagccgagcgacgccaagcagcttcggatggattacgtctcggcacgcggggacgtcctagcactccagaaggaagcagcggcactcgccggggaagcgggcgcagccgtgcctgctttcgaggtcaagctgtggcctgaaaacctggtcgattttctccaacggcggcttacaagctatttcacccatagatactacgtgttggatccggaggccatcgcagatccggtgcacggggtagcccagcctcagcagcttaacggcaatgagccaatcgaaggagatcccttcaaggggctcattcgcatcgacgagatcagtgctcagaggggcttcggaaacggggaagacggttttgaggatgacaaggctgcaacggcttccggttctcggaagctgtccacccagctgcgccagtattacgcccaccaccttgatccgtatgaaaaaccggacgcgaaagacctgcacgcgctaagggcgatcgagcaggcccagcaagcttttgacggtcgcctgaccgacgggtttgaaagtccactcaaggaaatgcatacgctaggatatccgggtgtaactgatccaagattgaatatctccacacgattgcgaccagtggaggggcttaatcatgaggccgcagtgcgtttcgagatcgcggtccatgatggagagaaacacgttaatctccatctgccggaagaatcgaacggtctcggatatcaaaatctcatatcgatggtttttcgcttaatggcgtttcgcgacagctggatgaaggtcggcaaagcgaaggcaaaggggggggatgaaacggttatcgcgcccctgcatttagtccttatcgaagaacccgaggtgcatctccatacgcaggtccagcaggtcttcattcgccaggcgtacaagatcctccgcaatcacgacgagcttggggccaaagaacctttccgcacccagatggtggtaagcacacattcgagccacgtcgctcacgaatgcgagttcgactcgctcagatatttccggcgtctgccgggagatgccacgagtattccgacctcctgtgtcctgaacctcaacgatgcattcggcggcgatcctgagacaaaacgtttcgtcacccgctaccttaaggtgacgcactgcgatctcctctttgccgatgcggccattttcattgaggggccagccgaacgcattctcgttcctcattttgtgaacgagcatgctgaattcaccaagctgtccgagagctacatcacctggctagaaatcggcggaagccacgcccaccgcatgaggtcactggtcgagcgaattggcctgacaacacttatcatcaccgatctcgactcttgcgatgctgacggaaaggtcgcagtaccggttaggggccagaactatacctcccgcaatcagacccttcgaacctggtgtccggctgccactctcctcgatgagcttctggacaagcctgacgcggacaaaattctgacctacaccgatgagcgcttcgcgatttgcgtggcttaccaaagtccggtgcaaatcactttcaaaggcacggcggcagaagcgctggcctacacgcttgaagattcgatcgtctatgcgaatttgcccctcttagctggcctcgatggcacaggtctcattgcaaaattccgcacagccatcaccgacagcgcagatagtgctgctttggcggtagccctgaaagagcatttgaaggaagggaacaaagcggagttcgcattagacctgcttgagattgaaaacccaatcgccctcgctccaccaccgtacatccgtgttgggcttctatggctggccaaacagcttgaacacaagcagcttgaactcggcatcgtgaaagtgatcgaaaatccccttccgatcgaaaatccccttccagcagcaggaaatgaaattgccggagtggcggcatga

SEQ ID NO: 73205 - DNA, 1902 bp, Mesorhizobium sp. STM 4661
atgacagagctggtacaatccaactccaacatgagtatggacgatcatgttgatgggacgattgccgatgcccttcggttggacgatcccaagagctttttcctctttgccggggccggttccggtaaaacccggacgctggtgaaagcgctccaacacattcgcgaaaagtttcgcgaaaagcttcgcctgcgtggccgccaggtcgcggtgatcacatacacgaacgctgcctgtgacgagatcatccggcgaacggaatatgatcctcttttggttgtccggaccatccacagttttgcctggcagcagatccaaggcctcaacgccgatatacgaacatggctgcgcgacgcgctccggcgccaaatccttgaacttcaggaagaggaggttaaaggccggcctggcacaaaggcgtccatatcccgcctcgcgcagatcgagtccaagggacatcgtcttgatcgtttggatcaaatcaaaacattcacctacaaccccaacggtgacaatcgagaacgaaatgcgctgaaccacagcgaagtgatcaagattttctcgtcgttcctgcagaccaagccactgatgcaacggcttcttgtcgaaaagttccccttccttttcatcgacgaaagccaagacacccacggcgccctcgtggatgcattactcagcgttcagcaggcacacaaagagcgtttcagccttggtttgatcggcgacacgatgcagcgcatctacgctgacggaaaagaccgtatcgaggatgaaatccccgcaggctgggcagtcccagcaaaaaaactcaatcatcgcagtccaaaacgtgtcgttcgtttgatcaaccagatccgctcgtcagcggacgtacatacccaagagccgcgggacgacgcgatcgaggggtgggctcgcctcttcgtattccccacaggcaccgacaacaaacccgcgctggagcagaaaatccgggaatacatggcggagatcaccagcgatctgctttggaaaagaattgatgattgcaaaatcttgacgctcgaacaccacatggcagcgcgccggatgggtttcgaacggatgtttgaggcgttggcatccgtcgacgaatttcgcaccagtttcctggatggcactttcggtcccgcccgcctcttcactcactgcgtgctgccgttggtcactgctcaaaaaaagagagacaagtttgcagccacgagagtcctacgggaactgtcgccgttgctcagcaaggacagtttaaaggcttcgcaaaaaccggcggaccaattggctgcagctcagacagcgatcaacaaccttatggggctatgggaggctggtgaaccatcctgcggccaagtgctggagagcatatccgcaacgaaacttttcgacgtacccgaaaggctcaaagcagcactcgcggtacgaatgacctcaatggagaatgtgaaggcggaagacgagagggccgacccgccaagtgaggatatggcggcgctgctggagttccttgagtgcccattctcaatgatcgaaccgtacgccgcctatgttgcgcatgaagcgtcttacgacacgcaccaaggcgtgaagggactcgaatttgatcgcgtcatggtcctaatggacgacagcgaagcacggggctttatgtttggctacgaaaagctgctcggcgccaaggctcccacgcctggtgaccttaagagccagcaggagggcaaagacaattccatcgagcgaacgcgacgccttttttacgtaacatgcagccgcgctaagaggagtttggcattggttgcctatacagaaaacccggccgcggtgagggcgcacgtgttggctaaccgctggtttgatgtaggtgaagtactgcttgcgcttccagattag

SEQ ID NO: 73206 - DNA, 2091 bp, Lactobacillus brevis KB290
gtgtttctaaaaactgttaaactgtatgattttcgaaaatttgtttctcgggtgaatggggaacctggattgatagtaaaatttcatccgggcttgaatatcattgtcggtgaaaatgattcaggtaaaactgcagttatcgatgcaattaaaatgttgcttggaacagttagcgatgatcgaaccagtattcaagacgaggatttctattttgacgggaccgagttttcaaatgattttaagattgaggctgtattttgtagtctcaacaagtacgaggctggaacttttctagagtggctgtcgtttgacgataataatgaatatgagttacatgtaaaactaacagttgagcgcaaaacgagtgaagctggacgtcaatatttagatcgaaatctagtcgcaggagatgaaggtgcagaatcttcgttagcaagtggggcacgagtatacttacgtgttacatacttgaaagctctgagaaatgcaacagatgaattaactcctggctttcgctcacatctgccacaattacttgcagcacactcggagtttcgaaatcacccagaacataaattaaaacttgtccaagcgttggaggaagccaacgcaataatagaggaatatctctcagatggctttccaagtgaatcgaatccacctaaagataacgatcatctttctgataataatttggaaaaacaatcaattaataaagaacttcattcggtattgaggcagttatttgatagtcaagatcaggataaaagtgacacgcgctttcaactaacacaagttacacttgatcaaatattcaaacagctaagtttaagttcagaaagcgtcaatttgggattggggaacttgaacctgttgtacatttcgaccgagttagcgctgctaaaggatcattcaagttcagtggtttatggtccaaacattatgcttatagaggaattagaggcgcacttgcacgtgcaggctcagatacgactaattaaatacatcgagcgctatattctaagcacagaggataattcatctcagcagtttatattgacttcacatagtgttgcactgaccgcatcgatagatcaaagatcgctgatatatatgaacgctaataaagcctattcgatggcacctgaggacaccatgcttaaggaagctgattatgattttttgaatcgatttttagatgcaacaaagagtaacctattctttgcaaaaggaattattttggtggagggatatgcggaaaatattttattaccagccctggcagatttaataaatttaccgttacatcgttctggtatctcaattgtaaacgttggagggacaagctttaatcaatatattaaactgttttctcaaaaaggaaaatcagaaaaaattggtatccctatctctataattacagattcagatattaatccgactgtgtatggtatcgattcagagagcgctgaaaaaatccaggagttgattagtggccctagcgatttgagtgttggcttgttcggagaggagtatgcgacttttgctaaattagtagatgcttttaaactaagatttgaaaatactaaaattaaggatttaattattcaagtaaaaaaattccgatctgattctgactgggccagtaagacagcagaaaggcaagagtgtctcaatcaaaaatacgaagaatttagtgccaatagtaaagtattcatgtcgccattatggactttggagtacagtcttttgcgtagctctttgcgtcatcttacgattcaagcgatagctgaaacacaattcgttagagaagataatcgggaaaaatttattaaaaaatttgaagaagattataaaacaagtccgaataaggctgcatacaatgcgtatgcagccttgaacaaaggctcggtttcaaaaacacaggttagtgaacaattagcaaaactaattatgggtcttagtcaagatgaaaaggaagaactgaaaaataaaattattggcgatacaacacattcacaaaatgaagaatgcaagtatttaattaatgcgattaagtttgcaagtgggcaggaggttgaacaagattga

SEQ ID NO: 73207 - DNA, 1788 bp, Lactobacillus brevis KB290
ttgaacttgatgcaaattgaaagcatattgttgcacggtgcgcattttacagcggaacagcgagaagttattcaagcaataggacgaattgacgtcgtagctggacctggatcaggtaaaacaaccgtattagcagcgaaggtgttaaggttattgaccactcgcaactacgaagataaaggcatctgctgcattacacataccaatgttgctgtaaaagagattttagcacggttgaagctggctggtgtggatgaaattgaatatccaaattttgtaggaactattcaaagcttcatggataaatttttaggtaaaactgcatttgccgcggtcctaccaggtgtgacgcttaagcttttagatgatgaaaagttctatgaaaagtatgataaaaattttaggagaattgttcaggactatcgttcagattggaacgtacctaagccgtccaacaatggctgcaagctagtaattttagatgacggatcattttattacactaacagacaccagaatcagcgttgtcaatatgccattaattgtgcatgcgaatggctgttaagagatggctatgtttcatattctgatctcaaatcattgtcttattggtatctaagtaaacatagagacgagttgagcgtggcatttgaggaacgattttcatacttaatgatcgatgaagctcaagataccgattggattcagtttgccattataaatggtctggctaatggcaaacagttgaatgtacaaagatttggagatccgtatcaagcattatatactatctatggatccgagacagaggactcttggaacccgagacccgataacgaattctaccagactaaagaaatcgctgaaactacaaggtttggcagtttaattgctgctgtagttagacatgtttgtgtccaggaatatgaacaattccattcgaatcgagaactaaatttctttccgaagtattttatgacatatgaaactggagacgagctcaaggaaaagcacactcggctgatcgaagaagcagccagttcaaatccagattttcgtatattgcagaaaccagatgccattgtcggaataatgcacagtgacattataaaagttgaacccaaatattccaaagaaggttcaaagcaacgagctcatgaaaggagtgtcagtgaaatttatgcattggttatcaaattattggccaatgcgaatggcgtttcttttatggaggaatcagtactaatccgtgataatcatgatagcaaccttgaattagcagatatcatccagaaactcgcaaaacaaaatatttcattgaacgaggtacaaaatcatttgtacagtctaattgattcagaaactatttcagaagattatttgcaaagagaatgcaagcatctgcttcaagacgttagcaacctagaaggtgaacccgaaagaatgaatttatcgacagtccaccgagaatttgcaacaattcacggagttaaaggtgaaacacatcgatcgacactgcttttactaacttcatgtgtacacatgaagtttaatgaagaagacaaaatcaataatttcttcaaaactatctttccttatttactaggagaccgaccagatttttcatcggatccagaaatagaacagttacagcgggattgtcttaaactaacatatgtagcattaagtcgtccaaagtacttattagcagttgcaattcccagtcaagatcttgctgatgaaaaaaaaacgagcttattgacacacggttgggtagaggcaaaatag

SEQ ID NO: 73208 - DNA, 1779 bp, Rhizobium freirei PRF 81
gtgcgcatcgctcgggttcaaatcgagaattttcggggaattaagcaggccgaggtccatttttctggaacatccgtcctgctcggcgacaacaataccgggaaatcaacagtattcgaggcgatagaactcgccatcggcgcagaccgattggcccggacgcaagccatcgacgagcacgacttttacggcggcgattatttgcccgtggagggcgctctacaaaaacacatcaaggttgaagttgtcattgcagccttggatgagcagcactgcacgaagttccgcaacaatctcgaattctggcggcaggccgaccgctcgctcctcggggccggtcagggagtaaatcttggccagcccggcatcgagcccgcggtccgcatccgcttcgaaggggcctacgacccggagaacgatgacttcaccgccaagacatggttcgccgtgccacggcatgaggacggcacatccatcaatgagtgccgttccagcgacaaacgcgaattcggctttcttcaccttcgcgcactgcgaaccgggaaccgagcgctctcgatggaacgtggctcgctcctggacatcattctcaagacctacgaagtgcgtacccgcatgtgggaagggctgctgcggcagctccgcgacctcgatgtcgtcggcgccaacgaccctgagttcggccgcattctgaccgccattcgcgacgctatgcgcgacatcgtcccgggcgaatgggccgatgcgcctcatcttcgcgtctcggaattgacgcgcgaggatctgcggcgcgtcctgaaatccttcctcgcgaccggtgttcccggttatgccgctcccttccagcatcaaggctcagggacgatcaacgcgctggtgctcgccatgctggggctgatcgccgagcgtcgcaacggtcgcgtcatctttgcgatggaggagcccgaactctcacttccaccccacgtgcagaagcgcgtcgtcgacaaggtcagaggcatcgcagcccaagccctcttcacctcacactccccctatgtgatcgagcagttccagccggaacagatgatggtgatgacccgcagcgcagcgggtgtcctcaccggatcgaatatcgagcttccccaaaacctgaagctgaagacattccgcgatggttttcgtacacgcttttgcgaggctcttcttgcccgtcgcgtcatcgtcgtcgaaggcaagaccgaactcgttgcctacagcgcggtcgcccgtcgagccgcagaacttgcgccagcacactaccagcggctcgattcactcggatgggttccattcgacgccggcggacagacagcggtcgcttcgttcgccacgttctttcgcagcctcggaaaaaccgtcgccacgattttcgatcaacaggccgacgccgagcgacaggcgatcgtcgcctcctgtgactctactttcgaacagccctatgccggcttcgaacacctgcttgccgccgaggtgtcggttgcgatgcaagcctggttcgtgcgcttcttcgtcgacgtaggagaatggccgcaggctctgaataatctcgtgccgccgcaaggctcgccagacgagacttaccgccctgcctttgtggctttgttcaagcataagaagggcgacgattatctcaccgttttcctggaacaatgccaagttgggcattttccgcagaccatgttgggcatcatcagcgccctcaagaacttggccgcgccaccaccaccgccgccagcacaacccaatatcttcgagtga

SEQ ID NO: 73209 - DNA, 1707 bp, Rhizobium freirei PRF 81
atggcgttggtcctatgcgaacacagacaacgtctgctccgcacagacggcaatatccttgttcggggcggcgccgggtcaggcaagaccaccatcgcgcttgcaaaggcgtgtgccgatctcgatgcagcgcggctgggcccgctgggtaaggcgctgttcctcagtttcgcacgggcgactgtggcgcgcgtcgctgaacaggcgaccgccacgctgcctcgtgcactgatgtctcgcatcgagatcaacacctatcacggcttcgcctggacgatattgaagagccacggctacctcatctgcgccaaacaaggggtgactctgcttttgcccgcgcaggcccgggcgcatcttgcaggtctcgatggggacgctcgatcggcccggcaacgagagctgttcgacacggaaggcttgatcgccttcgatctttttccgaccttattgaccgagctcttccgagcagccccgatgctcgcgagggcctatgccagggcctatccgctgatcatcgtcgacgagtttcaggacacgaataccgaagaatggcagatgatcagccagctcgggcagcatagtcgccttatcgcgctgggcgatccaaagcagaggatatatgacttcaagggcgcgcacccgcgccggttcgatgaattcatcgccgcgtttaacccaacgccctttgattttgccagcgaaaacaatcgcagtcccggcacggcgatcgcacaatttgccaatgacattattgccggtgaatatacggctgcagcctatgcaggcgtttccgtctcgcgatatcgcggccgaagcctccgcccgctcaaacaggaaatcctcagaaccgtcgcgcggctgcgccggaatcccgattggtccctcgcagtcctcgtgccagcgaacgccctggcggcaagcgtcttccattacatggccgaggcagcccacggccttcctgcctatccggtcgacattctggtcgcggccgaaggccccatgcttgctgcagacctgattgctctcctaatggagccgcgtccaagcgatcaagaccatgccgccgccatactggagggcttggctgcattcgaactaggccgctcagaagaggcttccgcgacggcaatccgaaaggcaggccggtacaaagacattgcccgggccgtccgtgctcggggtttcaacgggctcggcgcgcgcggtatcggtccgggcgttcgaagcctcctggcgaacattgaagcgatccaactgacgggggatccttggtcagattggcgcgcggtgcgcgcgcagctcgacgcgaacgaccgggatgaattcaaggcgctcgcgaaggaagcccgccatttgcggcttctaacacgcggcgcgcggattgaatcgaagctcgcggaggcatggcgcactcatggcagctacaacaacgctcgcgccttgctggcggccgccgtcgttgaggaccaattcgcggcgaccacccgtcccgagcagggtgtcactgtgatgaccattcacaaggcaaaaggaaaggaattcgacgaggtcatcgtcttcgaaggcctgttctcacgctacgttcagagacccggcgccgatggcgaacggtctgcccgcttcaacctccatgtcgccgccacccgggctcggcgcgcgctgacgatcatgacgcccgaaatccagccatgccagctccttccttaa

SEQ ID NO: 73210 - DNA, 2190 bp, Staphylococcus aureus M0221; identical to SEQ ID NO: 71982

SEQ ID NO: 73211 - DNA, 1794 bp, Staphylococcus aureus M0221; identical to SEQ ID NO: 71697

SEQ ID NO: 73212 - DNA, 2190 bp, Staphylococcus aureus M0312; identical to SEQ ID NO: 71982

SEQ ID NO: 73213 - DNA, 1794 bp, Staphylococcus aureus M0312; identical to SEQ ID NO: 71697

SEQ ID NO: 73214 - DNA, 2190 bp, Staphylococcus aureus M0340; identical to SEQ ID NO: 71982

SEQ ID NO: 73215 - DNA, 1794 bp, Staphylococcus aureus M0340; identical to SEQ ID NO: 71697

SEQ ID NO: 73216 - DNA, 2190 bp, Staphylococcus aureus M0424; identical to SEQ ID NO: 71982

SEQ ID NO: 73217 - DNA, 1794 bp, Staphylococcus aureus M0424; identical to SEQ ID NO: 71697

SEQ ID NO: 73218 - DNA, 2190 bp, Staphylococcus aureus M0468; identical to SEQ ID NO: 71982

SEQ ID NO: 73219 - DNA, 1794 bp, Staphylococcus aureus M0468; identical to SEQ ID NO: 71697

SEQ ID NO: 73220 - DNA, 2190 bp, Staphylococcus aureus M0633; identical to SEQ ID NO: 71982

SEQ ID NO: 73221 - DNA, 1794 bp, Staphylococcus aureus M0633; identical to SEQ ID NO: 71697

SEQ ID NO: 73222 - DNA, 2190 bp, Staphylococcus aureus M0831; identical to SEQ ID NO: 71982

SEQ ID NO: 73223 - DNA, 1794 bp, Staphylococcus aureus M0831; identical to SEQ ID NO: 71697

SEQ ID NO: 73224 - DNA, 2190 bp, Staphylococcus aureus M1007; identical to SEQ ID NO: 71982

SEQ ID NO: 73225 - DNA, 1794 bp, Staphylococcus aureus M1007; identical to SEQ ID NO: 71697

SEQ ID NO: 73226 - DNA, 2190 bp, Staphylococcus aureus M1064; identical to SEQ ID NO: 71982

SEQ ID NO: 73227 - DNA, 1794 bp, Staphylococcus aureus M1064; identical to SEQ ID NO: 71697

SEQ ID NO: 73228 - DNA, 2190 bp, Staphylococcus aureus M1223; identical to SEQ ID NO: 71982

SEQ ID NO: 73229 - DNA, 1794 bp, Staphylococcus aureus M1223; identical to SEQ ID NO: 71697

SEQ ID NO: 73230 - DNA, 2190 bp, Staphylococcus aureus M1462; identical to SEQ ID NO: 71982

SEQ ID NO: 73231 - DNA, 1794 bp, Staphylococcus aureus M1462; identical to SEQ ID NO: 71697

SEQ ID NO: 73232 - DNA, 822 bp, Marinobacter nanhaiticus D15-8W
atgccttactctgaggtcatcaacttagcagatgtcttcggtgatgattttaagacactagcttttgcagaaagatacttccatgtacagcatacagatttattattcgcagacgctgcaatttttgtggagggcacggctgaacgaatgctagttccttttttcatcgatggagaatttgaagaactgagtcgacgatacctttcatttctagatatcgggggaagccacgcccatagattgaaaccccttgtggaaaggcttggcatacccactgtcataatcacagatatcgacccagttgaagttacgaagtcaaaggcaaacagaaccgtccgaaaggccacggtcattcgttctccaaaaaatcttgaatgcggaaacgacacactcacgaagtggcacccaagaaaaatctgcttagatgattttggcgcactttcaggtgaggatctaacatgggttagcgaaaatggaaccagagtgcgattcgcctggcaattgccaatattcagtaacggaccgtggcccagctcattcgaagattcgttcattctgtcaaacttagactggttcaaacggcagatggacgaaaccggcccgctcgggaaggcctgcgaagtagcgcgtgagtgcgaaggtccgaatgagctaaacgaagcacttcacgaaatgcttcatggctctttcaagaaaggcgacttcgcctcaactatttttgaaaaactcagtattggagagcccttaacatgcccttcctatatttctgacgctcttggttggctccaacgagagttagatcctaaaaaaggtgggggttag

SEQ ID NO: 73233 - DNA, 1371 bp, Marinobacter nanhaiticus D15-8W
gtgctagcggacaaacacccaatcattctcatcgacgagtcccaagatacgatgaaaagagtgcttggcgcgttgatggagttgaaccgagatgattctgctgcgatagcgctgggacttattggggaccatagacagagaatttacctggacggacataaagacctaccgtcacttgtgcccgggggatgggcaacaccaagtctccagatgaatcatcggagtcaacaacgaattgttagtttggtcaacaacatttggcaggctgacatcatgggtcgaactcagccaaaaactggaattttgcaaaaagcgcgttccgaaaaatctgagggcactgtcaggatttatgtttgtgatacgaacatcaatgccgaagataaaatacggatggagcgaagctgcgcaaaagacatgtcgtcagcctctggagattcttgttggctagaccatcaacatggctatcagctcctagctcttgagcacaagttagcagcacgtcgaggagattttttagatgcctataacgcattgagcctcatcgataaagaagctaccaggccccaaggaaacatagagaataccggcccggctgcagtccaaatacttctaagagaactgcccgccctcgcggcatgcaagaacagtcaaggtgagatagacgactttgctataatcgagttattaaacagatacaatcgcctagaaaaccttgcgaaagcagatcgagatttcctgaataaactcaaagaatttcacgaagccgcaaaagaaattatcgaagtctcgtccaatcctgactcgactgtaaaagaaatattagcaccggtgatacgcagccatcttttcgaggttgatgatcgactacgccacgcgttccgcgataacgaagacataccgacaaccgcaagtcctaaagaatccaaagaagaaagaagacaaaggggatggcgtgcactattcgatgttaggtgggccgaactaagcagataccataactatctgcatgggaaatccaatttagcaacacatcaggttgtcaaaggctccgagtttccaaatgtaatgatcatcatggatgatttagaggctggtggtaatctatttgcctacgataggctctttggtgccgtaaaactgtcaaagtcggacctggaaaacattgaaaatgaggaagagacatcgattgatcgaaccctaaggcttttatatgtgacttgcagtcgagctcaagaaagcttggctcttgtactctggtcttcagacaccaaagcggctattaaacgcatcaaggacagcggctggttttcggaggaagaaattaaagaggtgccgacgccttggctgccgagaccagtaggaacctattag

SEQ ID NO: 73234 - DNA, 1701 bp, Erwinia amylovora Ea644
ttggaaatatcatctctgaaactcaaaggttttaggaattttaaagatgcatacatcaaatttaattcgaacactctgatcatcggagctaatgatgttggcaaaagtaatatgctgcattcgctaagaatgctattagataaaagtgtctcagaatcagaaattgaaccgaatgaacttgattttcatttagaaaaaggaaaatcatgtgaagaatttgaaattatcattcattttaaagatatcaatgaagatgcagtactttcaattttgaaagggaatgtcagtgactcaggtgaatcatttattaagtatgtcgcacaaaaatctgatctcagctacaaactttttattggtgattctttagagtctttacaagaaatcaattctcgctattatcttaaattcgttaatttaaaatatattcagtcacaacgagatttagagagatttattcgcaaagaaaaaagacaactcttaaaaatcgcacagcaatcattgaactctgatgaaagagaagaagatgatgatttgttaggagagataagttcaggtttacagtcaattaatgataagatatctcagcttatatatgtagaaagagcaacaaaagaagtcaacgatgagcttaaaaaacttgcacatcattactctgaatattctgtacggttagatactggggcaattggaataaatgactttattgataacctacaacttggagctaatacaaatggctctaacgtaatgcttggaggagacggacgaaacaatcaaatcttattagcattatggaaagcgaaaagtattaaggaacatgatatcgataacgaagttatcttctatgttatcgaagaacctgaagcacacctacaccctcatcaacaaagaaaattagctgattatttgatagctgaacttccaggtcaaacaatcatttcatcccactccccccaaatagcggtaaacttcgagccagactcaataataagattgcttgaccgggagggacacactgtagccgcaagtgaaggatgctcgaaaggtatttcagatggctgggaagatatgagctatcggatgagtatattgccagcagaatcattcttttcaaatggtgttttcttaatcgaagggccatccgaaattttattttaccattccttggctaaaagtttgaatattgatctagattatttgaatatttcattaatttcagtgaatggaatatcatttaaaatatatgcatcaatacttgatgctttagaaattccatgggtaatgcgaactgataacgatatatcaaagctaaaaggtcaagagaagtggaactttgcaggtataaaccgatgtttagatatagttggtatcgaaaagtttgagcatagcgacaaaaaaataacatctctagatactcttaccaacggtgactggcaaacagtttctgaggaaataaataaatcgggagtatatttgtcaaaaattgatttagaaaccgatcttgtcgaggaattgagtgcttcaatattagatgcgttagataaaaaagataatcaaagcgcaattgaatacttacaaaagaaaaaagcaatccgaatgcgtatacttctgagaaaaatcaaaaaagaccttcataatcttaactcgggtgatctggctaaaccgctagaccaccttgtaaaaatagttaaaggtgaatga

SEQ ID NO: 73235 - DNA, 1188 bp, Erwinia amylovora Ea644
atgagttttttttctccaaccactcagcaaatattagccattgactaccctaaaagcatggtaataacagcatgtcctggaagtggtaaaactacagttataaaagaaaagattagaaatattaccggctgtcttcctgagcataaaggggtcattgcaattacattcacaaggaaagcaagttcagaactggagcgcagatgtaaggcggaaggacacgatacaaaacacagtttcttcggtacgattgatagtttttgcttgaaggagataatcattccatttcttccaagaatatgggggggtaaaccaacagaatgcaaagtattaaagaggttagagtctccatataaacattacctcaaggaagaatttattggcacaccatcagtcgttaatatcaatgaagattccggttataagaaactgtacgatgagggaatgctttggatgagttcatttactgccttagcattaaaaatacttaatgaatctcctgcagcaacgcgatatatcaaagcgagatatagccatatatttatagatgaatatcaagattcatccttatctcagcatcaattatttctaaaaataaatgaacttggtttatgctctattgctgttggtgatatttgtcaatcaatttatgagtttcgaggtggaaatgctgagctgttacttgacttggttagagataagcaagtgtttgcacattttgaaataaatttaaatcataggtgtcatccatcagtaattaattatgcatctaggctactcgattcaaatttcgtgttattaccaagcgaaagcatcaatgtttacagaaagagattatcagggaacctaaaagatgtttcgatgacaatatcatcatggatttcaaaatggttaaatgaaggaaaatgggggttggagcaagctaaccaaatagctatttttgcaaaaaaagagcaatcattgctattactatgctcaggattaacatcaaattttagagtttatattgacacgccattagataaattgggcacagaatgttcagatttatataacgaccttctagcgtataggtataaggccataagtactgcgcaagagttaattaataaagtatttgatggcttgattataaatgacaatcatcagtttttattaagaaaaaaattaaaaccctcaggggtaaactaa

SEQ ID NO: 73236 - DNA, 633 bp, Erwinia amylovora MR1
atgagctatcggatgagtatattgccagcagaatcattcttttcaaatggtgttttcttaatcgaagggccatccgaaattttattttaccattccttggctaaaagtttgaatattgatctagattatttgaatatttcattaatttcagtggatggaatatcatttaaaatatatgcatcaatacttgatgctttagaaattccatgggtaatgcgaactgataacgatatatcaaagctaaaaggtcaagagaagtggaactttgcaggtataaaccgatgtttagatatagttggtatcgaaaagtttgagcatagcgacaaaaaaataacatctctagatactcttaccaacggtgactggcaaacagtttctgaggaaataaataaatcgggagtatatttgtcaaaaattgatttagaaaccgatcttgtcgaggaattgagtgcttcaatattagatgcgttagataaaaaagataatcaaagcgcaattgaatacttacaaaagaaaaaagcaatccgaatgcgtatacttctgagaaaaatcaaaaaagaccttcataatcttaactcgggtgatctggctaaaccgctagaccaccttgtaaaaatagttaaaggtgaatga

SEQ ID NO: 73237 - DNA, 1131 bp, Erwinia amylovora MR1
atggtaataacagcatgtcctggaagtggtaaaactacagttataaaagaaaagattagaaatattaccggctgtcttcctgagcataaaggggtcattgcaattacattcacaagtaaagcaagttcagaactggagcgcagatgtaaggcggaaggacacgatacaaaacacagtttcttcggtacgattgatagtttttgcttgaaggagataatcattccatttcttccaagaatatgggggggtaaaccaacagaatgcaaagtattaaagaggttagagtctccatataaacattacctcaaggaagaatttattggcacaccatcagtcgttaatatcaatgaagattccggttataagaaactgtacgatgagggaatgctttggatgagttcatttactgccttagcattaaaaatacttaatgaatctcctgcagcaacgcgatatatcaaagcgagatatagccatatatttatagatgaatatcaagattcatccttatctcagcatcaattatttctaaaaataaatgaacttggtttatgctctattgctgttggtgatatttgtcaatcaatttatgagtttcgaggtggaaatgctgagctgttacttgacttggttagagataagcaagtgtttgcacattttgaaataaatttaaatcataggtgtcatccatcagtaattaattatgcatctaggctactcgattcaaatttcgtgttattaccaagcgaaagcatcaatgtttacagaaagagattatcagggaacctaaaagatgtttcgatgacaatatcatcatggatttcaaaatggttaaatgaaggaaaatgggggttggagcaagctaaccaaatagctatttttgcaaaaaaagagcaatcattgctattactatgctcaggattaacatcaaattttagagtttatattgacacgccattagataaattgggcacagaatgttcagatttatataacgaccttctagcgtataggtataaggccataagtactgcgcaagagttaattaataaagtatttgatggcttgattataaatgacaatcatcagtttttattaagaaaaaaattaaaaccctcaggggtaaactaa

SEQ ID NO: 73238 - DNA, 2109 bp, Acinetobacter sp. NIPH 809
atgctcattgaaaaaattaaagtagaaggttttaggcttcttgagagcgttgaatttggattagaagagaattcaactgtaattgttgggcgtaataatagtggaaagacatcttttaccagtatttttgattgtttttgtggtgagtctggagcacgatttcggctagaggatttttcagttttatcacgagagaaatttctaaaagccaaagaattaagagaggaagggggaagtccagaaaagatactagaagcacttcctcgaatctcacttacgcttacatttcgatataataaattttcgcctgatttaggctctctatccccttttgttattgatttagatgaagattctacaacagctattgttcgaattgagtatcgccctattttgaaaaatatgcatttattattcgaccttactctatcttcagcaacagttgaacctcgtacacatttttataaaaatttgaagagtaatttgtctaaggcttatggggttcatgtaagtgcaattgatcctactgatagtacaaatataagagattttgaagggacatctgcgttaacagcgttgttgcaatgtaactttgttttggctcaaaggaatcttgataaaacaaaattaggagatgctgatgtaataggtaaactgctgagtgagttatttaaaacagctacagcaccgtctgcggccgaggctgatcaagatttagctataagattaaagcaatctgttgaaagtattgagcataatgtccaacttgactttgatggcatgcttaaagaattactgccagttatgaacgtaatgggatttccaagtcttaatgatactgagataagaccagagacatcattaaacgtggaatcattattatcaggacatactaaggtcgtttatagcggagttgatggagtccatttacctgaagggtataatggtctagggactcgtaatttgatttacatgttgctacagctagcaagttaccacaaaatttacagatccaaatcaattagaccggctactcatttaatatttattgaagaaccagaagctcatttacatcctcaaatgcaggaagtttttattaatcaattaaatgtggctgttcagaaattatctgatagttattctaacgaagataaatggaatatccagttcattatcactacacactctccacatgttgccaatgcagcaacatttgatgctgttagatatttttataatgaaagggataaagtagaaaacatacgccatacaaaggttaaagattttaagaaaggcttgagtagtgtttcggatacagatcaaaaatttctacatcaatatatgaccttaacgaagtgtgatctttactttgctgataaagctattttagttgaaggaacaacagaacgtttgttaatgccaaggttatgccaattagtcgatgaaactcttgatgaatcacaaaaactggccagacaatatgttacttgtgttgaagtagggggagcatatgctcatattttttatccacttcttgactttctcgagttgaaaactttggtaatcactgatctagactcaacaaaaaaagagatgataactaagaatggaaaacaggtagaagcatgggtgaaatgtcctgtagctgatggtgagaatatatcaaatgctgctattaaaaattggttttatcctaaagacgttgatgatactggtaaggttaagaaaaaggcagaaagtgatgatagtcaaatttccccttcagtcttgattgctaagacagctgaagagaaacaagttaaatttcgtagaattgcatatcaaataccagaagatcctgaaagtaatatttgtggtagaagttatgaggatgctttcatattagccaatctatctaaatttaaactgccaatagaacaagatattgctattgcggcttgggaaaaagcaaagggacttaagaaagctgatttcgccttagaatatgcaattcaaataaaagattggttggcaccaagatatatcaaggaaggtttaatttggttatctgaaatggacaccatagaaaactcaaattttgaattaattacaggcgaaaaagtagcatga

SEQ ID NO: 73239 - DNA, 1740 bp, Acinetobacter sp. NIPH 809
atgagtgagattctaaacaatccagcaataattgctgctcaagtagctgaagcaaaaattaatgcagctataaaagaagggagaagctttcggctagaagctggtgcaggtgcagggaaaacattttctttagttcatgccctaaaatcaattattaaagaacgtggtacatcactaatgcaagcaggtaaaaaagtagcttgtattacttataccgaagttgcaagaaatgagattgctcaggaaattgaagatcatccagcaattttagtcgatactatccatggattctcatgggcttttatgcgccaatttcaaaaagctataagagagattcttattgaagatcatttaagaaaagaaaaagttgaacaaggtggtggcattggatctaaatcagtggaatatgagttgggcttctttggtgttaatgatcagaaaattacactgagtcatgatgatattccaatgatgatggccaaattactaagtaaagaaaagtttaggcaaatatttagcaatcagtttccagtagtttttattgatgaatatcaagatacaaatcgccaatttatggaggctattacagagtatttcttaaaaccaaaagtgggtccgctgtttggtctttttggggatcattggcagactatttatggtaatgaatatgggttagcagagtatccaattgaagagattgctaaaggatcaaattttcgatcagttccagcaattgtaaatatattgaataatttaagaccagacttaccgcaagctgtaagcttaccagatgcaaaaggtgaggctagattctttcatacaaattcttatagggggacacggactaatgagaggcattcaaaagaggatttgccaataaatatagctcgatctactcgtgcaagtttgatacagagactaaaaaatgagggttgggatattgaaaaaactaaaatattgatgttaagccataatgttttagcttctgaacaaggatatcctcaattaattaaagtgtttgaaggacgtaatgatcaatttgctaaaaaagaagacccagtaataaaattttttgcagaaatagttgaaccaatgagtgccaactatggcttatcaaattatggagagatgtttaaaatctttggctcaaagccagcaataactaagcatgaagataaatcttgttggcgccgagatatggatcaattattaaaactaaggcaagaagggacaatagggcaagttatagaccatttaaagcatacaaaacgtccatctcctccagatagagtacttagacgagacgatgagcttatttcatttaggaactcgcctgacacggaaatgtcttcaaaactattacgttataataaattaagagaaatcccatataaggaagtaattgaggttacaaagtttattgaaaagcagactccatttgcaacgcagcatagtgttaagggcgctgagtttgagaatgtattagtgattttaggtggcggatggaataattataagtggccacagctctttgagttgcttgagactaaaaagttgactacggcaaacttcgatggttttcatagagcccgtaatctattttatgtatcaatttctcgtccaatgacaagactagctgtgttagctactcaaacactatctgatacagctcttgtaactgtgaataatctatttgggagtgaaaatattgaagatttatgttttgataaattaaaataa

SEQ ID NO: 73240 - DNA, 1049 bp, Acinetobacter sp. CIP-A165
atgctaacagggaaaaatacattattaaaaaatgtatttgatttcttcatggactatgacattaaaagtgattccataaaatctgaagaaaataaaactacagaaattaaagctcgaaaaaataactttttatcagacattgaaccagtaattaattctattcaagagcgtatggaattagggaaagaacaaatattatcttatgctgatggaacaggagcttcatttaataaggctaaacctaattttgaagggaatatttcagatatagaaatgttttcttttctaagattaattattgaatatgaaacagggattaaaataccagcaactcataatggtttgggttataataatctgattttcatgtctttattacttgcaaaaatgcaagtaaattctgacgggaagtatatgggtgataatgcaaaagtattttcagtattagttattgaagagcctgaagcccatctccatccggcaatgcaatataagttcttacaatttttaaagaagaataaaaaagaaggaaaagtacgacaaattttcgtaacttcacattctacccatattacatctgcggtttcactttcagaaattatttgtttgtataaagaagctgatgaaacaaagattagttatcctgatacgatttttcctcttgatggaaaaagtaagagatatgtacaaaggtttctagatgctactaaatcagacattttatttgcacagaaaattttgtttgtagaaggaattgctgagcaactattaatgtctatttttgctagatatattggtaaatctttagaagatcatcatgttgctgtggtaaatgttggtgggcgatacttcacacatttcctacatttatttgatagcaacaaacctaaaacaatttctaagaaaattgcttgtatcacagatattgatccagaaagaaaaatgaagcctactgatcctactgatcctactgatcctactgatcctactgatcctactgatcctactgatcctactgatcctactgatcctactgatcctactgatcc

SEQ ID NO: 73241 - DNA, 1701 bp, Acinetobacter sp. CIP-A165
atgtcaataatacagatagattccaataaaagacttgatgatattgagcatcattttaaagttagtgctggtcctggagcaggtaagacacattggttagttgaacatataagaaatgtgcttcatcactcaaatcggcttggtaaagtacggaaaattgcctgtatcacttatacgaatatagctgttgaaactattttgaataggttgggtacttcagcaacccaagtagatgtttcaacgattcatagttttctatatcgtcatattcttaaaccatatgcttttttgatagcagacgagtatggtttagactattccaaacttgatgggcatgatgaacttaatcactcacatagcaagataagtaattggttgaagtcaacatcacagcaatcgttactaaaaggaaaagctaacattttaaaagctttggatacaattcaatggcaaatgacggatagtggtgaattatttttaggtcttccaattaataaaacttatctaggtaaggttacaaatataagtattaaaaaaaatagctatattgaatatagaaaagaacattggaaattaggaaatattcatcatgatgatgttttattctttagttatcaattaattgaaaagtatccattcattttagaggtagttcgggctaaattcccatacttttttattgacgaattccaagattgcaatccaattcaactttcaattattgaaaaaattgcggaaacagagactatagtaggatgcataggtgaccctgcccaatctatttataaatttcagggagctgagttaggactttttttaagttttagtttaaatggaatgtcccattatcaaatcttaaaaaataatcgtagcacaataaaaattataaaagtcctaaattttataagatcagatttaactcaagaacctgttcgagaagtagatggtgaaaacccttgtttaatagtaggcagtacgaaaaacagcattcaggaagtacgaaaattatgtgttgatgaagatttttacactttatcaagagataatattactgctaaagcactacaaaatgaactagataatacatttaatatagataatctgttcgaaagtttatcagagatagatagtgatagagatagaaaacaagcagtttgtagtagtatcaaagctattgaattagtgagagaaaaaaaatttaaagatgcatttaaagaattagaaaaaatattcccaaggagtcattataatatttcaatatccatagaatatatttcgaccctaattggagaatacgattcatacaaaaatgaaaatttaataaattttattgaaattatacagaaactatttcattcacgacttactaaagtaagtcgcggtaaagttaaggaattttatgaaaatacactttataatcaactaagtgtatgtataaatattcctgatgatatgagtcttaataagactattcataaatctaaaggtgatgagtttaataatgttttacttgtattaaagtcagagcaagaactagattttatattatctcctcaattagctgatcctaaggcagaagagcatcgtattctttatgttgctataagtcgtgctaaaaatagactttttatttctgttccatcattgaaggttaagaatgagcctaaatttagcgagcaatttgaaattgttagatgctag

SEQ ID NO: 73242 - DNA, 1824 bp, Acinetobacter sp. CIP-A165
atgagtattcaaattgatgtggttcgtatttgtggatttcgagggatagccaatattgaaataacactgcctagagtggcagtgttattggggcaaaacaatgcgggtaaaacttctgtaattaaggcattacagttagcactaggggattattctcgttatttgactgatgaagattttcatattggagatgatgaaaaacgtcaggagttaatcactgttgatgttcgatttattgccacgaatgaaagtggtagagtaaacgaatttcctacggcatggcaaaatgaatttggggataaaattcaggcagaagcagatggtaaacaatatgttgctattcgcactagagtgaaaccagacaaggtaaaaggtggttacaccgtggaacggtttcatttagaagtgtgggcggctataagtggctggcaagatgttccagtaaatactaaaaatagattaactaaaaggttggaagcgacaccttttatttcgattgatgcccagcgagatattcataatgagctaaaggaaaagacttcttttattggtcgtgtattatctagcgtagaatacaaagaagatgatgtagctgaattagagcgtatggttgcaaaagttaatcaagaagctattatgaaaagtgaccatctcaatagtttgaaaacgcatctcgataaacttaatcaatcatttgcaggttctggtcaaacagaactgactcctttcccaaagaaaatccgtgatctttctaaacggtttagtgtgcattttggagagtctgataaagattctttttcaatggaatatcatggcatgggaactcgtagctgggcttcgatgctaacagtaaaagcatttaccgaattaatggtaaaaaagcatgaggacgaggtagagccattctttccgatcttggcagcagaagaacccgaagcacatttacaccccaatgcacagcggactttatataagcagttgattgatacaacgggtcaagtgattatcagcacacattcaccttatatcgctggtttggcagaattacatgaaattaggtcattaagaaaaactggcaattcagttgaagtatatcaactcagagataactttgaagatgatgatttaagaaaactaaaaagagaagttgtccattctcgtggtgaacttttattttctaaagccatcgtgttgtcagagggagaaactgaagagcaagcactgcctgaattatttgaagcatataccggacagcacccattcgcacttgggattaattttgttggcgtcaatggctcaggtgcgaaatatcgcccatttttcattttagcaaaagatctaaatattccattatttgtatttagtgatggtgaagtagaaacgattaaagcgctgaaaaagaattatgaaaaaatatttggcgataccgacgttgaaaatacatctaatatatttattctaactggaacagattttgagggctacttatttagccaagggtttaatgacttaattgagcaaactattcgtgaagttgacggagaggggaaaattgatgaatggattcagaaaaaaaatggagaactattaaaacgaattaagacaaataagccaccatgtacaacgtgtaatcaacctatttttgaagatgtgttacgagattttagtgggaaagatggggtaaatcaggcaatccttgagattattgacaaaaagaagccgcagtatgctaaagcaattacaggaaatttgattaagttaccaaaagagtcgttcccacaaaagattattgatctttttaaagaaattgaatctggagtctga

SEQ ID NO: 73243 - DNA, 1905 bp, Acinetobacter sp. CIP-A165
atgaatctttcccaagctcagcgtcagattgttgaagcacctattggtggggctattcaagtccttgcatcggctggctcaggtaaaactcgagttttgactgagcgaatccgttatattttggaaacgacaaaaaaagagggtgttattgctttaacgtttaccaataaagcggctgaggaaatgaacactcgtttggctcatagtgaacacatacaagatagagcatggattgctacaactcattcagttgcccaacgtattttagaaaaatatggtcataccattggattaccaacggatttacatatttatgatagagatcgggacagaatggaagtctttttgcaatctctacgcgatgatggaatcgaggttgataagtatttagatatttctgattcaaacgagttgaaaaacagagaaaaaaaacttcaaacatatatggatattttttcaaaaatcaaacgggaattgctgacagaatctggtatatcctcaatctatcctaataataatatttggaaaaaatttcaggattatcaacagtcattgctcaatagcggtggcattgattatgatgacattttgatatatgcccacaaaatactattgacacatgaatggattgcaaaaatatatcgttccaaatacaagcatatatgcgtagatgaggctcaagatctaaataagactcaatatgagtttataaaagtattgtgcggtgatgtgatcaaaagtgttctgatggtaggtgatcctaaccaaatgatttatggattcaatgggtcatcagatcgatatctcaatgaggaatttatccatgatttttatcctcaacaatttgagctaaaagaaaactatcgaagtactaaagctgttattggggcagcaaataaattaagaccaaactctcaaactgaggttgagtatgctttagatggtaatgtgcaaattaaagattttgatacagaagaagcagaagcaaatgccgttgttgatgagattaggaaactcttggatttaaaaagtcatgccgaaattgagggagaaatatccttaaataaaatggtggtgattgcgcggaatagatttgtctttcacaaattagaagcaattcttaaagacaagggaataccttattcattaagaaaaggtgagagacaacttgaaccatcaacaacttttggtaaggtactggattgtgctatccgaattaaattaaatcctaaagattgggtgaacggtaaaaagttatgtcaagtattaggtattgtagaacctgagaagtgggatgtagatgtcttatcaaatatggcagttcaggttgatgaaactattgagggggaaagcagtgcattattggcaaaactactcttaacaattgatggcttggatgttgaaaatcctaatatacctaaatttataaaagagcttgatattgctttaaagtcttcagtagaaaatcaacaaagcgcacttagtgatgaaatagaagaagttagattgagccttgaagagttgaatgaatttagttgtgcatggactaaatttaaaagaaagggtttgggggattcattgacggcatttagaaatgccttggctctcggtcaactttcagatcatgatattgatggcggtctaactttaagtacggtacataccatgaaaggattagagaaagacattgtatttttaattggtatgtgtgagggagtatttcctgactatcgggctaagacagctaaagagttagaagaagagaagaacaacgcttttgtggcagtaacacgagctcgacgttggctatatatgtcttatcctaagcaaagaatgatgccttggggtgatataaagtttcaggcagagtcatgttttattagattacttagggctgggaagtag

SEQ ID NO: 73244 - DNA, 1707 bp, Acinetobacter sp. CIP-A165
gtgatttacttgaaaatcaaaactgtacatctggttggatttcgtaactttaatgatgccattattaattttaatgatgatacattgattattggggctaatgatgtaggcaaaagtaatatgctgcatggtctacgtttgcttctggataaaagtttatcagaagctgatttagaaccttctgaattagattttcacatctgtaaacgaaaagcttgtgatgagttttcaattactattagctttaacgatgtcaaagaagatgctgttctttctgttttgaaaggatatgtaagtgatgatggatgtacatatttacgttacgaagctaatcgagctgatcttaactatagaatttttgtaggtcattcgctgattgatttagaagagattaatagtcgtttttatctaaaatatttgaatttaaaatatatacaatcacaaagagatcttcaacggtttatacaaagagagaagagacaattattaaaactatcccagcaaagtttaaccgctgatcagaaagatgaagataataatcttctagctgaaataagtggaaatttaaatgacttaaatgagaagatatctcaactttattatgttgaacatgccactaaagaagtaaatgctgaattaaaaaaattagctcatagtaattcaaactactcgatacaattggatacaggagctattcaagtcagcgattttatagatgctcttcaattaggagcttctactcatggttcaagtatattattgggaggagatgggcgtaataatcaaatacttttagcattatggaaagctaaaagtatagctgaacatgatattaaccatgaggtggttttctatgttattgaagagcctgaagctcatttgcatccccaccaacaaagaaaactagctcgatatttgatcgatgagctaccaggacaagcaattattacctctcattctgcacaaatagcttctcattttttacctgactctatagttcgattatttattaaggatgaatctactatagctgcaagccaaggctgttctaaatgtattgaagcaggttgggaagaaatgggatataggataagtattttgccagcagaagcttttttttcaaatggtgtttttcttgttgagggtccctccgaaatgctcttttattctgctttagctaaagaaatagaaattgatttagactatttgaatatttctttgttgtctgtagatggagttgccttcaaagtttatattcaaattttaaatgccctagaaattccttgggtaatgaggacagataatgatatttcaaaggttgcgggaaaagaacaatggcagtatgcaggtattaatcgttgtttagcagcaattaatgaaaattcatgggagcatagtgagactgaaatattacatacacagattttctttgatgatcgttggcaagaattttgtaagataactcgtaaaaaaggcgtgtttatttcaaaagttgatcttgagactgatttagtaagtaatctgacagaagaggtattagatgggctgggctcggataatccagaaagtgcgatagcctatcttcaacagaaaaaagcgattagaatgcgtacgttattaggaaaaataaaatcaagacttcatactcttaaaggtacagatatatctattcctttagagcacttgcgtgattctataattaaataa

SEQ ID NO: 73245 - DNA, 1515 bp, Acinetobacter sp. CIP-A165
atgaaagttagaaatttaacacctcaacaagaatcagcaattacttattcgtctaatatggttattactgcttgccctgggagtggtaaaacgacggtcgtggaagaaaaggttaggaatatcttaccaactattaaagcacatcaggggatagttgctataacgtttacaaggaaagcaagccaagaattaagaagacgatgtaagcgaaataattatgatacaaaacaaagcttttttggaactattgataaattctgtctagaagaattgatttacccttttttatcgcatttatggggtaagagtgctcgtgaatgtgaggtcgttgaaaagttagataaggaatatagcgagttatttctccataagcagattccaaaaatatttgatatacaagcagatgacggatttaagaagctctatgataaaggagttctatggatgtcctcatttgctggattagctaattttattctagaaggctccaaatctgctacaagatatttgcaagctaaatacactcatatctttatagatgagtatcaagattcatcaaaagagcagcataaattattcctaaagttagtcgatttaggattaataggaactgctgttggggatgctgatcagtctatttatgagtttagaggaagtagcgttcaatatttaaatagtttgataactgataaggagaaatttaagtttttccgtatcgatattaatcatagatgtcaccaatcgattagcaattacgcttcaagagttaaagatcctttagccccaattttccctgtcccagatacagaatgtagagttcatagattcactctagaaggaaatcataaacaggcagctaaaagcatttctaaaattattacacatatcttaaatcatacagagggcttaaattcttcaaatatagcgattttagcaaaaagtaataagactttaagagaagtttcagaagggttgcttgttgactatcgtttgtatgtagatcttgatcttgagaagataaaaacaccaatagctcgtattttgtatgatttattggctttttattttggtaaaatttctacaatgcaagaggtattggataataattcaattaagaattatgtttctgaaaaagagagtttactctcactaaaacaaaagattaaaaaactgaaggagcttgaagagaaccaactaattcaggcctttgaagagataattactcaaatgaggcttagcaatttttctcaggaatttgaggtcgtaacaagaattttagctgatgaaacactaaagaagctatttaaacctattagtccatctgagatacaagtaatgactttacataaatctaaaggattggagtttcacacggttatccatgttggtttagaagagtgggtatttccatatcgaaaggtgacctcagattggtctccattttaccccgagttagaacaggacacaaacttacactatgtcgggatcacaagggcccaagagctatgtatctga

SEQ ID NO: 73246 - DNA, 1806 bp, Acinetobacter parvus DSM 16617 = CIP 108168
atgtacttatcaaacataaaactttggaactttagaaaatatggtgaagttgccactacatttgatctaacaaaacctaatttagaccttaactttaccaaaggtcttaatgtgctaattggtgaaaatgattctggaaaaactgcaataatagatgccattaaattggttttaaaaactcatagctacgattacatcaaggtagaagataaagatttttttgatggctctacacgatttagaattgagcttgaattttgtggcttaactgatgatgaagctaaaaattttacagaatggttaggatggaaaggtactggagctgatacccaaacatttttaaagttaaattatgatgttacgcgtaataaaaacaaaattaatccatcagatgtaaaggctggtgcagactcagaaggctatctattaacagctgaagccaaagaatatctgaaaacaacatatttaagacctttaagagatgctgaaaatgagttgatctcaaaacgaaattctcgactttctcaaattttattaggcgatcctacttttaaaaacaaagatcaaaatcatgaactcgttcatatgtttgaaggtctgaatacaaatttaaaaaaatattttaaaggagaggaaataagttttattgataaagatggtaaaaaaacaactgaaacatatgaagatggaaaaataattaaagagaaaattgatggttacatcaaaaaattttataacgatgagatttttacagaatttaatgtttcatccacagaattaaaaagcattttagaaaaattttctctttttttagagtctcagagaaatgtaggtctaggtactttaaatcgactttttatggcagcagaattacttcacttaaataaagaggattggcatggtttacgtttaggattgattgaagagttagaagcacatctgcatcctcaggctcagatgcaagtgattgaagcattacaacaacaaaaacaaattcaactcattctttcaacccatagtccaaatttagcctcgaaagtcaaattagaaaatttaattctctgtaataaaggcaatgcttttcctttagggaaagaatacacaatgctaaagcctgatagttataaatatctagaaaaatttctcgacaccactaagtcaaacctgttctttgctaaaggagtgattctagtagagggatgggctgaagaaattctaattccaagtttcgctaaagctatagaaatagatttaacagccaaaggaatatctgtcgtaaatattggtggtgttggttttcaacactttgtcgatatttttcttcgaaagcaagaacctcatatgactattcctgttgcagtgattacagattccgatgtaagaacttatgaaaaagttggcgaagactacaatcccaaatcttctaaagtactaggaagtgaaattgcaaataaacttaaagaaattaatgaaaaatcgaatcaaaatgttaaatattatgctgctgagcaatggactttagaatattctatttttaaatccaaaaaacttacatcctcatttcaaatacatgctaaagcaattcatactaaaacttcgtgggatagtaattttgaattagagcttgctaaaaaattaattaaccaaggactaaaaaaaacagaaatagcttatcgtttagcacatgatttagatgtggaaatgaaaaaagaaaaacctgttagaactataaatttacacgaaacagattcgacagacagtatttattatttaatcgaggcgattcgatatgtcacaaacagttga

SEQ ID NO: 73247 - DNA, 1998 bp, Acinetobacter parvus DSM 16617 = CIP 108168
atgtcacaaacagttgaaatcacagatgaagatatacgatacgctgaaaatattttattacctcaaggcaaaacttttgatgatgaacgacgtaaatttatctgtaatttatctacgatagatttacaagcagttcctggcagtggaaaaacaacagctcttttggcaaaactattaattttagaaactaagctccctttatctgatggttcaggaattttagttttatctcataccaatgcagcagtggatgaaattaaagaaagaattcatcaatactgcccaaaactttttcgttatcctcactttattggaacaatacaaagtttcgtaaatgaatttttagctatcccttattatctttttaaacttaagaaaaaacctctacgtattgataatgaaatatatgcagaacaaatagaatttgctctttcatacaatacaaaaatagctctttcaaaacgcagcataaattatattgatatattaagtaattcatttataagtaataaacaaattttgcaacatttttggagtaatgacgaagtaactattcccaaaattggtagccatacaaatacatataaagaattagcaaccataaaaattaatttactaaaaactggcattcttagctttggtgattgctatgctttagcacaaaaatatctaagtaattatccaattatccacaaaattattaataaaagatttcaatatgtatttattgatgaaatgcaagatatggatactcaccaatatgagcttattgaaaagatatttacagaaaataatgatacaaatactataattcaaagaattggagacaaaaatcaatctatttataattcaataaaagctgaatcaatttggcaagatagaggcaatgttcttcacctttcaaatagccaacgtttaagtagaccaatcgcaaatattgttaaaaattttgcactgtatccagaacattgtacggatattcaaggcatgaatgaatgccagcttaaaccacatatattattattttcagattcatctattaagaacgtaatcccttatttttctcaacttgtgcaacaatataaaggttctggtgaactaaactgtcttcaagacaagcctctagaaataaaagtcataagttggaataccaattggaaagatgatgaagatagccgctctaatctcactaagcttagattagaagattatcaccaagcttttaaaaaaaatgagcagaaacctaaagaagactacaaatgcttaaaaagttatattcatttttatgataaaaaacatactactttatctatgattagaaaaaatatttttcatgctctacttaaggttttaagaattgaaaatatttcgacaaatgaaaatcgtctttataccatttcaaatttaattaaccacttaaaggtaaactcagagctaaattattcagatctaaacttaaaagtatatcaatgttgtttaaaagtagttagaaatgaaaaaaatcaagctttgtctgacttacaaacttatattcctgtattcatttcttattttaaagaaaatcataggctttctccaaaatgtagtgattttatcaataatgataaaactggtcttgatcaatctagtcaaaatcattcctctgtttcaaatatgattgaagaaaataatctcaaaatcgaaatagccagtgtccattcagtaaaaggtcaaacgcatgatgccacactatatttagaatcattttttaatcaagggtatggaaactatgagtcagaacgtcttagaaatcagtttttaggtatacaaacaattcctcaaactcttggaacacagaaaactagccatgataaaattatccaatcaacaaaaatggcgtatgtaggattttcgagagcaactcagctactttgtatagcaatacacaaagctagatttgaacaacatctaaagacaatagatcgagatatatgggagattaaagatatatccagttaa

SEQ ID NO: 73248 - DNA, 1731 bp, Acinetobacter johnsonii CIP 64.6
atgtttaaaagtttgatattgaaaaatttcagaaattttgagcagataaatattgaattaaaagataaaaatataattttaggaatgaatgatgttggaaaaagtaatttattacatgctttgagattggtctttgataagaagataagattagaagaaatacattctactgattttcataataaaaatgatagaaatccaattgaaattattgttgggttagatatatcccagcctgaaaaagaagatgtccaaaaacttaaagctagagcacatgaagctgtaacgcaagaagaatctgaagttttttatatcaaactaataatagaaaatagaaaagaggaaggaatattaaaacagtttttttggggagatgaactaagtgctttaaaagaaataaagggtaagggggttaattatttaattttagatgatgtatttagtgtgatttatattccgtcacatgttgaaactttaaaagtctttagtgatataaaaaaagaggtattaaaagatatagttttaactgaagatgattcaatattaaaagttgaaattaaagataactttgaaaatataaatgaaaatattcaaaaattaacatctgttagtagaatagaagaagaaattaatcaaaatttgaaaatttttgatgaaacatataaagtgaaaataacttcacaatcaatagttgatgacttatataagcaacttagaatttataccatagaaaatgatcatgatcatttgtatcctgcttctggggatggtaggcagaaaaagataatgtatgccatgttacattattttttagagaaagaagctattaaaaaaattcccatcttaattctagaagaaccagaaaatcatttatttttaagtgcgcaaatagacttatctagaacattatttgatgatttaaatattaagtatattttttgttcaagtcactcatctgagttactgtatcatattgatattgattgtaatttggttagattgtatcgccagaaaaatatgcccttaagaaaaactatcagtagctcggcacagataagtagtgaatatcataatctaaaaaagatgtatgctgaggggctcagtaaaggatactttgcggattgtgttttattggttgaaggatattcggaaaaacttttgtgtgattctattttaagttgtgtactcagtaaaaaccagtttcaaaaactgtatgttttaccagtacttggtacaaattttaaaccatatagagatttacttaaaaaactgggaatcaagattattgttcgaacggataatgatatatataagaatgatatttatggattaaaacgctgcttaaaaatagttaataagaaccttactgagatcattcctgaagagctaaaaggtaggaaagatgaaggtgaaataattttgaataagaagaagaaagatctacacaagcactttcaacctttaattgagaatctcaaactggaacatgatatatttttggctgaaattgatttagaaaatgatattgtaaatgctttattagatgagggaataagtgattgttcgcttaatggggaagttgttgatttagaggagttgaagtcagaacttcaatataaaaaatggcacaatatgtttttatttttagaagaaaatgaagaactatttgaaataatattcaaaaattcaagatttgattttttaaaagaagtaaaagcatgcctagtttag

SEQ ID NO: 73249 - DNA, 1335 bp, Acinetobacter johnsonii CIP 64.6
atgcctagtttagattttacattggaacaacagagaatattagattgtacttcggaaaatataattgtttcagcttgtgctggatctggaaaatcttctacattagttgaaaaagcaaaaagggaaatattgctaagtcgtccatggaagaaattggcagtacttacgtttacaaataaatctaaagatgatttgatttctaaagtaaatcatccatcaattatcattacaacatttcatagttttatttttgaaaatttattcccatttgatcctcaagtaagtgatcaattaaaagaaatgttccgtgtagaggttgataattatactaagtggttagatatcttatataataaaaaaactatagttggctcgaaaggaaagagtgactttgtattagaacatgctataaaactttgtaataagaaaaatgtacaacacttttttaaatctaaatttcatgcaatttatattgatgaagcacaggataataatattcaacaatatcaattgattgagttttttataagattaggtattaagattttaatggtaggtgacgcaaaccaaacattatatggatttagaggagcttgttctaatacttttactcgctatgttcatgataatagattcagtagttacgacctaaaacaaaactttagatgtcatcatatcattaatagaattgctaactcctatagttttcctgatgagcatgtatatgaagagaatatgggatattttgtaataaatattaatatgctaaatcaagttgttgaaaagttagtagatgagtccattgtttttttgaaaaagactaattatgaattatcagatcatgatggtaaattttctattctaaaagatatttctttttctcctgatttagatgttatggttaaaaaaatagtaatttgtcttttgaaaattaaattcaaagaaaactattttatgtataactttttagacgaattacaaatagatattgagaaatttaaaaaaaatgaaatagatttttttagaaactgtgtagaaaaatatatttatgaaaatggcaattcattggatggtgctttgagtttaataggttttgcagaattgaataatcagatttgtgaaacgtacagctctttaagccaattagaggaaacaaaaaacttttttcaaaatacaaataagcatgtaactatgactattcattcttcgaagggactggaatttgataacgttatcctaaaaaaagatgatctttatcataatggagtacttcagaaaaataacttttatgtgagtatgactcgtgctagaagtcgtgttttagtaattttatga

SEQ ID NO: 73250 - DNA, 1698 bp, Acinetobacter nosocomialis NIPH 2119
gtgaaaatctcaagtgttagtttaaaaggttttcgtaattttaaagatagtactatcaaatttaatggtgatacattaatcattggagcaaatgatgttggtaaaagcaatttacttcatgctttaagaattttgttagataaaactttatctgattcagacattgaaccaacagagttagacttttatatctcaccttgtgaggctatgaatattctagaaataacaatttgctttgaagatatacaagaagatgctgttttatctattttaaaaggaaatgttagtagtgaagctaaaactttcttacgatatcaggctgttaaaaataatttaagttatcaaattttaataggtccttctttagaaaatcttgagctaataaacagccgtttttatttgaaatatgtcaatttaaaatatattcaatcccaaagggacttacagcgatttattcaaaaagaaaaacgtaagttacttaaactatctcaatcaaatttaaccgaaagtcaaagagaagaagacacggacttgttaaatgaaattggttttgacttaaaagaaataaatgaaaaaataacccaattatattatgtagatcatgcaactaaagaagtaaatgaagaactgaagaaattagcatatcatcattcggaatattcagttcaattggattctggtgctattcaagttagtgactttatagacaatcttcaattgggggcaaatgtacatggttcaaatattcttctaggaggagatggtagaaataatcaaattttattagctttatggaaagcaaaaagtattgcagaacatgatatcgatcacgaagttgttttttatgctgtagaagaaccagaagcccatttacatcctcatcagcaacgtaaattagctaactatttaatagaagagttgccgggtcaagctataatttcctcacattcacctcaaatagcatcacattttttaccagattcaattattcgtttattagtaaaaaattatagtacagtggctgctagtggaggatgctcaaactgtatttctgaatattgggatgacatgggataccgtataagcataattccagcagaaagttttttctctaatggtgttttcttagttgaaggtccttcagaagttcttttgtatactgctttagccaaagctttagaaatagatttagattactataatatttctatcttatctgttgatggtattgcttttgaagtatatacaaatattctaaatgctttagaaattccttgggtaatgcgaactgataatgatgtgtctaaagtaccaagaaagagcgaatggcaatatgcaggggttaatcgctgtttaagagcaataggattggcagaatggccaaacagtacaactgatattaatcacatagatgttacaaatgataagagatggaattctttttatgcttcaataagagataaaggagtatttatttcaaatgttgatttggaaacagatttaataaattcattagaagcgaccatacttcctattttagataaagagaataagcaagatgcaataaaatttatgcaacaaaagaaagcaatacggatgtcttatcttttaaaacaaattaaaggaaagttaattgaccttgagaataatgaattagcagagcctttaaaatacttaaaatctttaataactggataa

SEQ ID NO: 73251 - DNA, 1632 bp, Acinetobacter nosocomialis NIPH 2119
atgaagactctaaatttaacacaagagcaaatagaggcaatcgaatattcttctaatttagttattttagcatgtcctggtagtggaaaaactaccgtgatgaaagagaaaataagaaaaagtattcctaccttgttatctcatcaaggtgttattgctatgacttttacgaagaaagctagtgcagagttaaaaaaaagatgtaaaagtaatggctttattacaaagcaaagtttttttgggactattgatagtttctgtttagaagaagttatttaccctttcttatctcatttgtggagtggttatcctaataaatgtaaaattattactgaactaacaggtcttcagaaaaatttttttaaacagccttatatagcgcctactttgaagaatattataaatgatgaaataggcttccttactctatataaacacaattttttgtggattgattctttggcaggtttagcactatatattttagaaaactgcacggcagctgtccggtatattaaggctaaatataaatctatttttattgatgaatatcaagactcttcaagggcgcaacatgaactttttatgaaattcattgagataggcttgataggcacggcggtgggtgacattgatcaatccatatatcaattcagaggaagtgatcctaaatgtatagaagaactaaaagctaatccattatttaaatttttatctattagtcaaaatcatcgttcacatgtatcaattgtaaattatgcatcaagattattaaatccttcatatcctataaagccttgtaaagaaattagaatcttcagaggactttttacaggaaatccaactcaagctgcaaagaaaatttccgagttaattaaaagaattacttcatctcatgagtctgtcaattattctgatattgcaatcttggcatatagaactagttcattaaactatatagctagaggactggagcttgattatcgtttatatacagatacaccccttgaaaaaattgaaacacccgaggcagcattaattagagatatattggcattccgttttggtaaaataactactatgcaggaaatctttgatctgcactttgcatattcaaatttatcaaaagggaatttattaaaaattagaaaaatccttctagaacttaagaatttagaattaagtcaagtaagaaacaagagtattgaaattttagctttgtcaggtgttgagtctgattgtcactcagagcttgaggctctaacctcgacattaggtagtgaaaattatattaaaaattttatgcctattctaacaaatgaagttcagctaatgactttacataaatcaaaagggttagaatttcatactgtttttcatattgatttagatgattggtcatttccatatagagaatatacaggaagttgggatgaccctcctttataccctcaatacaagcaagatttaaatttacattacgttggtattacacgtgctaaggaatattgtttactagttcaaactactaaacggtttaacaaacaaggagtagagaaaaatactcaaccatcaaattttttgacgcttcctcatcttgaaactttatataaggactttttaagtagctga

SEQ ID NO: 73252 - DNA, 1209 bp, Acinetobacter baumannii NIPH 615
atgaattttcaacaaattgttgaaaacctaagattaattttctttcctaaaataacaacagcagaagcagatcagtttagagatttatgccaaaatagccttggctacaataacttattatatattgcttctatacttgcggaattaaccttaactaagggcgagtcattatatagactcttactcattgaagagcctgaagctcatttacatcctcaattacaggttcgtttgttagatcatcttgaggccgtagcaaatgatcataatgtacaagttattgttacgactcactcaacagttctagcttcgagtgtcaaattagataaaatcatacatttaactaaaaatgaaaaacctcaagccacagccttagcggaatgtggtctggctcccaataatttagattttcttaatcgctggttagatatcacaaaatctaatctactttttgcaagtggagtgatcttagttgaaggtatagccgaacaaatgctgatccctgagcttgctaagatagtattaaaagataaagaaattaataatattgaagattacggtgtatccgtaattaatttaaatggtatttatttcaaccacttcatgcgtctatattgtaatattaagggggtaccagacgtccaagaagatcaagaaggcttaaatattcctattcgttgtgcaggtattacagatttagatcctgagcaacactattataaagaagagatagttaaagaagaaaaaaaacaagtaaaatataatcataagcctccttctgaaaaaaatgaaattgtggggaaaaatcatgcgctcaagttagtgaaaagtattaatagttctgaacatgcccgtctctttgttgctggatataaaacattagaatatgacttagctatggaggaatgtaatgcaaaagttatggcccaaattctttttgatctttggccatcaaaaactggtgaagtgaagaaaggcttacagaaaatagtcaatgatgattacttaaaaattacacctgaacaaaaagcagatcatgcaatagaaatactaaaaagagtagatgatgacaatattggcaagggttattttgctcaagttttagcagataaaatttcttctggaatagttaaactaaaagtacctcaatatattgaagatgcaattctctgggcttgttcattagaaaactcttctgttgaggaatga

SEQ ID NO: 73253 - DNA, 1764 bp, Acinetobacter baumannii NIPH 615
atgaaatatacaaatgagcaacttagctatattaaacaagcaaaaattacagagaatgttttcttaaatgcatgccctggcagtggaaaaactgaaaccattgctcaacgagtagcgaatgaaatcgagagctggggcaattttcctagtggtatagcagttttgtcttttactaagagtgcagctaaagaaattgagcatcgaattaaagagaaaataaaaggacaatcaacttatccgcattttataggaacatttgatagctttattctaaaaaatattgttaatccactttcgaaagatatctctaaatatcaaggagataatggggattattcatttaaagtagtgaactacaattcccagttattttatttaacagagtattcccacggttatcaaaaaatttcagggcatcaggtagaaattgatagcagaacaggaagttttaaatttcatttaccaaatcaagatgcaaaccgcgcccttaatgctatggttttggaacaatggcgcaaagatgacatttatcgtgcgaaaaaaaaatgcagggatgcaggttttctaactcataaagatatcgaataccttgcagaatcagctctcactactcgtaccattacaaaggattatgcaaaaaaattagcaacacgatttcaacttatcattgtcgatgaatgccaagatttatcttttgagcaattaaatatcttaaaagcaatgatgctgaacggaacaaaattacattttgttggggatctaaatcaagctatatatgaatttagagatgttaatcctaatgacattaaacaattcatatctgacaacagttttagagaggttagattaactaaaaactttcgaagctgtcaaaaaattgtaaatatttctacaaatattatgaaatcaggttcaatcgaagcagatttcacatcacccgaacaatcatgctttgtacttcaatataaagattcacctagtgaagtgatctctcgatttaatgaactaacgaaacaatacagcaatcgagttttagtagctagaggtcatcagactttaaatcaactctctgctgtagaaagcacaccaaagctgccagcagagttcttactaagctcaattttaaactttgatgaaacaagttatcattcaatcgatcaatctttaattgaattctcagaatatattaaaaataagattcagctagaaactaaatccagcgattataattgtcctcaaaatgttgaatctgaactggattggaaattatttttatataactctatccagtatttattaaaaaatgacctaaagttagatagctgttcatggacaaattggtgcaaaaaagttaatgctgtaattattaatttatataagcaagaatttgcacctcctgaaatttatgaagtattagaaaaatctaactttaaaattaaatctccaagtggtaaagcatctaattgcatctctaactattatcgcaaaaaggattcattagatattaaatttagaaaatcaactatccatggtgttaaaggtgaaacacatgaagttaccatgttaatttcaaatcctactcgtaaaggagacggtacacactggtctcattggataggagataaaacatctgaagctgcaagatttgcttatgttgcatcttcaagaccgaagtatgttttagtgtggtgcgttaaaaagttaaaacctctagaaaaaacagaattagaaagtttgggatttgaaattttggatataaaataa

SEQ ID NO: 73254 - DNA, 1806 bp, Acinetobacter sp. CIP 102529; identical to SEQ ID NO: 73246

SEQ ID NO: 73255 - DNA, 1998 bp, Acinetobacter sp. CIP 102529; identical to SEQ ID NO: 73247

SEQ ID NO: 73256 - DNA, 1929 bp, Acinetobacter sp. NIPH 758
gtgtatattaaaaaattatcaattgagggatatcgttgtttttctgagatttttgaaatcaactttagaaaaggattaaatgtaattgttggggaaaatggggccggcaaaacaactattattaattctttccgtcaattatttattgatactgagtctggttcttacaatgtttcttctgatgattttaataaaccatttaaagaaaagtccatggtagttgactcttttaaaataaaggttgaatttgataatttggaaggtccagaacctatagcatttctacaatggagtgatgctaaaaataatgtcattttaaatttagaagttttaaataaagaattgcgtgggcgctttaaaaaaagcttttggggggggaactctaaatcatcccaatttgatattgagctatttgataaaattcattgtatttatcttcccccattacgcgatgctgaatcaaaattagtaaatggcagacaatctcgattatctaaattattaaagtttatagaagctaatcaacttaaaatttgtaaaagagatgaaaaaaaacatccattagaagaaaaattcaaagagttcaatcaatcactgatcgatgaaaaagattcaagcattaagaaagcaaatgaattgatcgcagaacacttgttaaaggctgttggacaaaattttagtcaatcaactcatatacaatttgttgaaaatgaattttcaaaaattgttgaaaatttgagattaattttctttcctaaaataacaactgcagaagctgatcagtttagagatctatgccagaatagccttggctataataacttattatatattgcttctatacttgcggaattaaccttaactaagggagagtcattatatagactcttactcattgaagagccggaagctcatttacatcctcaattacaggttcgtttgttagatcatcttgaggctgtagcaaatgatcataacgtacaagttattgttacgactcactcaacagttctagcttcgagtgtcaaattagataaaatcatacatttaactaaaaatgaaaaacctcaagcaacagctttagctgaatgtggtctagctcctaataattttgattttcttaatcgctggttggatattacaaaatctaatctactttttgctagtggagtaattttagttgaaggtatagctgagcaaatgctgatccctgagcttgctaaggtcgtattaaaagataaagagattgataatattgaagattatggcgtgtctgtaattaatctaaatggtatctattttaatcatttcatgcgcctatattgtaatattaagggagtacccgaggtgcaagacgatcaaatgggattaaatattcctattcgatgtgctgggattacggatttagatcccgatcaattctattatgaagaggaaacatcagaagatactgagtcaaaaaataaaccagtaaaaaaaataaaaattgatcacaagccacatgaaaaaaatatgttagaaggaaaaaatcatgcgttgaaattggtagaaagcatcaattcttctgaatttgcacggctattcgtagctagatttaaaactctggaatatgacttagcaatggaagaatctaatgcaaaagaattggctcaaattctttttgagatttggccgggagaaggcccagtaaagaaaggcttacaagaaatagtagattttgattactcaacaattaccccagaaaagaaagctgatcatgcatttgaaatattaaaaagagttgatgatgacaaagttggtaaaggttattttgcgcaggttctggcagatagaatttcatcaggatcagttaaattaaaagtacctcaatatattgaagatgcaattctttgggtttgtcctttagacgactctttagcagcggagtaa

SEQ ID NO: 73257 - DNA, 1770 bp, Acinetobacter sp. NIPH 758
atgaaatatacaaatgagcaaattagttatattaaagatgcaaaaattacagagaatatttttttaaatgcatgtcctggcagtgggaaaacagaaactattgctcaacgagtagctaatgaaattgagagttggagtaatttccctagcggtattgcagttctgtcatttacaaagagtgcggctaaagaaatcgagcatcgaattaaaaaaaaaataaaaggacaatcaacctatcctcattttattggtacatttgatagctttattttaaaaaatattgttaatcctcttgcaaaagatatctctaaatatgaaggagataaaggagattattcatttaaagtagtgaattataattcacagctattcttcctaacaaaccgtaaatatggctatagttttcaaaaaatttctggacatcatgtagaaattgatggccgaacaggagattttaaatttcacacaccagatcaaaaactaaatagagctcttaataatattacttttgatcagtcgcagaaaaaagatatatttgatgcaaagaagagatgtcgtgatgcaggttttttaactcataaagacatagaatatcttgccgaatcaatccttaatgagcgagctaatacacaagaatatgctaaaaaaatagcaaaaagatttccacttgttattgtcgatgaatgccaagatctttcttttgaacaattaaacattctaagagccataatgctgaatggagctaaattacattttattggagatctaaatcaatctatatatgagtttagaggagttgatcctgataacattattgaatttatatctgagaataattttcaggaaataaggttaactaaaaattttagaagctgtcagaaaattgttaatattgctacaaatattatgaaatctgatcccatagtagcaaattttgaatctctaaatccatcatgttttgttctgcaatatgataactcacctagtgaggtcatccatcgctttgatgagttgacaaaagaatatactaatagagtaattgtggctagaggccatcaaactttaaaacaactatttattgttgatagcacaccgaagcttgcagcagagttcttactaagctcaattttaaactttgatgaggcaagttatacttcgatcaatcagtctttaattgaattctcagaatttattaaaaacaaggttcagttagaaactaaatcaagcgactataattgccctcaagttattgaatctgaattagattggagattatttctatataattctattcagtatttattaaataatgacctaaaattagatagttgtacatggacagattggagtaaaaaagttaatgctgtaattattaatttacataaacaagaatttgtacttcctgaaatttatgaagcattagaaaaatctaactttagaattaaatctccaagtaataaagcatcagtttgtatatctaattttcgtcgagaagatactgtatctaatatcagttttagaaaatcaacaatccatggtgtcaaaggtgaaacacatgaagcaactatgctaatttcaaatcctactcgtaatggcgatggtacacattggtcacattggattcgggataaaacatcagaagctgcaagatttgcttatgttgcatcttcaagaccaaagcatattttagtatggggtgttaaaaaactcaaatcatcggaaaaaactgaattaaagagtttaggatttgaaatattggatataaaataa

SEQ ID NO: 73258 - DNA, 1695 bp, Acinetobacter sp. CIP 102082
gtgctaattggtgaaaatgattctggaaaaactgcaataatagatgccattaaattggttttaaaaactcatagctacgattacatcaaggtagaagataaagatttttttgatggctctacacgatttagaattgagcttgaattttgtggcttaactgatgatgaagctaaaaattttacagaatggttaggatggaaaggtactggagctgatacccaaacatttttaaagttaaattatgatgttacgcgtaataaaaacaaaattaatccatcagatgtaaaggctggtgcagactcagaaggctatctattaacagctgaagccaaagaatatctgaaaacaacatatttaagacctttaagagatgctgaaaatgagttgatctcaaaacgaaattctcgactttctcaaattttattaggcgatcctacttttaaaaacaaagatcaaaatcatgaactcgttcatatgtttgaaggtctgaatacaaatttaaaaaaatattttaaaggagaggaaataagttttattgataaagatggtaaaaaaacaactgaaacatatgaagatggaaaaataattaaagagaaaattgatggttacatcaaaaaattttataacgatgagatttttacagaatttaatgtttcatccacagaattaaaaagcattttagaaaaattttctctttttttagagtctcagagaaatgtaggtctaggtactttaaatcgactttttatggcagcagaattacttcacttaaataaagaggattggcatggtttacgtttaggattgattgaagagttagaagcacatctgcatcctcaggctcagatgcaagtgattgaagcattacaacaacaaaaacaaattcaactcattctttcaacccatagtccaaatttagcctcgaaagtcaaattagaaaatttaattctctgtaataaaggcaatgcttttcctttagggaaagaatacacaatgctaaagcctgatagttataaatatctagaaaaatttctcgacaccactaagtcaaacctgttctttgctaaaggagtgattctagtagagggatgggctgaagaaattctaattccaagtttcgctaaagctatagaaatagatttaacagccaaaggaatatctgtcgtaaatattggtggtgttggttttcaacactttgtcgatatttttcttcgaaagcaagaacctcatatgactattcctgttgcagtgattacagattccgatgtaagaacttatgaaaaagttggcgaagactacaatcccaaatcttctaaagtactaggaagtgaaattgcaaataaacttaaagaaattaatgaaaaatcgaatcaaaatgttaaatattatgctgctgagcaatggactttagaatattctatttttaaatccaaaaaacttacatcctcatttcaaatacatgctaaagcaattcatactaaaacttcgtgggatagtaattttgaattagagcttgctaaaaaattaattaaccaaggactaaaaaaaacagaaatagcttatcgtttagcacatgatttagatgtggaaatgaaaaaagaaaaacctgttagaactataaatttacacgaaacagattcgacagacagtatttattatttaatcgaggcgattcgatatgtcacaaacagttga

SEQ ID NO: 73259 - DNA, 1998 bp, Acinetobacter sp. CIP 102082; identical to SEQ ID NO: 73247

SEQ ID NO: 73260 - DNA, 2100 bp, Acinetobacter bereziniae NIPH 3
atgcgcattgaaaaaattaaagtagaaggttttaggcttctggagaatgtcgaattcggattggaagagaattcaactgtaattgttggacgtaataatagtggaaagacatcttttaccagtatttttgattgtttttgtggtgaatctggaacaagatttcggctagaggatttttcagttttatcacgagagaaatttttaaaagctaaagaattaagagaggcgggggaaagttcagaagtaatattcgaagcacttcctcgaatttctcttacacttacatttcaatataataaactttctcctgatttaggttctctatccccttttgttattgatttagatgaagactctacaacggctattgcgcgagttgagtatcggcctattttgaaaaatatgcatttgctttttgaccttaccccatcttccgcagtggttgaacctcgtacacatttttataaaaatttgaagggtaatttgtctaaagcttatggggttcatgtaagtgcagttgatcctactgatattacaaatacgagagattttgaaggcacatctgctttaacagcattattacaatgtaactttgtattagctcaaagaaatcttgataaaacaaaactaggggatgctgatgtaataggtaaattgcttagtgagctatttaagacagctacagcaccatctgctgctgaggcagatcaaaatttagctataagattaaagcaatctgttgaaaatattgagcataatgtccaactcgactttgatggtatgcttaaagaattattaccagttatgaacgtaatgggattcccaagtcttaatgatactgagataagaccagagacatcattaaacgtggaatcattattatcagggcatactaaggtcgtttatagcggagttgatggagtacatttaccagaagggtataatggtctaggaacccgtaatttgatttacatgttgctacagttagcaagctatcacaaaatctatagatcaaaatcaattagccccgctactcatttaatatttattgaagagccagaagctcatttacatcctcaaatgcaggaggtttttatcaatcaattaaatgtggctgttcaaaaattatcagaaaattattctaacaaagataaatggaatatccagtttgttatcacaacacactccccacatgttgcgaatgctgcaaaatttgatgctgttagatatttttataatgaaattcataagatagaaaacgtacgtcagacaaaggttaaagattttaagaaggggttgagtagtatttctgttaaagatcaaaaatttttacatcaatatatgaccttaacgaaatgtgatctttactttgctgataaagctatcttagttgaagggacaacagaacgtttattaatgccaaagttatgtcaattagttgatgagtctcttgatgaaccacaaaaactagccagacaatatgttacttgtgttgaggttggtggagcacatgcgcatattttttacccacttcttgactttctggagttgaaaacgttagtaatcactgatctagattcaacaaaaaaaggcaaaataactaagaatggaaaacaggaagatgcatgggtgaaatgcccagtagttgatggtcagaatacatctaatgctgccattaaaaactggttttatcctaaagaagtcgatgatactggtaaagttaagaaaaaagctaaaaatgaggatagtcaaatttccccgtcagtcttgattgctaaaactgctcaagagaaacaaattaagttccgtagaattgcatatcaaataccagaagatccagaaactaatatatgcgctagaagttatgaggatgctttcatattagctaatctttctaaatttgaattacctgaaggacaagatattgctgttgctgcttgggaaaaagcacaagggcttattaaatctgatttcgccttagaatatgcaattctaatagaagattggtcggcaccaagatatatcaaggaaggtctaatttggttatctgaaatggacactataaaaaaatcaaactatgaattaactacaggcgaataa

SEQ ID NO: 73261 - DNA, 1734 bp, Acinetobacter bereziniae NIPH 3
atgagtgagattctagacaatccagcaataattgcagctcaactagctgaagcaaaaattaatgcagctataaaagcaggacgaagtttccgactagaagctggcgcaggtgcgggaaaaacattttctttagttcatgctctaaaatccattattaaagagcgtggtagatcattaacgcaaacaggtaaaaaagtagcttgtattacttatacggaagttgcaagaaatgagattgcccaagaaattgaagaccatccagcaattttagtcgatactatacatggattctcatgggcttttatgcgccaatttcaaaaagccataagagagattcttattgaagatgattcaagaaaagaaaaagttgaacaaggtggtggcattgggtctaaatcagtggaatacgagttgggcttttttggtgttaatgatcagaaaattacactgagtcatgatgatatcccaacgatgatggctaaattactaaataaagaaaagtttcggaaaatatttagcaatcagtttccggtagtttttattgatgaatatcaagataccaatcgccaatttatggatgctattacagagtatttcttaaaaccaaaggtgggaccactttttggtctttttggagaccattggcagactatttatggtagtgaatatgaattggcagagtatccaatcgaagagattgcaaagggatcaaattttcgatcagttccagcaattgtagatatattaaataatttaagaccagacttaccacaagctgtcagttcgccagatgccaaaggtgaagctagattttttcatactaattcttataaggggacacgaacagatgagagaagttctaaagatgatttaccaatagatatagctcgatctactcgtacaagtttgatacagaggctacaaaatgaggggtgggatattgaaaaaactaagatactgatgttaagccataatgttttagcatctgaacaaggataccctcaattaattaaagtatttgacggacgtaatgatcaatttgctaaaaaagaagaccctgtaataaaattttttgcagaaatagttgaaccaatgagtgttagctatagcttatcaaattatggtgaaatgtttaaaatctttggctcaaggcctgcaataacgaagcatgaagataaatcttgttggcgacgggatatggatcaattattaaaactaagacaagaggggactatagggcaagtgatagatcatcttaagcagacaaaacgtccctcccccccagatagagtgcttagacgagatgatgagcttatttctctaagaaattcacctgacacggaaatgtcttcaacactacttcgttataataaattaagagaaattccatataaagaagtaatcgaagttacaaagtttattgaaaagcaaactccatttgcaactcagcacagtgttaagggggcagagtttgagaatgtattagtagttttaggtggtggatggaataattataaatggccacagcttctcgagttgcttgagactaaaaagttgactaatgcaaacacaaaaggtttttatagagctcgtaatcttttctatgtatctatttctcgcccaatgacgagactggccgtgttagctactcagacattatctgatacagcacttgtaacagtgaataatctatttggaagtgagaatgtaatagaattaagtttagatacatag

SEQ ID NO: 73262 - DNA, 1607 bp, Acinetobacter gerneri DSM 14967 = CIP 107464
atgttcatatcagctatcaaaatagagaattttcgtaattttaagcatcaagaaataaactttaatgaaggtgtaaatgtaataattggtcacaataatgctggcaaaaccaatttattaactgccctttctctagtagtaaatcctgataaaaataaaagattagatgttgatgattttaataaaaatgttccattttcagagttaaagacatccccccctaagataagtattcaagtcactttaaaaaaaggatgtgattcattacccgatgatttagctatggttgcaaattggctgactaagctagaatctgattttgaggctaaattgacttatgaattttttcttccagaaaaagaagtgcctaaatatatctctgctatgtcagaaattgatggaactcaggaaaattgtcgaaatacggcatggaaaacaataaaaaatgaatttatacgactttattcttataaaatttacggtggcgagattgctaatcgtgctatagcagatggggaatcactcagcaaatttgattttcaattcttagatgcgatccgagatgtagaaagggatatgctaacagggaaaaatacattattaaaaaatgtatttgatttcttcatggactatgacattaaaagtgattccataaaatctgaagaaaataaaattacagaaattaaaacacgaaaaaataactttttatcagacatagaaccagtaattaattctattcaaaagcgtatggaattagggaaagaacaaatattatcttatgcagatgggacaggagcttcatttaataaggctaaacctaattttgaagggaatatttcagatatagaaatgttttcttttctaagattaattattgaatatgaaacaggaattaaaataccagcaactcataatggtttaggttataataatctgattttcatatctttattgcttgcaaaaatgcaagtaaattctgacggaaagtatatgggtgataatgcaaaagtattttcagcgttagttattgaagagcctgaagcccatctccatccagcaatgcaatataagttcctacaatttttaaagaagaataaaaaagaaggaaaagtacgacaaattttcgtaacttcacattctacccatattacatctgcggtttcactttcagaaattatttgtctgtacaaagacgctgatgaaacaaaggttagttatccagataagatttttcctattgatggaaaaagtaagagatatgtacaaaggtttttagatgctacgaaatcagacattttgtttgcacagaaaattttgtttgtagaaggtattgctgagcaattactaatgtctatttttgctgaatatcttgataaatctttagaagatcatcatgttgctgtagttaatgttggtggaagatacttcaaacatttcctacatttatttgatagtaataaacaaaatacaatttataaaaaagtcgcatgcattacagatattgaccctgtaaggaaaaagaaaaacactgctgacactgctgacactgctgacactgctgacactgctgacactgctgacactgctgacactgctgacactgctga

SEQ ID NO: 73263 - DNA, 1692 bp, Acinetobacter gerneri DSM 14967 = CIP 107464
atgtcaataatacagatagattcaaatacaaagtttcaggatattgaacatcactttaaagttagtgctggtcctggagcaggtaagacccattggttagttgagcacataagaaatgtactccattgctcaaaacgacttggtaaaatacgaaaaattgcctgtatcacttatacgaatatagcggttgaaactattttgacgaggttgggtacttcagcaacacaagtagatgtttcaacaattcatagttttctttatcgtcatattgttaaaccatacgtttttttgatagcagatgagtatgggctgaattattctaaacttgatgggcatgatgagttaaatcactcgtacagtaaaataaataattggttagaattaactggtcaaaaatattttattagtgagcaaaataaattaatacaggctttagattctgttcaatggcaattacagagtgatggcgaaatatatttgcaacttcctgctactaaagcttacttaggtaaaattactcacttatatattaaaaaagctagttatattgattatagaagacagcattggtcatcagggaaaattcatcatgatgatgttttattttttagttatcaattgattataaaattcccttatattttagaggtgattagagctaagtttccatactttttcattgatgagtttcaagactgtaatcctattcagcttgctataataaaaaaaattgcagagtctgagactatagtcggagttataggtgaccctgcacaatctatttatgagtttcaaggggcggtatatgcccaatttaattcttttagattgccacagattggtttttatgaaatgaatcaaaataatagaagcacttctaaaattataaacttattaaatagagttagagcggatattacccaaataccagtgagacaaatagaatgtgatctaccatatttgattgtcggtaatcaaaatcaaacaatatatgctataaaaaacaattacggtattgatgatttctgtagcctttctcgtttgaatatcgattctaatgcacttaaaatcgaactagataaaacttcattagtaaataatctatttgacagattggcagaagataataatccaataagaagaaaaattttaatatgcagtgttaaagcaattgaattagccagagagaaaaaatttaaagattctattaaggagttgtcaaaagtttttcctttaaaagagttttcattaaatatttctttagcttatttagtgaatattttaaatgaatataatgactttaaagacaaaagtttaagtgactttattgaaattttaaggaagtactcaggattagaaattcccaaactacgtaaaggaaaagcaaaagatttatatgatgctcacctgtataatcaacttagtatatgcataaatattcctgatgatatgagtttaaataaaacaattcataagtcaaaaggagatgaatttgataatgtagttttgttcctaaaaagcgaaaatgatcttgaatttataaaaaatccaaatttaatgataaatgaagagcatcgtataaattacgttgctattagtcgtgctaagaacaggctctttatttcagtaccgtcattagaagttacaaatgagcctaaatttagtgagcactttgagattcttagatgttaa

SEQ ID NO: 73264 - DNA, 2100 bp, Acinetobacter nosocomialis NIPH 386
atgcgcattgaaaaaattaaagtagaaggttttaggcttcttgagaatgtcgaattcggattggaagagaattcaactgtaattgttggacgtaataatagtggaaagacatcttttaccagtatttttgattgtttttgtggtgaatctggaacaagatttcggctagaggatttttcagttttatcacgagaaaaatttttaaaagctaaagaattaagagaggcgggggaaagttcagaagtaatattcgaaacacttcctcgaatttctcttatacttacatttcaatataataaactttctcctgatttaggttctctatccccttttattattgatttagatgaagactctacaacggctattgcgcgagttgagtatcggcctattttgaaaaatatgcatttgctttttgaccttaccccatcttccgcagtggttgaacctcgtacacatttttataaaaatttgaagggtaatttgtctaaagcttatggggttcatgtaagtgcaattgatcctactgatagtacaaatacgagagattttgaaggcacatctgctttaacagcattattacaatgtaactttgtattagctcaaagaaatcttgataaaacaaaactaggggatgctgatgtaataggtaaattgcttagtgagctatttaagacagctacatcaccatctgctgctgaggcagatcaaaatttagctataagattaaagcaatctgttgaaaatattgagcataatgtccaactcgactttgatggcatgcttaaagaattattaccagttatgaacgtaatgggatttccaagtcttaatgatactgagataagaccagagacatcattaaacgtggaatcattattatcagggcatactaaggtcgtttatagcggagttgatggagtacatttaccagaagggtataatggtctaggaacccgtaatttgatttacatgttgctacagttagcaagctatcacaaaatctatagatcaaaatcaattagccccgctactcatttaatatttattgaagagccagaagctcatttacatcctcaaatgcaggaggtttttatcaatcaattaaatgtggctgttcaaaaattatcggaaaattattctaacaaagataaatggaatatccagtttgttatcacaacacactccccacatgttgcgaatgctgcaaaatttgatgctgttagatatttttataatgaaattcataagatagaaaacgtacgtcagacaaaggttaaagattttaagaaggggttgagtagtatttctgttaaagatcaaaaatttttacatcaatatatgaccttaacgaaatgtgatctttactttgctgataaagctatcttagttgaagggacaacagaacgtttattaatgccaaagttatgtcaattagttgatgagtctcttgatgaaccacaaaaactagccagacaatatgttacttgtgttgaggttggtggagcacatgcgcatattttttatccactccttgactttctggagttgaaaacgttagtaatcactgatctagattcaacaaaaaaaggcaaaataactaagaatggaaaacaggaagatgcatgggtgaaatgcccagtagttgatggtcagaatacatctaatgctgccattaaaaactggttttatcctaaagaagtcgatgatactggtaaagttaagaaaaaagctaaaaatgaggatagtcaaatttccccgtcagtcttgattgctaaaactgctcaagagaaacaaattaagttccgtagaattgcatatcaaataccagaagatccagaaactaatatatgcgctagaagttatgaggatgctttcatattagctaatctttctaaatttgaattacctgaaggacaagatattgctgttgctgcttgggaaaaagcacaagggcttattaaatctgatttcgccttagaatatgcaattctaatagaagattggtcggcaccaagatatatcaaggaaggtctaatttggttatctgaaatggacactataaaaaaatcaaactatgaattaactacaggcgaataa

SEQ ID NO: 73265 - DNA, 1734 bp, Acinetobacter nosocomialis NIPH 386
atgagtgagattctagacaatccagcaataattgcagctcaactagctgaagcaaaaattaatgcagctataaaagcaggacgaagtttccggctagaagctggcgcaggtgcgggaaaaacattttctttagttcatgctctaaaatccattattaaggagcgtggtagatcattaacgcaaacaggtaaaaaagtagcttgtattacttatacggaagttgcaagaaatgagattgcccaagaaattgaagaccatccagcaattttagtcgatactatacatggattctcatgggcttttatgcgccaatttcaaaaagccataagagagattcttattgaagatgattcaagaaaagaaaaagttgaacaaggtggtggcattgggtctaaatcagtggaatacgagttgggcttttttggtgttaatgatcagaaaattacactgagtcatgatgatatcccaacgatgatggctaaattactaagtaaagaaaagtttcggaaaatatttagcaatcagtttccggtagtttttattgatgaatatcaagataccaatcgccaatttatggatgctattacagagtatttcttaaaaccaaaggtgggaccactttttggtctttttggagaccattggcagactatttatggtagtgaatatgaattggcagagtatccaatcgaagagattgcaaagggatcaaattttcgatcagttccagcaattgtagatatattaaataatttaagactagacttaccacaagctgtcagttcgccagatgcaaaaggtgaagctagattttttcatactaattcttataaggggaaacgaacagatgagagaagttctaaagatgatttaccaatagatatagctcgatctactcgtacaagtttgatacagaggctacaaaatgaggggtgggatattgaaaaaactaagatactgatgttaagccataatgttttagcatctgaacaaggataccctcaattaattaaagtatttgacggacgtaatgatcaatttgctaaaaaagaagaccctgtaataaaattttttgcagaaatagttgaaccaatgagtgttagctatagcttatcaaattatggtgagatgtttaaaatctttggctcaaggcctgcaataacgaagcatgaagataaatcttgttggcgacgggatatggatcaattattaaaactaagacaagaggggactatagggcaagtgatagatcatcttaagcagacaaaacgtccctcccccccagatagagtgcttagacgagacgatgagcttatttctctaagaaattcacctgacacggaaatgtcttcaacactacttcgttataataaattaagagaaattccatataaagaagtaatcgaagttacaaagtttattgaaaagcaaactccatttgcaactcagcacagtgttaagggggcagagtttgagaatgtattagtagttttaggtggtggatggaataattataaatggccacagcttctcgagttgcttgagactaaaaagttgactaatgcaaacacaaaaggtttttatagagctcgtaatcttttctatgtatcgatttctcgcccaatgacgagactggctgtgttagctactcagacattatctgatacagcacttgtaacagtgaataatctatttggaagtgagaatgtaatagaattaagtttagatacatag

SEQ ID NO: 73266 - DNA, 1800 bp, Acinetobacter junii CIP 107470
atgtacttatcaaacataaaactttggaattttagaaaatacggtgaagttggaagtccttttgatctagctgaacctaatttagaccttaattttacaaaaggtctaaatgtactaattggtgaaaatgattcaggaaaaactgcaatcatagatgcaattaaattagttttaaaaacacatagttacgattacatcaaagtagaagataaagacttttttgatggttctacacgatttaggattgagcttgaattttgtgatttaactgatgatgaagcaaaaaattttacagaatggttaggatggaaaggtactggagtcgatgcccaaacttttttaaagttaaattatgatgttacgcgtaataataacaaaattagcccatcagatgtaaaggcaggtgctgactcagagggttatttgttaactgcagaggctaaagagtatctcaaaacaacatatttaagacccttaagagatgctgaaaatgagttggtctcaaaacgcaattctcggctttctcaaattttattaggtgatcctactttcaaaaacaaagatcaaaaccatgaactcgttcatatgtttgaaggtcttaatatgaatttgaaaaaatattttaaaggtgaagaaataaaattttttaataaagatggtagtgaaacaattgaaacatacaatgacggaaaagcaattaaagataaaattgatggttacattaaagatttctataacgaaagtatttttactgaatttaatgtttcctcaacagaactaaaaagtattttagaaaaattttctctttttttagaatcacaaagaaatgtaggtttaggcactttaaatcgactttttatggcagcagagttgcttcatctaaataaagaagattggcatggattacgtttaggattaattgaagagttagaggcccacttacaccctcaagctcaaatgcaagtcattgaagctttacaaagacaaacaaatattcaattaattctttcaacacatagccccaatttagcgtcaaaagtcaaactggaaaatttaattctttgcaataaaggtaatgcttttcctttaggaaaatcttatacaaaattagctgatgaaaattacatatatcttgagaagtttcttgatgtaacaaaagctaatcttttcttcgctaagggtgtaattcttgtcgaaggatgggcggaagaaattctaattccaagtattgcaaatgctataggaatagatttaactgcaaaaggcatttctgttgttaatattggtaatgtcggttttaagcactatgaaaatatttttcttagacaaactccgccacatatgactattcctgtagtagtaattacagattctgatatacgcacatataagaaagattcactaaagaaaattccttcgagaaaaattaaacgaaaaacaaacttaaaacttatatctattaaaaataaatctaagcaaaacattttatattttccagcacctaaatggacactggagtattgcttgtttcaatcatctaaattatcagaattatttaagaatcatgcttcagctattcattccaaaacagattggagtacaaattttgaactagcattagctaaaaaattaatcaataaaacgttaaataaaacagaaatttcttatcgaattgctcgtgatttagatgaggaaatgaatagaaatgaatctgacagaacattaaatcttcatgaagctgaatcaacagacagtatttactatttaatcgaggcaattcaatatgtcacaaacagttga

SEQ ID NO: 73267 - DNA, 1989 bp, Acinetobacter junii CIP 107470
atgtcacaaacagttgaaatcacagatgaagatatacgatacgcagaaaatattttattacctcaaggtaagatctttgatgatgaacggcgtaggtttattcgtaatttatctacgatagatttacaagcagttcctggcagtggaaaaacaacagctcttttagcaaaactattaattttagaaactaaactccctttagctaatggttcaggaattttggttttatctcataccaatacagcagtggatgaaattaaagaaagaattcataaatactgcccaaaactttttcgttatcctcattttattggaacgatacaaagtttcgtaaatgagtttttagctgtcccttattatctttttagacttaagaaaaaaccactacgtattgataatgaaatatatgcagaacaaatagaatttgctctttcatacaatacaaaaatagctctttcaaaacgaagcataaattatattgatatattaagcaattcatttataagtaataatggaatttttcagcatttctggagcaataacgaagtaaatattccaaaaattggtagccatacaaatacatataaagaattagcaaccataaaaattaatttactaaagactggcattcttagctttggcgattgctatgctttagcacaaaaatatctaagtaattatcctattatccataaaattattaataaaagatttcaatacgtatttatagatgaaatgcaagatatggatactcaccaatatgagcttattgaaatcatatttgcagaaaataatgatacaaacactataattcaaagaattggagataaaaatcaatccatttataattcaataaaagctgaatcaatttggcaagatagagaccatattcttcatctttctaatagtcaacgtttaagtagaccaatcgcaaatattgttaaaaattttgcactgtatcctgaacattgtatggatattcaaggcatgaatgaatgccaacttaaaccgcatatattattattttcagattcatctattaagaatgttatcccttatttttctcaactagtgcaacaatataaagcttctgatgaactaaaatttcgtcaagataaacctctagaaataaaaatcataagttggaatactgactggaaagatgatgaagctagccgctctaatcccactaagctcagattagaagattatcaccaagcttttaaaaaaaatgagcagaaacctaaagaagactataaatgcttaaagagttatattcatttttatgataaaaaacatactactctatctgtaattagaaaaaatatttttcatgctctacttaagattttgagaattgaaaatatttcgacaaataaaaatcgcctttataccatttcaaatttaattaactacttaaaggtaaaatcagagctaaattattcagacctaaacttaaaagtatatgaatgttgtttaaaaataattagaaatgaaaaaaatcaggctttgtccgacttacaaacctatattcctgtattcatttcttattttaaagaaaatcataaactttcttcaatgtgcagtgattttatcaataatgatacaactggcattgaccaaactagtcagaatcatattcccgcttcaaatattattgaagaaaatgatctaaaaattgaaattactagtgtacattctgtcaaaggacaaacacatgatgcaacactatatttagaatcatattattatgaagatgggagaggcaataatgctaaatcttatgaatcacaaagacttgcaaatcaatttttaggaaatccgtttaatctaaccacagaaagagcgaaacaatcaacaaaaatggcatatgtaggattttcacgagcaactcagctgctatgtatagcgattcacaaggatagatttgaacaatacttgaacacaatagatcgagatatatgggaaattaaggatatatccagttaa

SEQ ID NO: 73268 - DNA, 1616 bp, Acinetobacter junii NIPH 182
atgtttatatcaaagatcgaaataaagaattttcgtaattttaaacatcaagaaataagttttaatgaaggtgtaaatgtaataattggtcataacaatgctggaaaaactaatttattgacagctctttcattagttgtaaatcctgataaaaataaaagattagatgtagatgactttaataaaaatgttgcattttcagagctaaaaacatcccccccgaagataagtattcaagtcactttaaaaaaaggatgtgattcattaccagatgatttagctatggttgcaaattggctgactaagctagaatctgattttgaggctaaattgacttatgaattttttcttccagaaaaagaagttcctaaatataccttagctatgtcagaaattgatgaaactcaggaaaattgtcgaaatactgcatggaaaacaataaaaaatgaatttatacgactttattcttataaaatttacggtggcgagattgctaatcgtgccatagcagatggggaatcactcagcaaatttgattttcaattcttagatgcgatccgagatgtagaaagggatatgctaacagggaaaaatacattattaaaaaatgtatttgatttcttcatggactatgacattaaaagtgattccataaaatctgaagaaaataaaattacagaaattaaaacacgaaaaaataaatttttatcagacattgagccagtgattaattctattcaaaagcgtatggaattagggaaagaacaaatattatcttatgctgatggaacaggtgcttcatttaataaggctaaacctaattttgaaggaaatatttcagatatagaaatgttttcttttctaagattaattattgaatatgaaacagggattaaaataccggcaactcataatggtttgggttataataatctgattttcatgtctttattacttgcaaaaatgcaagtaaattctgacggaaagtatatgggtgataatgcaaaagtattttcagtattagttattgaagagcctgaagcccatctccatccagcaatgcaatataagttcttacaatttttaaagaagaataaaaaagaaggaaaagtacgacaaattttcgtaacttcacattctacccatattacatctgcggtttcactttcagaaattatttgtttgtataaagaagctgatgaaacaaagattagttatcctgatacgatttttcctcttgatggaaaaagtaagagatatgtacaaaggtttcttgatgctactaaatcagacattttatttgcacagaaaattttgtttgtagaaggaattgctgagcaactattaatgtctatttttgctagatatattggtaaatctttagaagatcatcatgttgctgtggtaaatgttggtgggcgatacttcacacatttcctacatttatttgatagcaacaaacctaaaacaatttctaagaaaattgcttgtatcacagatattgatccagaaagaaaaatgaagcctactgatcctactgatcctactgatcctactgatcctactgatcctactgatcctactgatcctactgatcctactgatcctactgatcc

SEQ ID NO: 73269 - DNA, 1692 bp, Acinetobacter junii NIPH 182
atgtcaataatacagatagattctaataaaaggcttgatcatattgagcatcattttaaagttagtgctggaccaggagcaggtaagacacattggttagttgaacatataagaaatgtgctccaccactcaaatcgacttggtaaaatacgaaaaatttcctgtattacttatacgaatatagcagttgaaacaattttggctagattgggtacttctgcgactcaagtagatgtctcaacaattcatagctttctttatcgtcatatagttaaaccatatgcctttttgatagctgatgagtataatttagactactctaaacttgatgggcatgatgaattaaatcactcttacagtaaaataaataattggttagaattaactaatcaaaaatattttattagtgagcaaagtaaattaatagatgctttagattctgttcaatggcaattacagaatgatggcgaaatatatttgcaacttcctgctactaaagcctatctaggtaaaattactaaattatatattaaaaaagctagttatattgattatagaagacagcattggttatcaggaaaaattcatcatgacgatgttttattttttagttatcaactgattacaaaatttccttatatcttggaagtgatcagagctaagtttccatacttttttattgatgagtttcaagactgtaaccctattcagcttgctataatagaaaaaattgcagagtccgagactataatcggagttataggtgaccctgcacaatctatttatgagtttcaaggggcagtatatacccaattcaattcttttagcttacccaacatcaaattttatgaaatgaattttaataatcgaagtaccattcaaattattaatgtattaaataaagtcagatctgatattacccaaatttcagtaaggcaaatagaaggtaacttaccatctttgctgattggcaatcaaaaccaaacaatccaagctgtgaaaaaatgttgcggtgatagtggtttttgtagcttatctcgtctgaatattgactcaaatgtactgaaaagtgaactagatagtaatactgtagtaaataatttatttgataggttggtagaagatagtaatcaagaaagaaggaaaattttggcttatcatgttaaagctattgaattagcaagagaaaaaaaatttaaagattccttcaaagaattgtcaaagatttttccagtagaaaccttttcattagctttctcattaacttatttgtcgaatctattatctgaatatgatgattttaaagataaaagcttaagtcactttattgaaattataagacaactttcaggacttactgtcgctaaactacaaaaagggagagccaaagaactgtatgataatcatatatataatcaaattagtatatgtgtaaatattcctgatgatacgactttaagtaaaacaattcataagtcaaagggtgatgagtttgataatgtggtcttattcttaaaaagtgaaaatgatcttgagtttataacaaatccaaatttaatgataaacgaagaacatcgtataaattacgttgctatcagtcgagctaagtacaggctctttatttcagtaccatcattagatactgtaaatgagcctaagtttagtgagtactttgagattgttagatgctag

SEQ ID NO: 73270 - DNA, 2082 bp, Acinetobacter junii CIP 64.5
atgcgtatcgaaaaagttagagttgaggggtatagacttcttgaagatattgagattgtattagaaaagaattcaactgtgattgttgggcgaaataatagcggaaaaacatcttttactagcatatttgattgtttttgtggtgagtcaggagcccgttttaggttggaagatttttctagtttgtctcgtgagaagtttttaaatgcaagaaaattgaaagaagagggggcaagtccagagcagatatataatacactgcctataatcactctttctttgacatttcgatacgatagtgatgccccgactttaggacctctttcaccatttatcattgatttagatatggactctacaacagcgattgcttgtattgaatataggcctgtcttagcaaaaatgcatttgttgtttgatttacctcaaccaccagtaggtatggaacctcaaatacatttttttaagtgtttacgtaataacttatcaaaaatttacgaagtgcatgttagtgcgatagatccgacggataagtctaataagagaaatttcgagggtacttcagcattcgcagcattattacaatgtaactttgttcaagcacaaagaactcttgataagacaaagcttggtgaggctgatgttatcggaaaattacttagtgaattgtttaaaacagctgctgcaccaacggctacagaatctgatcaagagttagctgcgaaattaaagaaatctgttgaagatattgagcttaatgttcaaagtgattttgacaaaatgctcaaaaagttattacctgttatgggggtgatgggttttccaagtcttaatgatactgaattaaggcctgaaacttcattaaatgtagaggcacttttgtctgggcatacaaaagttgtttatagcggtacagatggtgtgcatttacctgagggatataatggtcttggtacgcgaaatttaatctatatgctgctacaacttgaaagctatcacaaaatttaccgatctcaaattactcgcccttcagcccatttgatattcattgaagaacctgaagctcatttgcatccacagatgcaggaagttttcattaatcaattaaatgctgctattcaaaagctttcgagtgcctatccagcagaagacgtttggaatgttcagtttattattactacacattcttctcatgttgctaatgcggcatgttttgatgcagtaagatatttctataaccagaaagattcagtgaaaagtattagaaatactaaagttaaagattttaaaaagggcatgcaaacaatatcttctgctgataaagggttcttgcataaatacatgactctgactaagtgtgatctttattttgcagataaagtgattatggttgaagggacaactgaacggttattaatgcctcgcctcagagaattagttgatatatccttaccagaacatcaaaaattagcaagccagtatgtaacttgtattgaagctggaggggctcatgctcatcttttttatccactcctcgactttcttgaacttaagactctagtcattaccgatttagactcaactaaaatggtggaaaaagaaaataagaagaaagtaaaaaccaaaatatgggaaaaatgtccagtagctcaaggtgagagaacctctaatgcggctatcaaggattggtttcgtcctaaagatttagatgaaaaagtaatttggcaaatatctccagctgatttaattgctaaaaatgccatagaaaagcaggttaactttcgtcgaattgcctaccaaatccctgaagatccaaaaactaatatttgtgcaagaagctatgaagatgctcttattttagcgaaccttaatcaatttccattaccaagtgaagacgatgttgctacagaagcttgggaatatgcgcagggacttactaaagcggatttcgctttagaatatgcaattcgtgtaaaagaatgggttgtacctcgatatattcgagaaggcctgatttggctttctgaatctgatgttcctatacaaaatttagaaccattagacaaaggaggagcagcatga

SEQ ID NO: 73271 - DNA, 1734 bp, Acinetobacter junii CIP 64.5
atgagtcagattaaagaaaatcctgcactagttgctgcacaagaagctcagagaaagatcaatcaggctctagatgcgggttatagttttagacttgaagcaggtgcgggagcaggtaagacatattctttggtagctgcactcaagagactaatcgacgaacgtggttcaacgttagtacagtcaggcaaaaaagttgcttgtattacttatacagaagttgcacgcaatgagattgctcaagaaattgaagatcatccggcaattcttgttggcacaattcatggcttctgttgggcattcattcgtcaatttcagaaggcaatacgtgatttggtaattgaactaaaggataaaaaagagaaagttgaacaaagtggggggattggatcacagttagtagaatatgatctgggattctttagtgtagatgagatgcgcattacacttaatcatgatgatattcctgaattgatggcaatgcttttagctaaggaaaagtttcggatgttatttagtcagcaatttccagtaatttttattgatgaatatcaagatactcatcgtcaatttatggatgctattactgattattttttaaagtcgaagactggaccaatcataggtcttttcggagatcattggcagactatttatagtagtgagtatgaattagctgaatacccaattgaagaaattgcaaagggttcaaattttcgatcagttcctgctgtagtaaatgttctaaacgctttacgcccagagcttccacaagttgttagcttaccagaagccaaaggtgaagctcggtttttccatactaacagttataatgggcctagaacgaatacagcacattcaaaggaagatttaccttctgacatagcacgtagttgtcgtgaagagttgatggctaggttaagagtagaggggtgggacttaaaaaagacaaaagtattaatgcttagtcacaatgttttggcagttgaacaaggttatccgaaaattgttgaattatttagaggtcgtacagaacagtttacaaaaaaggaagatccggtcattaggttctttgctgaagtaatagagccaatgtgcatggcttatagttcatcacattacggagatatgtttaagatattgggtgctagacctgctattacaaaacatgaagataaaatgttgtggcgtagagatatggatcgattgctaaagttgagaatagaagggactattggtcaaattatagaccatttaaagattactaaacgtccatctctgcctgatcgtatacttagaagagaggaagagcttatttcattgatgggcatacctgaagttgaaatgtcttcaagatcacaacgttataaaaaattaagagaaatcccgtataaagaagttatcgaggttacaagatttattgaaaagttaaccccttttgcaacccagcatagtgttaagggtgctgagtttgataatgtattggtaatcttaggtggagggtggaatcattataattggcctcagcttcttgagctacttgaaactaaaaagctgactaagacaaatatgaaaggtttctatcgtgctcggaatcttttctatgtatctatatctcgcccaatgacgagacttgctgtgctggcaactcagtcattgtcagacactgcacttcttacagtgagtaatctttttggaagtgagaatgttgaagagttaagttttggtacataa

SEQ ID NO: 73272 - DNA, 1227 bp, Acinetobacter ursingii DSM 16037 = CIP 107286
ttgaatggactaggtttcagaaggttaatttctattactttaacattgatagattttcgtgaaacttggttacgcaagaataaattagatcaagagcccatagagcctttacatttagttcttattgaagaaccagaagctcatttacatgcccaagtacagcaagtctttataaagaaagcatatgagaccttgtgtctaggtcaacctagtcattgtggaacacaattattggtaagtactcattcaagttatttagctcgagaactagacttttcaaatctgcgttactttaaaaggaaaaatagtgatgcgataccacatgcagaagtagtagatctttctagaacttttgatgaaaattcatcacagaatgagaagtttgtaactcgatatattagaactactcattgcgatttattttttgcaaatggggttatcttagtcgaaggcgatgctgaaaggttattattaccgcatttcattaagaatcactttcctaaacttaatagcagttatatctctatactctcagttgggggagcgcatgcacatcgattaaaaaatttaattgaaaaacttgccttaccgtgtttgattattacagatctagattcagttagaatggaaattcagacggatgaagatgggaatattaaaatgaataataataataatgctgaaaaagtaaaatataaaaagtgtgtacctttacctaatgcaaatcaattaacaaataatgatactttaaaaacatggtttcctatcaaggagaaaattgatgatttgttaagtttaaaatatgaagacaaaactaatggtaatataagggtaagttatcagactcaagtttctttgaattttaatgatgaaaataaaatagtatttccttacacatttgaggagtctatttattttgaaaatagaacttggatcaacactatttttaaaaaagatgttgataaagatgatcctcgtataaaagcgactggcgttttgttaaaaatgatgaaagctgaaggttgtgaggattttaatgattttagacagagtattttttcagccctagaaagcaataaagttgatatggctatggatttaatttatggtctggagccaaaggatttaaaaacaccaagatatattgatgaggggttaacttggctagaaaataaaatattaggtattgacgatttagcgcaaggagaagctaatgaagtctgttaa

SEQ ID NO: 73273 - DNA, 1842 bp, Acinetobacter ursingii DSM 16037 = CIP 107286
atgaagtctgttaattctttagttttagaagatttaatatttgattatgtatcttcatctcctccacaaagtttcattctatatgcaggtgcaggtgctggaaaaacccatacattacatcaggtattaaataaaataaaggaagatattcttttatctcttggtagagaaaataaaaaacttgctgttataacatatacaaatgctgcctgtgatgaaattaaagagcgggtaaattttgataataatttttttgtcagtacaatacatagctttgcttggagtttaatatcaccctttacaaaggagattaaagatattattaaagagaatttgaaggaaattattaatgaagaggaaaaggcattaaaaaaatctagagatttaaataataaaaccagtatcggtagacaagagagaattaggaagtctttaaaaagattgtcttcattagaatcaactagatgctttaattacaatccaaattattcaaatgttgaagaaagttcattagaacactcagaagttatagacatcttttcaaaattattagtagaaaagaagtcatttagaaaaattttggtgaataaatttcctattctatttttagatgaagctcaagatacctatgaaaaagttattgatgcattagtccaaacgcaaattgaatttcatagtcagtttgtaatagggttatttggtgataatatgcagcgaatttttactaataataagaaagatttaagtaagtttattcctgaaaattggaaacgcccagaaaagattgagaactggagatgtccgaaaagagtagtgacattaattaataaagtaagattcgatgccgataaatttcaacaagaatctaaagttaatcataatggatttgctcgctgtttaattgttgatacaaataagccgaatttagataaattgttagttgaagatgaaatatgcaaaacaatgagagaaataaccaatgatgataaatggaatataaggtctgagataaaaaccttaattttagagcatcacatggctgcaactcgttctggatttcataagttctataaaccattatatgattcggcattacgaagtaaattgagtgccgctgatactcagtctttaagatttttagtgggtactttttgtgaatttattaactctgtaaaatctaaaaataactttaatatcataaggatattgaggagtagttcagatatttttcttgatttctctactgtggaagatcagttgagttatttgaaaaatataagagataaaaaaaatgagttgtttgatctcttgatggatagtagtaactctataaagattattctcaattatatttatcagactaaccttttgaacattccaccattattaatacaggcattaattttagataattatgctgtagatgcagacagtagctcctccgaacttattgcgtatagtcaagccttagatgcaaaaatagatcaactatttaaatatgcatcttatatagatggaagttcggcattcgatactcatcaaggagttaaaggattgcagtttgagagggtcatggcgatattagatgatgatgaagctggaggttttttatttaactatgataaatttttaggtattaaaagtttaagtgatagtgataaaaagaacgaagctcaaggagaggataatgcattgtctcgcactcgtagacttttctatgtaatttgtagtagagctgagaagagtttagctgtggtttgctatacgaaaaactctgagcttttaaagggtaaattaattgaaaaagaatggttcgatgaaagtgaaatacatttaatttaa

SEQ ID NO: 73274 - DNA, 2097 bp, Acinetobacter ursingii ANC 3649
atgcgcattgaaaaaattaaagtagaaggttttaggcttcttgagaatgtcgaattcggattggaagagaattcaactgtaattgttggacgtaataatagtggaaagacatcttttaccagtatttttgattgtttttgtggtgaatctggaacaagatttcggctagaggatttttcagttttatcacgagaaaaatttttaaaagctaaagaattaagagaggcgggggaaagttcagaagtaatattcgaaacacttcctcgaatttctcttatacttacatttcaatataataaactttctcctgatttaggttctctatccccttttattattgatttagatgaagactctacaacggctattgcgcgagttgagtatcggcctattttgaaaaatatgcatttgctttttgaccttaccccatcttccgcagtggttgaacctcgtacacatttttataaaaatttgaagggtaatttgtctaaagcttatggggttcatgtaagtgcaattgatcctactgatagtacaaatacgagagattttgaaggcacatctgctttaacagcattattacaatgtaactttgtattagctcaaagaaatcttgataaaacaaaactaggggatgctgatgtaataggtaaattgcttagtgagctatttaagacagctacagcaccatctgctgctgaggcagatcaaaatttagctataagattaaagcaatctgttgaaaatattgagcataatgtccaactcgactttgatggcatgcttaaagaattattaccagttatgaacgtaatgggatttccaagtcttaatgatactgagataagaccagagacatcattaaacgtggaatcattattatcagggcatactaaggtcgtttatagcggagttgatggagtacatttaccagaagggtataatggtctaggaacccgtaatttgatttacatgttgctacagttagcaagctatcacaaaatctatagatcaaaatcaattagccccgctactcatttaatatttattgaagagccagaagctcatttacatcctcaaatgcaggaggtttttatcaatcaattaaatgtggctgttcaaaaattatcggaaaattattctaacaaagataaatggaatatccagtttgttatcacaacacactccccacatgttgcgaatgctgcaaaatttgatgctgttagatatttttataatgaaattcataagatagaaaacgtacgtcagacaaaggttaaagattttaagaaggggttgagtagtatttctgttaaagatcaaaaatttttacatcatatgaccttaacgaaatgtgatctttactttgctgataaagctatcttagttgaagggacaacagaacgtttattaatgccaaagttatgtcaattagttgatgagtctcttgatgaaccacaaaaactagccagacaatatgttacttgtgttgaggttggtggagcacatgcgcatattttttatccactccttgactttctggagttgaaaacgttagtaatcactgatctagattcaacaaaaaaaggcaaaataactaagaatggaaaacaggaagatgcatgggtgaaatgcccagtagttgatggtcagaatacatctaatgctgccattaaaaactggttttatcctaaagaagtcgatgatactggtaaagttaagaaaaaagctaaaaatgaggatagtcaaatttccccgtcagtcttgattgctaaaactgctcaagagaaacaaattaagttccgtagaattgcatatcaaataccagaagatccagaaactaatatatgcgctagaagttatgaggatgctttcatattagctaatctttctaaatttgaattacctgaaggacaagatattgctgttgctgcttgggaaaaagcacaagggcttattaaatctgatttcgccttagaatatgcaattctaatagaagattggtcggcaccaagatatatcaaggaaggtctaatttggttatctgaaatggacactataaaaaaatcaaactatgaattaactacaggcgaataa

SEQ ID NO: 73275 - DNA, 1734 bp, Acinetobacter ursingii ANC 3649; identical to SEQ ID NO: 73265

SEQ ID NO: 73276 - DNA, 2139 bp, Acinetobacter beijerinckii ANC 3835
atgcatatttcaaaagtcagcttagttaattatagaaattttaaaaattcttctttcctatttaaagaaggagttaatacagtaattggggaaaatggatcaggtaagacaaatttatttaacgcaataaggttactcttagatgactcttgtattcaatatgcatataaactaaatgaaaatgattttaatagagaactcggcggagattggaaagggcattggataattattagtattgattttgataagttggacagtaacgaggctatacagtctttgtttgtccacggcgcgggagtacttgaatcagaatctgtaagcaaggcgtgctatacgcttttctttagacctaaaattcatattagacataaacttgctgatttggatgaaggggatatagttgggttacaacaggtactagaaaaaataaatattcaggatgactatgaaactgtattccatggaaaaagttcagctaattataatgatccgagcatctacgaaagtttagttggtaattttacagatgttaaatttcctagagatattgatgcttcaaaatttggagtgagggtccctcatcaattatcagtatctaaagaaatttctttcacatttatacaggctttgagagatgtagttagtgaattcaaaaacaatagaactaatccattattaacattattaaaaagaaaaagtgatgaaattaagcaagaagaatatcagcctattagtgagttggtcttgacattaaacggggctatagaaaatctatctgatgtacaagaaattagaaatgatattaaaaatacgcttttaggtacaattggtcgtacttactcgccatcttccttgtcaataaagtctagcgttccaaatgaggctgaaaaattactacaatcattaaaactttttatgagtgaaccagatgaggagtatgagggaggggttcatgagttaagtttaggtagtgcaaatttaatttttttaactttgaaactacttgaatttaaatatagaaaatcaaaagatacgtttgcaaattttttaattattgaagaacctgaagcacacattcacaatcacatacaaaaaactttatttgataaattggattatgaaaacacacagattatttactcgacacattcaactcaaatatcagaagtgagtaatgttgaaaatattaacattgtaagtaagaaaacaaacaattctgaggtatatcagccttcaacaggtttaagctctaaaagtattaatcagattcaacgttatttggatgcagttcgcacaaatctactgtttgcaaaaggggttattttggtggaaggggatgcagaagaaatcctaattccaatcttaattaaaaatgtatttggtctaagtttagatgaattaggtataagtttaattaatattcgaagtactgggtttgaaaatgtttcccaaatttttcatgacagtcgtattcgcagatactgttcaattctaacagatcttgacagtgctatttgtgatacaaatgtattaccaaaagatagtgataaagttaaaaaatataaagaaaaagttgctagatctgcaaaaagtggtgcggaacgtaaaataaaattagatgaacttgaaaaagataatgattgggtaaaaagtttttatgcgaattatacctttgaagttgatttcattgctgcaggtaatagttttgaaattaaacggataattaaagatatttatactgatccagcaacctgtattaaagctaaagaagatataagtgatggcgatgtagcagtttttggccgtagagtcttgacgatggctaacagtgttggtaaaggttggtttgctattttactaggagggcatattacatatcaaacagaaataccagactatataatggatgcactaattttttctaaagaagattattctaaattcttattagcagatatgattgaatatagaataggtaggtatgaagcggcagatgattgtgatatagatttctctccattaagagagactttagaagagtataagttctcaggattatcattaaattctgtgattgaggaaatacaatctgtgatcgaagatgatcagattttaatttttttagatagattataa

SEQ ID NO: 73277 - DNA, 1800 bp, Acinetobacter beijerinckii ANC 3835
atgtatatattatcggatgagtctttaaaccatgagcaaaaagctgctatatacacaaatgataatgtgttattgattgcatgtcctggtagtggtaaaactagaactcttatttataaaattgcttatgaattgagtaagatgacatcatctaaacaatttgttatagctattacttatacaaatacagcagcggaagaaattaaagaaagagtggaaatacttggtgttgacactacacagctttggataggaacgattcattcattttgtttacattggatacttaggccatattacttatatttggataatctaaaaaatggctttacagtagttaattcatatgattctgaagaaattataacaaaattatgtgaaccatataaaaatgaaaaaattaaattttgggattgtggtgtaatagcaaagccaaatggtatttatttaacttgtagtgatcctaataagcaagcatcattgttaaagataatcagtgaatattatgaaatattgcaaaaaaataatcagattgattttgaacaaattttaaaatattcatgggatttgatttctaaaaaaaatataattagtaagtcacttagtaaaattttttcaacaatacttgttgatgagtatcaggatacaaaagaaattcagtattatataatttctgaaatattaaaatcaaacaatggcgatactaaaactcttatcgtgggtgatcctaatcaggctatttatgattctttaggaggctttccaatgccgaaagccgatttagaaattttattaggatttaatttggtttgtctcagtcttgagaaaaattatagatcatcagatagaattgtaaaatatttcgacttttataaagtagataataatactattattgcttcaggtgataattcagaatataagagcttaataacttacaataactcagtagcacttgatgatttaattgatgaaatttctcatttaattttattgaatataagagatcataatatttcccctgatgaaatatgtattgttgcacctcattgggttcatataggtgctattactaggaaacttatgattaagcatcctgatttgaactttaacggaccaggtatggcaccattttctagagatgttgataatttttggtataaggtttcaaaaattattttaactgagccatcgccagacatatatataagaaggttgagatggagcggtgaaatcttaaaagatcttgaattatttggagttaatattatagacatatcaaataaggatctacttaaaatttgtaattcaatcacaataaatgaaaatgatgggctagtatatttgagtaaattttttacaatactttttgaattgttaaatattgattgggaaaaaattcctactcttaaaagccactacgattcatttttcgcaagttcttatcaacgaatagaaaaactttctgcagagggattgagtggtgtagagactcttgaaaatttcaagaaagtttttaaacaaaaaggaggaataacggtgtcaactattcatggagttaaaggagaggaatatgatgctgtaataggtttcgctctacttgatggttttgtccctcattttagtgatccaaagggtgagttaaattctaaaaagatgctttatgttctggcatcaagagctagaaaaaatttgcatttaatagcggaaagaatgagaaatccacatagttatcacgctcctaatggtaaagctcctacttctcatttagagctttacaaatattcttatgataattaa

SEQ ID NO: 73278 - DNA, 2100 bp, Acinetobacter haemolyticus CIP 64.3
atgcgcattgaaaaaattaaagtagaaggttttaggcttcttgagaatgtcgaattcggattggaagagaattcaactgtaattgttggacgtaataatagtggaaagacatcttttaccagtatttttgattgtttttgtggtgaatctggaacaagatttcggctagaggatttttcagttttatcacgagaaaaatttttaaaagctaaagaattaagagaggcgggggaaagttcagaagtaatattcgaaacacttcctcgaatttctcttatacttacatttcaatataataaactttctcctgatttaggttctctatccccttttattattgatttagatgaagactctacaacggctattgcgcgagttgagtatcggcctattttgaaaaatatgcatttgctttttgaccttaccccatcttccgcagtggttgaacctcgtacacatttttataaaaatttgaagggtaatttgtctaaagcttatggggttcatgtaagtgcaattgatcctactgatagtacaaatacgagagattttgaaggcacatctgctttaacagcattattacaatgtaactttgtattagctcaaagaaatcttgataaaacaaaactaggggatgctgatgtaataggtaaattgcttagtgagctatttaagacagctacagcaccatctgctgctgaggcagatcaaaatttagctataagattaaagcaatctgttgaaaatattgagcataatgtccaactcgactttgatggcatgcttaaagaattattaccagttatgaacgtaatgggatttccaagtcttaatgatactgagataagaccagagacatcattaaacgtggaatcattattatcagggcatactaaggtcgtttatagcggagttgatggagtacatttaccagaagggtataatggtctaggaacccgtaatttgatttacatgttgctacagttagcaagctatcacaaaatctatagatcaaaatcaattagccccgctactcatttaatatttattgaagagccagaagctcatttacatcctcaaatgcaggaggtttttatcaatcaattaaatgtggctgttcaaaaattatcggaaaattattctaacaaagataaatggaatatccagtttgttatcacaacacactccccacatgttgcgaatgctgcaaaatttgatgctgttagatatttttataatgaaattcataagatagaaaacgtacgtcagacaaaggttaaagattttaagaaggggttgagtagtatttctgttaaagatcaaaaatttttacatcaatatatgaccttaacgaaatgtgatctttactttgctgataaagctatcttagttgaagggacaacagaacgtttattaatgccaaagttatgtcaattagttgatgagtctcttgatgaaccacaaaaactagccagacaatatgttacttgtgttgaggttggtggagcacatgcgcatattttttatccactccttgactttctggagttgaaaacgttagtaatcactgatctagattcaacaaaaaaaggcaaaataactaagaatggaaaacaggaagatgcatgggtgaaatgcccagtagttgatggtcagaatacatctaatgctgccattaaaaactggttttatcctaaagaagtcgatgatactggtaaagttaagaaaaaagctaaaaatgaggatagtcaaatttccccgtcagtcttgattgctaaaactgctcaagagaaacaaattaagttccgtagaattgcatatcaaataccagaagatccagaaactaatatatgcgctagaagttatgaggatgctttcatattagctaatctttctaaatttgaattacctgaaggacaagatattgctgttgctgcttgggaaaaagcacaagggcttattaaatctgatttcgccttagaatatgcaattctaatagaagattggtcggcaccaagatatatcaaggaaggtctaatttggttatctgaaatggacactataaaaaaatcaaactatgaattaactacaggcgaataa

SEQ ID NO: 73279 - DNA, 1734 bp, Acinetobacter haemolyticus CIP 64.3
atgagtgagattctagacaatccagcaataattgcagctcaactagctgaagcaaaaattaatgcagctataaaagcaggacgaagtttccggctagaagctggcgcaggtgcgggaaaaacattttctttagttcatgctctaaaatccattattaaagagcgtggtagatcattaacgcaaacaggtaaaaaagtagcttgtattacttatacggaagttgcaagaaatgagattgcccaagaaattgaagaccatccagcaattttagtcgatactatacatggattctcatgggcttttatgcgccaatttcaaaaagccataagagagattcttattgaagatgattcaagaaaagaaaaagttgaacaaggtggtggcattgggtctaaatcagtggaatacgagttgggcttttttggtgttaatgatcagaaaattacactgagtcatgatgatatcccaacgatgatggctaaattactaagtaaagaaaagtttcggaaaatatttagcaatcagtttccggtagtttttattgatgaatatcaagataccaatcgccaatttatggatgctattacagagtatttcttaaaaccaaaggtgggaccactttttggtctttttggagaccattggcagactatttatggtagtgaatatgaattggcagagtatccaatcgaagagattgcaaagggatcaaattttcgatcagttccagcaattgtagatatattaaataatttaagactagacttaccacaagctgtcagttcgccagatgcaaaaggtgaagctagattttttcatactaattcttataaggggacacgaacagatgagagaagttctaaagatgatttaccaatagatatagctcgatctactcgtacaagtttgatacagaggctacaaaatgaggggtgggatattgaaaaaactaagatactgatgttaagccataatgttttagcatctgaacaaggataccctcaattaattaaagtatttgacggacgtaatgatcaatttgctaaaaaagaagaccctgtaataaaattttttgcagaaatagttgaaccaatgagtgttagctatagcttatcaaattatggtgagatgtttaaaatctttggctcaaggcctgcaataacgaagcatgaagataaatcttgttggcgacgggatatggatcaattattaaaactaagacaagaggggactatagggcaagtgatagatcatcttaagcagacaaaacgtccctcccccccagatagagtgcttagacgagacgatgagcttatttctctaagaaattcacctgacacggaaatgtcttcaacactacttcgttataataaattaagagaaattccatataaagaagtaatcgaagttacaaagtttattgaaaagcaaactccatttgcaactcagcacagtgttaagggggcagagtttgagaatgtattagtagttttaggtggtggatggaataattataaatggccacagcttctcgagttgcttgagactaaaaagttgactaatgcaaacacaaaaggtttttatagagctcgtaatcttttctatgtatctatttctcgcccaatgacgagactggctgtgttagctactcagacattatctgatacagcacttgtaacagtgaataatctatttggaagtgagaatgtaatagaattaagtttagatacatag

SEQ ID NO: 73280 - DNA, 1794 bp, Acinetobacter baumannii NIPH 527; identical to SEQ ID NO: 71916

SEQ ID NO: 73281 - DNA, 1782 bp, Acinetobacter baumannii NIPH 527; identical to SEQ ID NO: 71827

SEQ ID NO: 73282 - DNA, 1806 bp, Acinetobacter baumannii NIPH 67
atgtatttatcaaatataaaactttggaattttagaaaatacggtgagattggaaatacttttgatctagctaaacctaatttagaccttaattttacgaaaggtctaaatgttctgattggtgaaaatgattcaggtaaaacagcaatcatagatgccattaaactggttttaaaaactcatagctacgattacatcaaagtagaagataaagacttttttgaaagttcttcacgatttagaattgaactcgaatttagcaatttgacagatgatgaagctaaaaattttacagaatggttaggctggaaaggtactggagcagatgctcaaacatttttaaaactaaattatgatgttactcgtaatgataaaaaaattaacccttcagatgtaaaggcaggtgcagactccgagggttatttactaacagccgaagctaaagaatatcttaaaacaacatatttaagaccactaagagatgccgaaaatgagttagtctcaaaaagaaactctcggctttctcaaattttattgggggatcctacttttagaaataaagatcaaaaccacgaactcgttcatatgtttgaaggtctgaatacaaatttaaaaaaatattttaaaggtgaggaaataagttttatagataaagatggtattacaacaaccgaaacgtacgaagatggaaaagcgattaaagataaaattgatggatatattaaagaattttatgacgaaggtatttttagtgaatttaatgtttcatcaacagaattaaaaagcattttagaaaagttttctctttttttagaatctcaaagaaatgtaggtttaggtactctaaatcgactttttatggctgcagagttgcttcacttaaataaagaagattggcatggtttacgtttaggattgattgaagaactagaagctcacctacaccctcaagctcaaatgcaagtcattgaagctttacaaagacaaacgaatattcaattaattctctcaacacatagccctaatttagcctcaaaagtcaaactagaaaatttaatcctatgtaataaaggtaatgcttttcctttagggaaagactatacaatgctacagcctgaaagctataaatatctagaaatatttcttgatactaccaagtccaatctattctttgctaaaggtgtgatttttgtagagggatgggctgaagaaattttaattcctagtatcgcaaaagctatagggaaagatttaacagcaaaaggggtttctgtcgttaatattggtggggttggatttcaacacttcgtcaatatttttcttcgaaaacaagaaccacatatgaatattcctattgtcgtaattacagactcagatattagaacatatgaaaaagtaggcgaaaactacagtttaaaatcaacctctgatacacagcttcaaatagaagccaaacttcaagaatatgaaatcaaatcgcaacaaaagataaaatatttcgttgctaaacaatggacacttgaatactgcttgttcaaatcatcaaaattatccaacaaatttaaaaaccatgctaaagccatacattcacgcacgccgtgggatactaattttgaattagaactagctaaaaaattaatcaataaaaaattagataaaactgaaatttcttatcgaattgcctatgatttagatgatgaaatgaaaaaagatgaatctgaaagaacgttaaatcttcacgaagcagattcgacagacagtatttattatttaatcgaggcgattcgttatgtcacaaataattga

SEQ ID NO: 73283 - DNA, 1989 bp, Acinetobacter baumannii NIPH 67
atgtcacaaataattgaaatcacagatgaagatataaaatacgctgaggatatcttattgcctcaaggtaaaacttttgatgatgagcggcgtaactttatccgtaatttatctacgttagatttacaagcagttcctggcagtggaaaaacaacggcacttttggcaaaactattaattttagaaactaaactccctttttctgatggttcaggaattttagttttatctcataccaatgcagcagtggatgaaattaaagaaaaaattcatcaatactgcccaaaactttttcgttatcctcattttattggaacgatacaaagttttgtaaatgagtttttagctatccctttttatctttttaaacttaagaaaaaaccgctacgtattgataatgaaatatatgcagaacaaatagaatctgctcttccatacaatacaaaaatagctctttcaaaacggggcataaattatattgatatattaagtaattcatttataagtaataaagaaatttttcagcatttttggagtaatgacgaagtaaatattcccagaattggtagccatacaactacatataaagaattagcaaccatgaaaattaatttactaaaaactggcattcttagctttggcgattgctatgctttagcacaaaaatatctaagtaattatcctattatccacaaaattattaataaaagatttcaatacgtatttattgatgaaatgcaagatatggatactcaccaatatgagcttattgaaatgatatttacagaaaataatgatacaaatactataattcaaagaattggagataaaaatcaatctatttataattccataaaagctgaatcaatttggcaagacagagacaatgttcttcacctttcaaatagccaacgtttaagcagacctatcgcaaatattgttaaaaattttgcactgtatcctgagcattgttctgatattcaaggcatgaacgaatgccaacttaaaccacatatattattattttcagattcatctattaagaatgtgatcccatatttttctcaacttgtgcaacaatataaaggttctggtgaactaaactttcgtcaagagaaacctctagaaataaaagttataagttggaatacagattggaaagatgatgaaactagtcgctctaatcccactaaggtcagattagaagattaccaccaagcttttaaaaaaaatgagcagaaacctaaagaagactataaatgcttaaaaagttatattcatttttatgataaaaaacatactagtctatctatgattagaaaaaatatttttcatgctctacttaagattttaagaattgaaaatatttcgacaaatgaaaatcgcctttataacatttcaaatttaattaactacttaaaggtaaactcagagctaaattattcagatctaaacttaaaagtatatcaatgctgtttaaaagtaattagaaatgaaaagaatcaggctttgtctgatttacaaagttatattcctgtattcatttcttattttaaagaaaatcataggctttctacaaagtgtattgattttatcaataatgataaaactggtcttgaccaatttagtcaaaaccattcctctgtttcaaatatgattgaagaaaataatctaaaaatagaaattactagtgtacattctgtcaaagggcaaacccacgatgctacactatatttagaatcatattattatgtagacggaaaagggaataacgctaaatcttatgagtctcaaagattagcaaatcaatttttagggaatccttttaaccaatctacagaaagagctaaacagtcgacaaaaatggcgtatgtaggcttttcaagagcaactcaactactttgtatcgcaatagataaagatagatttgagcaatatctcaatacaatagatcgaaatatatgggaaataaaagatatatcgaactaa

SEQ ID NO: 73284 - DNA, 792 bp, Acinetobacter baumannii NIPH 70
atgagcattatccctgcagaagcatttttttcaagtggtgtttttttagttgagggcccatctgaagaaattctatataaggaactgttgcttaaaaataaagttgatattgattactacaatttatccgtttttgcagttggaggaattcaatttaaagtatttgcagccgttttaagagctctagaaataccattttcattaagaactgataatgatattagtactgtagaaatgaattgcaaagttcatggttttaataaaaatgactctttaaatccttgctatgtatataagaaaattgaaattaattatacagatgaaaaatgtataaaatggcaatatctaggagttaatagatgctatggaatattaaatagagattccgaaaaatggaagcatagtctttaccctttaaatagagttaatattttgggtgataaacggtggaaagcctttgaaaagatgataaatgcacatggcatatttatgtctaatatagatttagagtgtgatttagtaagtgttgcttctgaagaaattaagaaggcattaggtaaaaaaaataataatagtgcagtagattttctcaaaaaaagcaaagccctaaatatgcaaatattaatggctaaattagaaaagaaaggctttgaaaaaatttatgaaagtgattttggcaagccgattaggtacttaataaatttattattaaaacaatctgacactgacactgaatctccagttcttattaatacgaactctgaaactgccaaagaagtggtcttgttatga

SEQ ID NO: 73285 - DNA, 1620 bp, Acinetobacter baumannii NIPH 70
atgaagttgacgaatgatcaaataaaagcaattcaagatattgaaaataattcggtaatcatggcgtgtccagggagtggaaagactaccgttcttattaataaaatgagtttatgttgtgaaaagttaaaaagacataatggaataataggattatctttcaccagaaaatctagtgaagagttgagaagaaaatttcaaaagaagacgataagttcaaatctcaattatctaggtactatagatggctttctgatcaatgaaattattagaccttttttgccaaagctatggggcaatgagaacgatgatattgagatcgtaagtattttatcggaagaagaatctattccatttgtacaagagtttgcgaatggagaaatatatttaaaagatatagaaaatgataatgcttttaagggattatttttaagtggaaaaatatggcaaagaacagtaacacctttagctttgtttgtacttaaaaattcatcagtctgtagaagatacatatcatctcgatataaatacttgtttgtagatgaatatcaagatacttcatcaggacaacatctagtttttctagaaattttaaaactagggttgaaatttacagcggtaggagatattgatcagtcaatttacagatggcgtgatgctattcctgaaaatttaacttcgcttgtaaatgagcacgattttaaagaatatgctattgatcaaaaccatagatgtgacccatctattgatttatatgctagagcttttttaaaaggtatagatctagaagaaattgataaaaaaaacatatttggattgcatataaataattcaggaaaacatagatacgctaagttagatgattttatacaaaaaattaaagatgagaataattttgatttttcagattttgtgatattagcagctaataatgcaacggttcagcattatgctttgaatacgcgtcatagttatagaatttacgaagatgatcctcttgatagtatgaatcattatattgcacagttatgttctgatttgattttatataaattttgtaagaattattcaagttactcaatatatgagaattataagtctaggtttattaacattaaattaaatgattttaaggttgaagttaaaaaaataagaactgaaaatgatactgatgaaatttgtgaaataattaaaggcttaattaataaaactaattataaaggtgattgtgaaaattttattttggcaacaaaaaatatttttaatgatgaattcttgttgaaaaaatataaaccacataataaaaatgaattacaaataatgtcaattcataagtcaaaaggtttggagtttaaagttgttatccaccttggtttggaacaatgggtattgccacgtaaaacaaagaaacaaggtcaatggacttttagcgatttagaaggggataaaaatttacactatgttgcgatcacacgagctgaaaatctatgctatttagtagatatgcctataagagtaaaatcagaaaataacgtgtttaaagagatgaatgcaaataaatctgaattcctatgtattgaaagattgaacaagcatattgttgatctaggagttatgtag

SEQ ID NO: 73286 - DNA, 1449 bp, Acinetobacter baumannii NIPH 80
gtgaatggaagacaatctcgattatctaaattactaaagtttattgaagctaaccaacttaaaatatgtaaaagagatgaaaagaaacatccattagaagaaaaattcaaagagttcaatcaatcgctgatcgatgaaaaagattcaagcattaagaaagcaaatgagttgatcgcagaacacttgttaaaggctgttgggcagaattttagtcaatcaacacatatacaatttgttgaaaatgaattttcaaaaattgttgaaaacctaagattaattttctttcctaaaataacaacagcagaagcagatcagtttagagatttatgccaaaatagccttggctacaataacttattatatattgcttctatacttgcggaattaaccttaactaagggcgagtcattatatagactcttactcattgaagagcctgaagctcatttacatcctcaattacaggttcgtttgttagatcatcttgaggccgtagcaaatgatcataatgtacaagttattgttacgactcactcaacagttctagcttcgagtgtcaaattagataaaatcatacatttaactaaaaatgaaaaacctcaagccacagccttagcggaatgtggtctggctcccaataatttagattttcttaatcgctggttagatatcacaaaatctaatctactttttgcaagtggagtgatcttagttgaaggtatagccgaacaaatgctgatccctgagcttgctaagatagtattaaaagataaagaaattaataatattgaagattacggtgtatccgtaattaatttaaatggtatttatttcaaccacttcatgcgtctatattgtaatattaagggggtatcagacgtccaagaagatcaagaaggcttaaatattcctattcgttgtgcaggtattacagatttagatcctgagcaacactattataaagaagagatagttaaagaagaaaaaaaacaagtaaaatataatcataagcctccttctgaaaaaaatgaaattgtggggaaaaatcatgcgctcaagttagtgaaaagtattaatagttctgaacatgcccgtctctttgttgctggatataaaacattagaatatgacttagctatggaggaatgtaatgcaaaagttatggcccaaattctttttgatctttggccatcaaaaactggtgaagtgaagaaaggcttacagaaaatagtcaatgatgattacttaaaaattacacctgaacaaaaagcagatcatgcaatagaaatactaaaaagagtagatgatgacaatattggcaagggttattttgctcaagttttagcagataaaatttcttctggaatagttaaactaaaagtacctcaatatattgaagatgcaattctctgggcttgttcattagaaaactcttctgttgaggaatga

SEQ ID NO: 73287 - DNA, 1179 bp, Acinetobacter baumannii NIPH 80
atgaaatatacaaatgagcaacttagctatattaaacaagcaaaaattacagagaatgttttcttaaatgcatgccctggcagtggaaaaactgaaaccattgctcaacgagtagcgaatgaaatcgagagctggggcaattttcctagtggtatagcagttttgtcttttactaagagtgcagctaaagaaattgagcatcgaattaaagagaaaataaaaggacaatcaacttatccgcattttataggaacatttgatagctttattctaaaaaatattgttaatccactttcgaaagatatctctaaatatcaaggagataatggggattattcatttaaagtagtgaactacaattcccagttattttatttaacagagtattcccacggttatcaaaaaatttcagggcatcaggtagaaattgatagcagaacaggaagttttaaatttcatttaccaaatcaagatgcaaaccgcgcccttaatgctatggttttggaacaatggcgcaaagatgacatttatcgtgcgaaaaaaaaatgcagggatgcaggttttctaactcataaagatatcgaataccttgcagaatcagctctcactactcgtaccattacaaaggattatgcaaaaaaattagcaacacgatttcaacttatcattgtcgatgaatgccaagatttatcttttgagcaattaaatatcttaaaagcaatgatgctgaacggaacaaaattacattttgttggggatctaaatcaagctatatatgaatttagagatgttaatcctaatgacattaaacaattcatatctgacaacagttttagagaggttagattaactaaaaactttcgaagctgtcaaaaaattgtaaatatttctacaaatattatgaaatcaggttcaatcgaagcagatttcacatcacccgaacaatcatgctttgtacttcaatataaagattcacctagtgaagtgatctctcgatttaatgaactaacgaaacaatacagcaatcgagttttagtagctagaggtcatcagactttaaatcaactctctgctgtagaaagcacaccaaagctgccagcagagttcttactaagctcaattttaaactttgatgaaacaagttatcattcaatcgatcaatggcagagtaaaacttga

SEQ ID NO: 73288 - DNA, 1794 bp, Acinetobacter baumannii ANC 4097; identical to SEQ ID NO: 71916

SEQ ID NO: 73289 - DNA, 1782 bp, Acinetobacter baumannii ANC 4097; identical to SEQ ID NO: 71827

SEQ ID NO: 73290 - DNA, 1869 bp, Acinetobacter baumannii ANC 4097
atgatgaaaattgataaagtaattctaaaaggttttagaaattataaagatgcgacaataaattttaataataacactttaattattggtgaaaatgatgttggtaaaactaatctcatttatgcattacgcctcatgttagacagaagtgtttctgaattggatatagagccatcagagttggattttcatgtacagggtggtgtccagtctgaaaatttagaaatcataattaaattctttgatattaaagaagaagctgcattatccattttgaaagaacacgtaagtgatgatggagaatgtgtttttaaatacatggcttctaaagaaaatctagattacaaattatatcttggtcaaaatgagacagacttatctgaaattcaaagtcgttattatttaaaatatatcaatttaaagtatatttcttcccaaagagatttaagcaaatttattgctaaagagaaaaaacaattacttaggatctccaaaacaaagattactgaagaacaagaaaagcttgatcgagaaaacgtactagaaatttctaagcaattggttgacctagacgataaagttgcacaattagaatatgtaaaaactgctactcaagaagttaatttagaattaaagaaattagcttatgcccatgatgattatgatgtaaaactaaatgctagcggtatagaagtggatgattttattaataaattacaattaggggcaatgagcggtggctcaaatgttatgttgggtggtgatggacgtaataatcaaattttaattgctttatggaaggcactgagcgaatttgaacacgattcaaatgatgaagtagtgttttatgttgttgaggagccagaggcacatttacacccacatcaacaaagaaaattagctagttatttatcttcagaattacaaagtcaatgtttaataacaacacactctccgcaaatagcctcaagtttttcgccaagttctattattagattatttaagaaagatttctctacaattgcggccagtaatggttgtacaaaagaactagaaaaagcatgggaagaattaggttataggatgagcattatccctgcagaagcatttttttcaagtggtgtttttttagttgagggcccatctgaagaaattctatataaggaactgttgcttaaaaataaagttgatattgattactacaatttatccgtttttgcagttggaggaattcaatttaaagtatttgcagccgttttaagagctctagaaatacctgtttcattaagaactgataatgatattagtactgtagaaatgaattgtaaggtttctagttacactagaattgatggtgtaaatccttgctatgtatataaaaggattgaaattaattataaagaagaaaaatgcaaaaaatggcagtatttgggggttaatagatgctatggagttttaaatgaaaattctgaaaagtgggaacatagcctttatcctttaaatagagctaagattctaggtgataaaaggtggaaagcttttgaaaagatgattaattctaaaggcatatttatgtcaaatagggatttagagttggacttagtaagtgttgcttcagaagaaattaaaaaagctttaagtaaaaaaactgatactagctcggttgattttcttaaaaccaataaggcactaaatatgcagatattagtatcaaaattagaagatgaagggtttaagaaaatttatgaaagttattttggtgagcctataagatatttaataaaaatattaatgagtaagcctatattaaaaactgaatcggaaattgaattagaaactgaatatgctcaagaagaaggtgcagcatga

SEQ ID NO: 73291 - DNA, 1611 bp, Acinetobacter baumannii ANC 4097
atgaaacttactgatgatcaaataagagcaattcaagatttagaaaataattcagtaatcatggcatgccctgggagtggtaagaccaccgttcttatcaataaaatgagtttatgttgtgaaaagttaaaaaggcataatggagtaataggattatctttcactaggaaatctagtgcagagttgaaaagaaaatttcaaaaaaagatgcgaaattctaatcttaactttctaggtactatagatagttttttaatcaatgaaattattcgaccatttttgccaaaattatgggatattgaaatagatgatattgaaattataaatattttgtcagaagaagaatctattccatttgttcaagagtatattacaagagaaatatatttaagtgatatagaaggtgatattgcttttcgagggttatttttacaaggaaaagtttggcaaaaaacagtaacacctttggctttgtttgtacttagaaattcatcaatctgtagaagatatatatcatctagatataaatatttatttgtagatgaatatcaagatacttcctcaggacatcatttaatttttctagaaattttaaaactaggattgaaatttacagcagtaggagatattgatcagtcaatttatagatggcgtgatgctattcctgaaaatcttacttcactcgtaaaaaattacgaatttaaagaatatattattgatcaaaaccataggtgtgatccatctattgatttgtatgcgagagttttcttaaaagacctagatctagaagaaaatgatgaaaaaaaaatatttagattacatataaatgattcaggaaaacacagatattctaaattagatgattttatacagaaaattaaagatgagaataatttagaattctcagattttttgatattagcagctaataatgcaacacttaaacattatgctatgaatacgcggcatagctatagaatttatgaagatgatcctcttgagagtatgaatcattatattgcacaattatgttctgatttgattcagtataaattttgtaacaattattcaagttactcaatatatgaaaattataaaggtaaactgattagtattaaacttaatgatttcaaggctatagcaaaaaaaataaggtgtcaaaatgatactgatacgatttgtgaaataattgaagagatgattagaaaaattaaatataaaggtgactatgaaaattatatcttagcagcaagaaatattttgaatgatgagtttctattgaaaaaatataaaccaaataataagaatgaattacaaataatgtcaatccataagtcaaaaggtttagagtttaaagctgttatccatctaggtttagaagcatgggtattccctagaatgactcgacgacacggtcaatggattttacaagatttagatggggacaaaaatttacattatgtcgcgatcacaagagctgaaaaattatgctatttagtaaacatgtctataagagtgaattcacaatttgaggaaaggactgcggaaaagtctgagttcttatgcatcgaaaaactaaacaagcatattgttgatctaggagttatgtag

SEQ ID NO: 73292 - DNA, 2100 bp, Acinetobacter sp. NIPH 284; identical to SEQ ID NO: 73260

SEQ ID NO: 73293 - DNA, 1734 bp, Acinetobacter sp. NIPH 284
atgagtgagattctagacaatccagcaataattgcagctcaactagctgaagcaaaaattaatgcagctataaaagcaggacgaagtttccgactagaagctggcgcaggtgcgggaaaaacattttctttagttcatgctctaaaatccattattaaagagcgtggtagatcattaacgcaaacaggtaaaaaagtagcttgtattacttatacggaagttgcaagaaatgagattgcccaagaaattgaagaccatccagcaattttagtcgatactatacatggattctcatgggcttttatgcgccaatttcaaaaagccataagagagattcttattgaagatgattcaagaaaagaaaaagttgaacaaggtggtggcattgggtctaaatcagtggaatacgagttgggcttttttggtgttaatgatcagaaaattacactgagtcatgatgatatcccaacgatgatggctaaattactaaataaagaaaagtttcggaaaatatttagcaatcagtttccggtagtttttattgatgaatatcaagataccaatcgccaatttatggatgctattacagagtatttcttaaaaccaaaggtgggaccactttttggtctttttggagaccattggcagactatttatggtagtgaatatgaattggcagagtatccaatcgaagagattgcaaagggatcaaattttcgatcagttccagcaattgtagatatattaaataatttaagaccagacttaccacaagctgtcagttcgccagatgccaaaggtgaagctagattttttcatactaattcttataaggggacacgaacagatgagagaagttctaaagatgatttaccaatagatatagctcgatctactcgtacaagtttgatacagaggctacaaaatgaggggtgggatattgaaaaaactaagatactgatgttaagccataatgttttagcatctgaacaaggataccctcaattaattaaagtatttgacggacgtaatgatcaatttgctaaaaaagaagaccctgtaataaaattttttgcagaaatagttgaaccaatgagtgttagctatagcttatcaaattatggtgaaatgtttaaaatctttggctcaaggcctgcaataacgaagcatgaagataaatcttgttggcgacgggatatggatcaattattaaaactaagacaagaggggactatagggcaagtgatagatcatcttaagcagacaaaacgtccctcccccccagatagagtgcttagacgagatgatgagcttatttctctaagaaattcacctgacacggaaatgtcttcaacactacttcgttataataaattaagagaaattccatataaagaagtaatcgaagttacaaagtttattgaaaagcaaactccatttgcaactcagcacagtgttaagggagcagagtttgagaatgtattagtagttttaggtggtggatggaataattataaatggccacagcttctcgagttgcttgagactaaaaagttgactaatgcaaacacaaaaggtttttatagagctcgtaatcttttctatgtatctatttctcgcccaatgacgagactggccgtgttagctactcagacattatctgatacagcacttgtaacagtgaataatctatttggaagtgagaatgtaatagaattaagtttagatacatag

SEQ ID NO: 73294 - DNA, 1764 bp, Acinetobacter sp. NIPH 713
atgaaaattgataaaataattctaaaaggctttagaaattataaagatgcgacaattaattttaataataacactttaattattggtgaaaatgatgttggtaaaaccaatctcatttatgcattacgcttaatgttagacagaagtctttctgaattggaaatagagccatcagagttggattttcatgtgcaagggggtgtccaatctgaagagttagaaatcataattaatttcttggacattaaagaagaagctgcattatccattttgaaagaaaacgtaagtgatgatggagaatgtgtttttaaatacatggcttctaaggaaaatctagattacaaattatatcttggtcaaaatgagacagaattatccgaaattcaaagccgttattacttaaaatatatcaatttaaagtatattgcttctcaaagagatttaagcaaatttatttctaaggagaaaaaacaattacttaaaatctccaaaacaaagattaccgaagaacaagaaaaacttgatcgagataacttactagaaatttctaagcaattggtagaattagacggtaaagttgcgcaattagaatatgtcaaaactgctacaaaagaagtcaattcagaattaaaaaaattagcatatgcccacgatgattatgatgtaaaactaaatgctagtggaatagaagttgctgattatattaacaaactacaactaggggcgatgagcggtggctcaagtgttatgttaggaggtgatgggcgtaataatcaaattttgattgccttatggaaggcactgagcgtctttgaacatgactcaaatgatgaagtagtattctacgttattgaagagccagaggcacatttacaccctcatcaacaaagaaaattagctagttatttatcctcagaactaccaagtcaatgtttaataacaacacactctccgcaaatagcctcaagtttttcgccaagttctattattagattatttaagaaagatttttctacaattgcggccagtaatggctgtacaaaagaactagaaaaagcatgggaagaattaggttataggatgagtattatccctgctgaggcttttttttcacatggtgtgttattagtagaaggaccttctgaagaaattttatataaagaaatgctctttaaaaatgagattgatattgactattataacttatcaatattttcagtaggaggaatacaattcaatgtctttgcaaaggttcttcaagcattagaaatcccctttgcatttagaacagacaatgatgtaagtacaaccactatcaaaagtattaaatattggcagtatttaggtgtgaacagatgccttggaattttgaataaaaacaaatgggaacatagtaatattgaaataacccgtacagacatacttacagatccacgttggacagagtttgaaaaaacaataaattctcatgggatatatatgtccaaagtcgatttagagaatgacttagttagcttaatagaaagtaatattttagaagccttgaaaaaagaatcggcacaagaggctattgattatttacaaggtaaaaaagctttaagaatgcaaaaattagtagcgcaacttgatcaagacggatttgaaaaaatatatgaaagtgattttggtgaacctataaagtatttgctagaaagattaatgcataaatctcaattagaaagtgaattagcatcttcagatgttgcagaagaggttattgtatga

SEQ ID NO: 73295 - DNA, 1620 bp, Acinetobacter sp. NIPH 713
atgaaatttacagatgatcaaaaaaaagcaattaaagatattgaaaataactcagtaatcatggcatgtcctgggagtggtaagacgactgttcttattaataaaatggctttatgttgtgaaaagttaaaaagacataatggagtaataggattgtcttttactaggaaatctagtgcagaattaagacaaaaatttcaaaaaaagacaatcaaatcaaatcttaattatttgggtactatagatagctttctaataaatgaaattattcgaccatttttgccaaaattatggcggattgaaattaatgatattgaaattataaatattttatcagaagaagaatctattccatttattcaagaatatatgactagagaaataaatttaagtgatattgaaaatgatagtgcttttcgaggattattttcacaaggaaaagtttggcaaaaaacagtaacgcctttggctttatttgtacttaggaattcatcagcatgtataagatatatatcatctcgatataaatacttgtttgtggatgaatatcaagatacttcatcaggacaacatttaatttttctagaaattttaaaattagggttgaaatttacagcagtaggagatattgatcagtcaatttatagatggcgtgatgctattcctgaaaatttaagttcgctcgtaaatgagcatgattttgaagaatatactattgatcaaaaccatagatgtgacccgtctattgatttatatgctagagtttttttaaaaggtacagatttagaagaaattgataaaaaaagtatatttaaattgcatataaataattcaggaaaacacagatacattaagttagatgatttgatacaaaaaattaaagatgagaataattttgaattttcagattttgtgatattagccgcgaataatgcaacagttcagcattatgctttgaatacgcgccatagttatagaatttacgaagatgatcctcttgatagcatgaatcattatattgcacagttttgttctgatttaattttatataaatttggtaagaattattcaagttattcaatctatgaggactataaatctcggtttattaatattaaattaaatgatttcaagggtgaagttaaaaaaataagaaccgaaaatgatactgataaaatttgtgaaataattaaaagtttaattaatagaactagttataaaggtgatactcagaaatttattctagcaagcaaaaaaattttgagtgatgcattcttattaaaaaagtataaaccacacaataaaaatgaattacaaataatgtcaattcataagtcaaaaggtttagagtttaaggttgttatccacattggtttagaacaatgggtattgccacgtaaaacaaagaagcaaggtcaatggacttttagcgatttagaaggagataaaaatttacactatgttgcaatcactcgagctgaaaatttttgctatttagtagatatgcccataagaataaaattagaagatgaagcgtttaaagagatgagagcaaatcaatctgaattcttaagtattccaagactcaacaagcatattgttgatcttggagttatatag

SEQ ID NO: 73296 - DNA, 1698 bp, Acinetobacter sp. NIPH 1867
atgtatattaataaggtaaaaataaataactaccgaagttttcgttcttttgaagcccaacttcaaaaattaacaatcgttgttggagagaacgataccggtaagacaaacttttttactgcactatcattaccgcttagcggaaatcagataaatttcaatcaaaagcggttaagcatttcggatattaacaaagattccgttatcgatttcttcacgtcaataatcactaatgaagccaaagaaaatcagctacagaagatccctaaagtatctgtaactatagaattcactgatcccaaggacagttatgaggctgcgttactagctaaatggcttgttgccgatggagataaagaaacttatcaaattaggtatgactttaagcctaaagatgacgtagatttacttgaagtagttaaggctactcttgcgggtaaaactatcgaagaggtgaactggtttactctccccattgagctgtacgactaccaaattgtttcagtaaataatggaaaaactataaatttcattgatttacaaaatgtgagtatccataacatcaatgctgaacgagatgacttctctgaaagtagctcaatgaaatctaatagcatcttcacaaaattgctgatgaatacgcttggtgatgaggataaaagtaagattaacacggcttattctgaattctttactgctattgaagacacacaaacattcgaaaaggtcattgggactaatccagaatttgataattacgatgacattatcaaaaaattagaatgcattcctaacttacctaatttaaaaaatattttatctaatattacgctgagatacggtaatgaatttctgtatcagaaaggtttaggtcaacgaaatttaatttatattctcattctctttgcttactacaagtcgtgtggtagaacatttaatttatgctgtattgaagagccggaagcacacctaagtgttaataatctacgcttagtgagggatttcatcgagaaaagttctactaatagcagctcgcttgtacagacaattatttctactcataatccaacgatcattaataagttgaatctttcgaatgttttggcattcactggtgaaaaagcaattagcctgtcagatgcttcacctaagttagttgactacctaagaaaaagaccaaatttcgatatactaaaactgttattcgccaacaaagttattttggtcgagggtacgaccgaagagatgttaattagtacatttttatcaaaaaaagaaaatctccaagacatagaaattatagctattggccaacgtggctataccaatttcctagatatatggcttatgttaaataaagataatcctaataaaaaaattggtgtgattcgtgactatgataattctgaagcagcaaaagcaaagcatgatatttacgatttagataatgcaaatattagtgtcagaacaactaaaaattatactttagaaattgatttagttgaaactgaaggaaatctaagcttactaaatacattgttcagaatgtctggcgatgtaaagtcagtctcagatcatatgatcggtggtaaagcatcacggatgttagatgtatgtgatgcgatggtcgaagaaaaaaatccgctagacattaaactgccagcgcatattgccgaagttattgaggctgtatcatga

SEQ ID NO: 73297 - DNA, 1374 bp, Acinetobacter sp. NIPH 1867
atgattgaaattcaaattgcaggggctggagctgggaaaacttatgggttagcagaagctctaatagttcatatcaaagcctgtacaactcataaaaagacatttgctttgacgtataccaattcagccacagcaaagatcgagcaagagataatcaagcaacatgggtttatcccacaaaacctttatatacagacagtgcatagtttcttgcttaatgaaattgtgtatccattttcgtcatttacgcttgacgatgtatacaacgattcatcaattatgcacgttggaaattctaattataaaaataggcttttcaagacgctaagagagaaaaaaatcattcacgcagaaaatgtctacaatatttctaaacagattgttgatgagatgataagtaggcacagtaataaagccaaaaaagccaaggtaaagcgacttttggcaattcttgaaaattgttttgaaaaaatatttatagatgaagttcaggatcttgatgacgatgctctccgattcttcgaagtattaggaagcaatggaattgatgtgtacatgataggtgacccaaaacaagcaataaagcatccaaaagcttttgatacttttgttgataaagtatttgcaaaagaatacgtcaatatgcttgagatcaacaaccaaactatacgtgtacctaaaaagattcttgctatctctaatggcttttgctacgaaggacaacagcaagaatcactatccgatgttgttggcgagttaatgtatatagaatctactgatgctaaatatgatgaattgcttagtagctatataagtacgaagcaaattgtttgtattgataagaaagtaggaagatattcaacctcttccaagcataagcattcatttcctcaagaaattgaagaaatgattcgtgagtctaaacataataaagatagagtattattcgccaaagcagctttttctgatttctttaatgatgtagagaagtatggagcaaagatggcaataaataatcttagaactaggcatttattaacgtttgagaaaaagcattatgctcagctatacgaactatgtagtgtatttacagaaaataatgttcaatttatagtgcaaagtattgattctgttaagggattagatgcaaatacatgtgtaattataactagtcctaattttctaaaatatttaactaaaaatggtatcaaggaagatgattattttaataaagagtggaaaaaagtctatgttgctctgactcgagccaagcatcgattagtacttgccttagaccatgacttacttttagcttcagatctagaggcggtaagaaattccattagcgaactaggttttgtctatcatcactga

SEQ ID NO: 73298 - DNA, 1866 bp, Acinetobacter sp. ANC 3880
atgaaaattgataaagtaattctaaaaggttttagaaattataaagatgcgacaataaattttaataataacactttaattattggtgaaaatgatgttggtaaaactaatctcatttatgcattacgcctcatgttagacagaagtgtttctgaattggatatagagccatcagagttggattttcatgtacagggtggtgtccagtctgaaaatttagaaatcataattaaattctttgatattaaagaagaagctgcattatccattttgaaagaacacgtaagtgatgatggagaatgtgtttttaaatacatggcttctaaagaaaatctagattacaaattatatcttggtcaaaatgagacagacttatctgaaattcaaagtcgttattatttaaaatatatcaatttaaagtatatttcttcccaaagagatttaagcaaatttattgctaaagagaaaaaacaattacttaggatctccaaaacaaagattactgaagaacaagaaaagcttgatcgagaaaacgtactagaaatttctaagcaattggttgacctagacgataaagttgcacaattagaatatgtaaaaactgctactcaagaagttaatttagaattaaagaaattagcttatgcccatgatgattatgatgtaaaactaaatgctagcggtatagaagtggatgattttattaataaattacaattaggggcaatgagcggtggctcaaatgttatgttgggtggtgatggacgtaataatcaaattttaattgctttatggaaggcactgagcgaatttgaacacgattcaaatgatgaagtagtgttttatgttgttgaggagccagaggcacatttacacccacatcaacaaagaaaattagctagttatttatcttcagaattacaaagtcaatgtttaataacaacacactctccgcaaatagcctcaagtttttcgccaagttctattattagattatttaagaaagatttctctacaattgcggccagtaatggttgtacaaaagaactagaaaaagcatgggaagaattaggttataggatgagcattatccctgcagaagcatttttttcaagtggtgtttttttagttgagggcccatctgaagaaattctatataaggaactgttgcttaaaaataaagttgatattgattactacaatttatccgtttttgcagttggaggaattcaatttaaagtatttgcagccgttttaagagctctagaaatacctgtttcattaagaactgataatgatattagtactgtagaaatgaattgtaaggtttctagttacactagaattgatggtgtaaatccttgctatgtatataaaaggattgaaattaattataaagaagaaaaatgcaaaaaatggcagtatttgggggttaatagatgctatggagttttaaatgaaaattctgaaaagtgggaacatagcctttatcctttaaatagagctaagattctaggtgataaaaggtggaaagcttttgaaaagatgattaattctaaaggcatatttatgtcaaatagggatttagagttggacttagtaagtgttgcttcagaagaaattaaaaaagctttaagtaaaaaaactgatactagctcggttgattttcttaaaaccaataaggcactaaatatgcagatattagtatcaaaattagaagatgaagggtttaagaaaatttatgaaagttattttggtgagcctataagatatttaataaaaatattaatgagtaagcctatattaaaaactgaatcggaaattgaattagaaactgaatatgctcaagaagaaggtgcagcatga

SEQ ID NO: 73299 - DNA, 1611 bp, Acinetobacter sp. ANC 3880; identical to SEQ ID NO: 73291

SEQ ID NO: 73300 - DNA, 2100 bp, Acinetobacter sp. ANC 3880
atgcgcattgaaaaaattaaagtagaaggttttaggcttcttgagagtgtcgaattcggattggaagagaattcaactgtaattgttggacgtaataatagtggaaagacatcttttaccagtatttttgattgtttttgtggtgaatctggaacaagatttcggctagaggatttttcagttttatcacgagagaaatttttaaaagctaaagaattaagagaggcgggggaaagttcagaagtaatattcgaagcacttcctcgaatctctcatacacttacatttcaatataataaactttctcctgatttaggttctctatccccttttgttattgatttagatgaagactctacaacggctattgcgcgagttgagtatcggcctattttgaaaaatatgcatttgctttttgaccttacctcatcttccgcagtggttgaacctcgtacacatttttataaaaatttgaagggtaatttgtctaaagcttatggggttcatgtaagtgcaattgatcctactgatagtacaaatacgagagattttgaaggcacatctgctttaatagcattattacaatgtaactttgtattagctcaaagaaatcttgataaaacaaaactaggggatgctgatgtaataggtaaattgcttagtgagctatttaagacagctacagcaccatctgctgctgaggcagatcaaaatttagctataagattaaagcaatctgttgaaagtattgagcataatgtccaactcgactttgatggcatgcttaaagaattattgccagttatgaacgtaatgggattcccaagtcttaatgatactgagataagaccagagacatcattaaacgtggaatcattattatcagggcatactaaggtcgtttatagcggagttgatggagtacatttaccagaagggtataatggtctaggaacccgtaatttgatttacatgttgctacagttagcaagctatcacaaaatctatagatcaaaatcaattagccctgctactcatttaatatttattgaagagccagaagctcatttacatcctcaaatgcaggaggtttttatcaatcaattaaatgtggctgttcaaaaattatcggaaaattattctaacaaagataaatggaatatccagtttgttatcacaacacactccccacatgttgcgaatgctgcaaaatttgatgctgttagatatttttataatgaaattcataagacagaaaacgtacgtcatacaaaggttaaagattttaagaaggggttgagtagtatttctgttaaagatcaaaaatttttacatcaatatatgaccttaacgaaatgtgatctttactttgctgataaagctatcttagttgaagggacaacagaacgtttattaatgccaaagttatgtcaattagttgatgagtctcttgatgaaccacaaaaactagccagacaatatgtgacttgtgttgaggttggtggagcacatgcgcatattttttacccacttcttgactttctggagttgaaaacgttagtaatcactgatctagattcaacaaaaaaaggcaaaataactaagaatggaaaacaggaagatgcatgggtgaaatgcccagtagttgatggtcagaatacatctaatgctgccattaaaaactggttttatcctaaagaagtcgatgatactggtaaagttaagaaaaaagctaaaaatgaggatagtcaaatttccccgtcagtcttgattgctaaaactgctcaagagaaacaaattaagttccgtagaattgcatatcaaataccagaagatccagaaactaatatatgcgctagaagttatgaggatgctttcatattagctaatctttctaaatttgaattacctgaaggacaagatattgctgttgctgcttgggaaaaagcacaagggcttattaaatctgatttcgccttagaatatgcaattctaatagaagattggtcggcaccaagatatatcaaggaaggtctaatttggttatctgaaatggacactataaaaaaatcaaactatgaattaactacaggcgaataa

SEQ ID NO: 73301 - DNA, 1734 bp, Acinetobacter sp. ANC 3880
atgagtgagattttagacaatccagcaataattgcagctcaactagctgaagcaaaaattaatgcagctataaaagcaggacgaagtttccggctagaagctggcgcaggtgcgggaaaaacattttctttagttcatgctctaaaatccattattaaagagcgtggtagatcattaacgcaaacaggtaaaaaagtagcttgtattacttatacggaagttgcaagaaatgagattgcccaagaaattgaagaccatccagcaattttagtcgatactatacatggattctcatgggcttttatgcgccaatttcaaaaagccataagagagattcttattgaagataattcaagaaaagaaaaagttgaacaaggtggtggcattgggtctaaatcagtggaatacgagttgggcttttttggtgttaatgatcagaaaattacactgagtcatgatgatatcccaacgatgatggctaaattactaagtaaagaaaagtttcggaaaatatttagcaatcagtttccggtagtttttattgatgaatatcaagataccaatcgccaatttatggatgctattacagagtatttcttaaaaccaaaggtgggaccactttttggtctttttggagaccattggcagactatttatggtagtgaatatgaattggcagagtatccaatcgaagagattgcaaagggatcaaattttcgatcagttccagcaattgtagatatattaaataatttaagaccagacttaccacaagctgtcagttcgccagatgcaaaaggtgaagctagattttttcatactaattcttataaggggacacgaacagatgagagaagttctaaagatgatttaccaatagatatagctcgatctactcgtacaagtttgatacagaggctacaaaatgaggggtgggatattgaaaaaactaagatactgatgttaagccataatgttttagcatctgaacaaggataccctcaattaattaaagtatttgatggacgtaatgatcaatttgctaaaaaagaagaccctgtaataaaattttttgcagaaatagttgaaccaatgagtgttagctatagcttatcaaattatggtgagatgtttaaaatctttggctcacggcctgcaataacgaagcatgaagataaatcttgttggcgacgggatatggatcaattattaaaactaagacaagaggggactatagggcaagtgatagatcatcttaagcagacaaaacgtccctcccccccagatagagtgcttagacgagacgatgagcttatttctctaagaaattcacctgacacggaaatgtcttcaacactacttcgttataataaattaagagaaattccatataaagaagtaatcgaagttacaaagtttattgaaaagcaaactccatttgcaactcagcacagtgttaagggggcagagtttgagaatgtattagtagttttaggtggtggatggaataattataaatggccacagcttctcgagttgcttgagactaaaaagttgactaatgcaaacacaaaaggtttttatagagctcgtaatcttttctatgtatctatttctcgaccaatgacgagactggctgtgttagctactcagacattatctaatacagcacttgtaacagtgaataatctatttggaagtgagaatgtagtagaattaagtttagatacatag

SEQ ID NO: 73302 - DNA, 1806 bp, Acinetobacter sp. CIP 102143; identical to SEQ ID NO: 73246

SEQ ID NO: 73303 - DNA, 927 bp, Acinetobacter sp. CIP 102143
atgtcacaaacagttgaaatcacagatgaagatatacgatacgctgaaaatattttattacctcaaggcaaaacttttgatgatgaacgacgtaaatttatctgtaatttatctacgatagatttacaagcagttcctggcagtggaaaaacaacagctcttttggcaaaactattaattttagaaactaagctccctttatctgatggttcaggaattttagttttatctcataccaatgcagcagtggatgaaattaaagaaagaattcatcaatactgcccaaaactttttcgttatcctcactttattggaacaatacaaagtttcgtaaatgaatttttagctatcccttattatctttttaaacttaagaaaaaacctctacgtattgataatgaaatatatgcagaacaaatagaatttgctctttcatacaatacaaaaatagctctttcaaaacgcagcataaattatattgatatattaagtaattcatttataagtaataaacaaattttgcaacatttttggagtaatgacgaagtaactattcccaaaattggtagccatacaaatacatataaagaattagcaaccataaaaattaatttactaaaaactggcattcttagctttggtgattgctatgctttagcacaaaaatatctaagtaattatccaattatccacaaaattattaataaaagatttcaatatgtatttattgatgaaatgcaagatatggatactcaccaatatgagcttattgaaaagatatttacagaaaataatgatacaaatactataattcaaagaattggagacaaaaatcaatctatttataattcaataaaagctgaatcaatttggcaagatagaggcaatgttcagagatggatccgtaaatttgaacaactcctataa

SEQ ID NO: 73304 - DNA, 2100 bp, Acinetobacter ursingii NIPH 706
atgcgcattgaaaaaattaaagtagaaggttttaggcttcttgaaaatgtcgaattcggattggaagagaattcaactgtaattgttggacgtaataatagtggaaagacatcttttaccagtatttttgattgtttttgtagtgaatctggaacaagatttcggttagaggatttttcagttttatcacgagagaaatttttaaaagctaaagaattaagagaggcgggggaaagttcagaagtaatattcgaagcacttcctcgaatttctcttatacttacatttcaatataataaactttctcctgatttaggttctctatccccttttgttattgatttagatgaagactctacaacggctattgcgcgagttgagtatcggcctattttgaaaaatatgcatttgctttttgaccttaccccatcttccgcagtggttgaacctcgtacacatttttataaaaatttgaagggtaatttgtctaaagcttatggggttcatgtaagtgcaattgatcctactgatagtacaaatacgagagattttgaaggcacatctgctttaacagcattattacaatgtaactttgtattagctcaaagaaatcttgataaaacaaaactaggggatgctgatgtaataggtaaattgcttagtgagctatttaagacagctacagcaccatctgctgctgaggcagatcaaaatttagctataagattaaagcaatctgttgaaaatattgagcataatgtccaactcgactttgatggcatgcttaaagaattattaccagttatgaacgtaatgggattcccaagtcttaatgatactgagataagaccagagacatcattaaacgtggaatcattattatcagggcatactaaggtcgtttatagcggagttgatggagtacatttaccagaagggtataatggtctaggaacccgtaatttgatttacatgttgctacagttagcaagctatcacaaaatctatagatcaaaatcaattagccccgctactcatttaatatttattgaagagccagaagctcatttacatcctcaaatgcaggaggtttttatcaatcaattaaatgtggctgttcaaaaattatcggaaaattattctaacaaagataaatggaatatccagtttgttatcacaacacactccccacatgttgcgaatgctgcaaaatttgatgctgttagatatttttataatgaaattcataagatagaaaacgtacgtcagacaaaggttaaagattttaagaaggggttgagtagtatttctgttaaagatcaaaaatttttacatcaatatatgactttaacgaaatgtgatctttactttgctgataaagctatcttagttgaagggacaacagaacgtttattaatgccaaagttatgtcaattagttgatgagtctcttgatgaatcacaaaaactagccagacaatatgttacttgtgttgaggttggtggagcacatgcgcatattttttacccacttcttgactttctggagttgaaaacgttagtaatcactgatctagattcaacaaaaaaaggcaaaataactaagaatggaaaacaggaagatgcatgggtgaaatgcccagtagttgatggtcagaatacatctaatgctgccattaaaaactggttttatcctaaagaagttgatgatactggtaaagttaagaaaaaagctaaaaatgaggatagtcaaatttccccgtcagtcttgattgctaaaactgctcaagagaaacaaattaagttccgtagaattgcatatcaaataccagaagatccagaaactaatatatgcgctagaagttatgaggatgctttcatattagctaatctttctaaatttgaattacctgaaggacaagatattgctgttgctgcttgggaaaaagcacaagggcttattaaatctgatttcgccttagaatatgcaattctaatagaagattggtcggcaccaagatatatcaaggaaggtctaatttggttatctgaaatggacactataaaaaaatcaaactatgaattaactacaggcgaataa

SEQ ID NO: 73305 - DNA, 1734 bp, Acinetobacter ursingii NIPH 706
atgagtgagattctagacaatccagcaataattgcagctcaactagctgaagcaaaaattaatgcagctataaaagcaggacgaagtttccggctagaagctggcgcaggtgcgggaaaaacattttctttagttcatgctctaaaatccattattaaagagcgtggtagatcattaacgcaaacaggtaaaaaagtagcttgtattacttatacggaagttgcaagaaatgagattgcccaagaaattgaagaccatccagcaattttagtcgatactatacatggattctcatgggcttttatgcgccaatttcaaaaagccataagagagattcttattgaagatgattcaagaaaagaaaaagttgaacaaggtggtggcattgggactaaatcagtggaatacgagttgggcttttttggtgttaatgatcagaaaattacactgagtcatgatgatatcccaacgatgatggctaaattactaagtaaagaaaagtttcggaaaatatttagcaatcagtttccggtagtttttattgatgaataccaagataccaatcgccaatttatggatgctattacagagtatttcttaaaaccaaaggtgggaccactttttggtctttttggagaccattggcagactatttatggtagtgaatatgaattggcagagtatccaatcgaagagattgcaaagggatcaaattttcgatcagttccagcaattgtagatatattaaataatttaagaccagacttaccacaagctgtcagttcgccagatgcaaaaggtgaagctagattttttcatactaattcttataaggggacacgaacagatgagaaaagttctaaagatgatttaccaatagatatagctcgatctactcgtacaaatttgatacagaggctacaaaatgaggggtgggatattgaaaaaactaagatactgatgttaagccataatattttagcatctgaacaaggataccctcaattaattaaagtatttgacggacgtaatgatcaatttgctaaaaaagaagaccctgtaataaaattttttgcagaaatagttgaaccaatgagtgttagctatagcttatcaaattatggtgagatgtttaaaatctttggctcaaggcctgcaataatgaagcatgaagataaatcttgttggcggcgggatatggatcaattattaaaactaagacaagaggggactatagggcaagtgatagatcatcttaagcagacaaaacgtccctcccccccagatagagtgcttagacgagacgatgagcttatttctctaagaaattcacctgacacggaaatgtcttcaacactacttcgttataataaattaagagaaattccatataaagaagtaatcgaagttacaaagtttattgaaaagcaaactccatttgcaactcagcacagtgttaagggggcagagtttgagaatgtattagtagttttaggtggtggatggaataattataaatggccacagcttctcgagttgcttgagactaaaaagttgactaatgcaaacacaaaaggtttttatagagctcgtaatcttttctatgtatctatttctcgcccaatgacgagactggctgtgttagctactcagacattatctgatacagcacttgtaacagtgaataatctatttggaagtgagaatgtaatagaattaagtttagatacatag

SEQ ID NO: 73306 - DNA, 1806 bp, Sphingopyxis sp. MC1
atgcgggtagcgcggatcgtaattcagaattttcgcaccttcgcgtcgcttgacgtgaatgtcgctgatgatctgtgctgcatcatcggcgagaacaacaccggcaagactgctatcctgcgcgcgatccagatttgtctcgacaatatgttgccgtcgagtttccggtcattgctgcgcgaggacatccactccgcgatcgatatcgccgagccgagccaagttctgatcggcattgagctgactgggtttgagggcagggtgaacgaggaggcactggtcagcacctggaagacggccgcggatcgtgcgcgcatattctaccgcttccgcccgcgcccggctgtccgggagcagcttgcgagtggtgacgtcatacccggcactttgacccttgaggactatcaatgggaaatccgcggcggcggtgatcctgcgatcgacctcaccgagattgcctggaatgacgaggggatcggcgagtccgtgcgctttgctgacctgcaatcctacctactcgtccaactccccgcgctccgcgatgtcgagaatgatctacgcaatccacgccagtcaccgcttatccgcttgatcgaggcgttcgagatcgatgcggctgagcaggatgccctgattgccatgcttgaccaggccaatcatgcaatcgcgaactcgccgacgatcgccgagatagcaggagcaatcgacacgcgcttcaaagatgtctccggccccgcgttcgagatggacgccacgctcggtctatccgccgcgaccttccgcgcgattattcgcaacctgaaaatcatcttgtcggacttgtcgcttacgtcgttcgaacccggccgaaacggtcttggcatgaacaatatcctctacatcgcgatcctgatggaatatctccagcggcggatcgcactcaaccgatcggccggccaactgatcctgatcgaggaacccgaagcgcatctccatcctcagttgcaattctcgctgatcgcggcgttgcgcgcgatcggcgtgcagacaatcctgaccagtcacagcacgcaggtgacctcacaagtaccgctgagcagcatcatatccctcaccaagcgaaatgacgcgaccattgctgctggcaatcttgcgcttaatgcggcgctgagcgcgccagagattgccgatctcgaacgctatcttgacgcaacaaagagcgcattgctctacgcccgcaaggtcatgctggttgaaggaccagccgagatgttcctgatcccggcactgatcgagcaggtgcacgacgtgaagctcgagcggctcggcatttcggttatcgcaattcatggcgtccatttcggcgtctatgccaagctgttccgcgctggctcccttgaaaaaaaatgcgccatcgtggccgatgctgatatgaagccttccgacgcagaagacttcgatccggaaaccgacgcgcccgacctcgtggcgctgcaaggcgattttgtgtccacattcgcgggcgctacgacttttgaacgcgagttggtatcggtcgggcgtctgccgatgctgattgagaccgttcgtgctctcggcgcgccgcaaatcctcgcgcaaatggagaatgggcttgaaaggcttgcgctcgggggaatgggcatcgctgacgaaacggcactgcgcgttgaactgggccgtattacgctcaacaccgccaagcgttttggcaaggcccgtttcgcgcagatagcatcgcgctacgctaatcttgcgaccgatctgccgccttacattgagcaggcctatgagtggctcatcgaatga

SEQ ID NO: 73307 - DNA, 1764 bp, Sphingopyxis sp. MC1
atgatcgggctgacacccgaacagcgcgaggcggtcgaacatgacggcaatctgttgctcacggcttgcccgggcagcggcaagacgcgcgtcattctcgctaagctgctggcgctggccgatcaggtggtgggcacatcccagttcatcggctgcatcacctatactaatgcggcggtcgacgagatcgaggcccggttgcgcacctatggcaacaatgtgatcgcagaccgctgtgaaatttcgacgattcacgcattctgcctgcaattcatcctgcgtccctatagctggctcattcccgaagtgccgacatcgtttcaagtgctgtcccgcgagaacagcttgttcgaacagatcgtaacggcggtcgaggatgcgttcggccgcatgccagccggacaggtgttcgaggattatgaatcgcttcgcattgacgtgaacggcgaaccctgcggttcgggtatagagacgggcatcgtcactgccgaatccgccgctctctattgggagtgggtccgcgcgcacggatacctcgatttcgcgatgatcctctactattcatggaagattatcgaacagcatccgttcgtcggacgcggtatcgcgagtcgttttgcttggctgctgatcgacgaattccaggacaccaccgacatccaaatcgccatcttcggtgctctccgaaattttctccacacccgtttctttcttgttggtgaccagaaccagtcgatcatgcgcttcgccggcgctcgtcccgaactcgcagaacagttcggcgatcagatcgacgcgcaccgagatacatcgctgaccggcaacttcagatgcgggacggcgatagtcagcgctgcatcaacactcattccgaccgttccgggtatgcagtcggcgggcgatgcagcccagctcgaagcgcaagtaaactatgtccatgtcgcccggccgatcgacgccatcacagattatttcctgcccgccctccaggatgccggcatcccgctcggcaaggccgcgatccttgcgccatggtggacgcatctcatccccgtcgctcgtgttctccgcgaattcaacgttccggtcttcggtccaggtgcgcgcccgtataagcgtcggcgtctgcttgccggacttgccgagcaacttggagcctgcgccgaggcgggcaattacctcggggttcctggggtcgagcgggcactgttccggctcatcggtgatctcaccgggaactcgcgctacgatatgttcagctatcaagggcgtcgcgtggcgcttggcatgatctatcttgctcgtgagcttgccgaccagcatctgggcggtgtcccttggctgcgcgccctcgcccgcgaggctggtgactatctcgagcacgaggaatggttgccggccagcgccaaacagccgctgatcgattccgccgaggaaatgctgtccgatatgcaggccagcaaggtcgatcttgcaaacctgctgatctccgatatggggctgttcgccaatcccgagcatgcgctcaagctgatcacgctgcacaattccaaggggcgcgaatttgacggggtcgctctgatctgcatgaactatggcagcatcccgcatttctcgacatcaacgcaggaggcgtatgacgaggcgcgacggctattctatgttggcttgacccgcgccaaacgcatccttgtcatcgcatccgatcagtctcactggaagaacacaccaaccccgtttatctcggaggcaggccttggatga

SEQ ID NO: 73308 - DNA, 1638 bp, Clostridium bolteae 90B7
atgtatttatcgtgtgtaagaatatggaattttagaaaatatggttatgccaatttagatgcgactcctgcattagaggtttatttaaagggaggattaaatgttcttattggagaaaatgatacgggaaagacagcaattattgatgcaattaaatttgttcttggaactagaagccatgatactttacaaataaaagaatgtgatttttatgaggatttaaaaggtgaacgaagtgaattattgaagatagaatgtgtttttcaagaattaagtgatgatgaggcaggcaattttctggaatggcttacatttgatggggataaggcagagctcagtgttcggatgatagcaagacgtagagataacagaattatgaattcgattactgcaggcatgccagaattagatacccgctttgatgcaattgaattattgagagtgacgtatcttaagccgctaagagatgcagaaaatgaattgaaacatggttaccattcaaggttggcgcaaattttgctaaatcatccactttttactaaagaaaaagatcttcatgtattagaaagatactttggtatagctaatcaaaaaatcgaggaatattttaagaaagaaaaactggaaaaagatgaaatttttggaattgaggatggggagaaaggtgcgaaagaaatcacagggaaattagaagcaactttacgagaatttatgggtaataattatgattcgcatggttatgaaccgataatttcagcaagtagaaatgaattgactagtattctgcgcaggctaagcctaattattgctcaaaatcaagttggattaggttctttaaatcagttatttatagcattagaattattattatttgacatagaaaatcgctttaatattgctttaatcgaggaaatcgaagctcatttacatcctcaggcgcagttaagactaattgcttatttacaaaataaaaatgataatgataatagtaataaaaagttacagtgcattatcacgacacatagcataacattagcatcaaaaataaaaatatctaatctgatatattgtaaaaataataaagcttatatgctagattctgcccatactgctttagaaagtggagattataaatatttagaaagatttttggattctacaaaagctaacttgttttttgctaagggagtcatttttgttgaaggtgatgcagaaaatattctaatgcccgttatcgcaaaaataattggtatgccattagaaaaatatggggtctcaattgttaatgtaggaagtctggcatttcttagatatgcaaatattttcaaaagaaaaaatggagagtgtatagatataccaatagcaatagttacagatttggatgtacgaccggattactattatgaaataaaaaaagaggagaataaaaatattgtttattctatagaagatttgaagggtgcagaggagatatgtgaattaaaatgttcagatattgaaggaaagtattatataaagaaagaagacatttatgaaaaaataaaagaacaaaataaggtgaaaaaacttagcaaaaaagtaaaggatagtattgaaatttatattaagcctgcaaataaaaagtcaataggaaaatga

SEQ ID NO: 73309 - DNA, 1908 bp, Clostridium bolteae 90B7
atgagtattgtgaactttatagacgaggatatccattacgcagaaaagatattattgggaaataaaacttttgatataaatgaaaaacttcctattatcaaaagaatggataagtctatttctgttatggcttgtcctggaagtggaaagacaactgcgcttatgggaaagattatagcacttgtcaatcatttaccacttaatgatggaaagggaatttgtataattacacatacaaatgtagcaattaatgaaattaaaagtagactaggaagcagaggagatatattatttcaatatcctaattttattgggacaatacaggcatttacagataaatttttgtcgattccttttttaaaacaggcatacagacaaggaattactgctataaatgatgagtattattatcaaaaaatgtttcagagaaaaaaagagattactattctaaagaagtatgcatatggaaaatgcggtagagactactcaaaaatagataactatataaaaagtattgtattgcggagaaaagatggagaatttgatttctgtactggagacaaatctttaaatttaaaaaacaagtcatcagacacatataaggcattatattcgctattggtagacagtttatttagtcaaggaatattacgatatgatgatacatacttgttagcacagatgtatcttgaagaacatccagaattgtcatactatttttgctctagatttcaatatgtttttatggatgaggtacaggacaataggggagtacagaatgagatattagataaaatttttttgccggagcgagtggttattcaaaaatttggagatatggatcaggctatttatgatgataaagaagaggtggagcgtaatgttctggaggatagatatgagatctcaaaaagtatgagatttccacaaaatattgcagatattattgaaaatttacgagttgagccacataaaaaaactttaataggaaatggaaatgcagatgcattcatttacatattagtttttgagcatgataaaatctgtaatgtaaaagataaatttgtagatttgattctggaacataatcttaaaaaagaaaaatcagtatttaagtgttgtggatgggttggctataaagaaaaagaagaacagttatcagttaaaagttattatcctatgtatatatccaataaggatgttactattaaacaggtaggcatgagttttcaatccattttggaagaaaatgcaaagcataatgtaacagtaggattaatttataaatctgtgatagtatgtattgtaagatatttgaatatgaatgatattacatttgaggaaaagcagattacgtattccatattagaaaagtatataaaaaacaatatgacaatagaatggataaatttacgaagtcttattgtaagagaggcaacaaaaattaagaattacgatgaaacagcatttaaaataattggaacagaagccttgcatatagtatttcatttttttgaggagtgtaatgaaaaacagtttttaaaactgtttgaaagacaaactaattctaaaaaagatgtcttgtataattgttatacaagggacggtgtatctgtactatttgatacggttcatggagttaagggggagactcacacgggaactctatatgtggaaacgtattttaataaaaaaacggatatgcaacggattttgaagttcatgagtggcagcaatattaagaagatgggagcagatgagaaaaaggcattaaaagtagggtatgtaggtatgagtcgtgcaacagacatgctttgtattgcaataggagaagatacctttaaaatgtatgaaaaggaaatagaggaattggaacaatctagaaaacttcaaatatgtcatatttaa

SEQ ID NO: 73310 - DNA, 1638 bp, Clostridium bolteae 90A5; identical to SEQ ID NO: 73308

SEQ ID NO: 73311 - DNA, 1908 bp, Clostridium bolteae 90A5; identical to SEQ ID NO: 73309

SEQ ID NO: 73312 - DNA, 2034 bp, Ralstonia pickettii OR214; identical to SEQ ID NO: 71858

SEQ ID NO: 73313 - DNA, 1758 bp, Ralstonia pickettii OR214; identical to SEQ ID NO: 71859

SEQ ID NO: 73314 - DNA, 1107 bp, Salmonella enterica
  subsp. houtenae serovar 16:z4,z32:-- str. RKS3027
atgatttctcagaaagtaggtattttcacaaaattgctaatgaatacactgagcgaagtcaccaaaggtgagatcaatactgcctattctgatttttttagtgctattgaaagaacaaaaacattcgataaggttattggtcgtaatcctgattttgataattacgatgatattattgaaaaacttgattgtattcctaatatccctaacttaaaaaatatcttgtctaatataacattgagatatggtaacgaatttctttaccaaaaaggcttagggcaaagaaatcttatttatatatttattctctttgcatactacaaatcttgcagcgacacattcaacctttgttgtattgaagaaccggaagctcatttaagcgtcaataacctacgattagtaagagactttatagaaaaaagttcaagcaacagcagttcattagtacaaaccctcatatcaactcataatccatcaattatcaacaagctaaaaatttccaatgtattagccttctctggcaacaaagctattagcctatcagaaacaccggtaaaacttgttgattacctgagaaaaagaccaaatttcgacatactaaaattactttttgcaaaaaaagtaattttagttgaaggcactaccgaagaaatgctcattaatacatttttggccaagaacgaaacgactcttaacgatgttgatgttatccctattggccagcgaggctacactacattcctagacatatggctcgcactcaacaaagataaccctaataagaaaattggagttatccgtgactatgataactcagatctcgctaaagcaaagcatgaagcttatgatacggcttatgcaaacatcatagtcagaacaactactaattacactcttgaaattgatttagtaaatacagagaataatctcgatctactgagaaatttattcaaaataacgggagattctaacgcagtgtctgatcatatgatcaaaggcaaagcagctagaatgttggatgtttgtgatgcaatgttagataaagaaaatcctttagatataaaactaccttttcacatagctgaggttatagaggctatatcatga

SEQ ID NO: 73315 - DNA, 1374 bp, Salmonella enterica
  subsp. houtenae serovar 16:z4,z32:-- str. RKS3027
atgattgaagtccagattgctggagcaggtgcgggtaaaacttttggcttggctgaatcgctgatagcacatatgaaatcctgctcttctcacaaaaaaatatttgctctcacatacactaatacagcaacatcaaaaattgaagaggaagtaattaagcaacatggattcatacctcacaacctctgtatacagacagtacatagttttttgctgaatgaaatagtttatccattctcatcatatactctcggtgatgtatataacaataccactatcatgccagtcggcaaccctaaatataaagcgatccttttcaaacgattaagagaaaaaaatgtaatacatgctgaaaatgtttataatatttctaagcaaattgttgatgagaaaataagcaaacataatactatagccaaaaagaaaaaggttaaacgccttttaagtattcttggcaactgttttgaaaaaatatttatagatgaagttcaggatctagatagcgatgctttgcgatttttcgaagtgttaggatgcaatgatattgacatatatatgattggcgatccaaagcaagctataaaatacccaaatgcattagatactttcgtctgtaagcttgcttccgtagaatacgcaaaaattcttaatattaacaatatctccagacgagtaccaaatgagatattagctatttctaatgaattctgttttcagggacaacgtcaaatttcatcatcaacggctgttggtgagctattttatcttgaatctacagatatgaaatataatcaatacattagaaactatatagaatcgaaacaaattgtttgtatcgacaagaaaaatggaaagtattcaacatcatcgaaacagaggtattcattcccctatgaaatagaagagatgattcgagaatcaaatcataagaaagatgaaaaattagttatgaaagccgctttctctgattttatagaaactttttttgagttaggcacaaaaaaggcaattagtaaccttattaatcaatattcattgaaattggaaaaaaaatattttgctcaactatacgaactctgtgataaatgtgctgaaaatgacgttaaatttaaagtatccagcatcgaatcagtcaagggattggattctgatatatgtgtaatgatattaactactaatacacttaaatattttctcaggatggacttaaaaaaagatgaatatttcaacaaagagtggaaaaaggtgtacgttgctcttaccagggctaaacaacgtttaatcttagcattagaccatgaattactttctggtattgatattgaaaaattaaaaatacaacttgagaagttagggtttgaaaagcataaataa

SEQ ID NO: 73316 - DNA, 1143 bp, Meiothermus ruber DSM 1279; identical to SEQ ID NO: 71878

SEQ ID NO: 73317 - DNA, 2430 bp, Meiothermus ruber DSM 1279; identical to SEQ ID NO: 71879

SEQ ID NO: 73318 - DNA, 2160 bp, Corynebacterium crenatum MT
atggtagagtcgatccatttcagaacaagggtggagctttggcaggagcaaacaatgagggttagcgcgatctatatcgatggttaccgtcgattcaaagaacagaacatcaaatttgagaatgaggtaactgtcctcgctggtgccaacaactcaggaaagacttctttgattgatctcctacgcgtcgtgcttggaggagaaggaagcttgcatgccgaggacttcagcgcgtcagatcgttatcaatggtttatggctctcgttgaagcagcgattaaaggcgaggaagagttttccgatttcgtggagcataaaaaccttcttgaaaaggctccatcgattgatgttcgtcttgaagttacgtacgacccagttgctgatgacattcgccagttcgcagattacttgatggatctggattcagctaaaagctcgttctacttccagtttcgattctcagtgagagttgatcgcttgatagctgcctgcaatgacctctataccgacatcgaaaagaccatagctgattgtgggtggacgtctgcgagtgagatcaacccgggttcatcagagttccttgtcctccaggcgaaaatcgatgcttcactcgttgattgctccagaccagaagtattctttgcagatgagaactataccaacatcttgccaatgggaacgcataagaacctcaagcatctgttcaattttcgggcagtaaaggcgtcgcgcgccctcgacgacatcaatgaagataaatcagggggcttgaatcagcgccttatcgaggttgtgaaagaggatgagaattggttacagctcttgtctcagtttccggaccaggtggtatcagctattcatgggctaaaaattcgtgaagcaacgaccgacgaagccctcaaaagtctcaatactgtcatcgagtcaatctcgagcacgaatggctcgaaacagcatgacctcttcctcgacttccacgtgaccgaggatcatgccgtccagatgattgcacgcgcaatgcagactcgctacctcggcgaaggcgttcctttaggtgaagcctcacagggtttgggttacagcaatctcatctatttacatcttgaagccgagtcttttattcgctcgaccgctcaggaagagaactgttatctcgtaaacctgttagttctagaagaaccagaatcgcacatgcacccacaaatgcagaatgcctttatcaaacatctcctatcgagagtgagagaggttggaggactccaagtggccgtcacgacgcactcgagtgagatcgtgaagtcaagcggaatcgaacagctacgggttctcaaatctgaagatgatgggtgcaggatcgtagatttgcgtgactttcacacagccgaggttgcacggaaatcaaccgaaacacagcggttatttaactttctgtatgcgatcaatttctctgacctgctcttcgccgacaaagtcatcatgtatgagggggacaccgagcggatgtacattcaggcgctaattcgagaactcccagaattatctggcctccgatcacagtacatttcatacgtccaagttggtggggcttatgcgcatgtgtacaaaccgcttattgtagacgaacttcgcctaaagacggtgataattaccgaccttgactatgacaaggcaagtacgatttcaagcgtcgaggacctcaaattgcttcactcgaccaatacaactctgaatgccttcttcaagaaaaaagacagcgaggctgatcccgctaacgcaaaggcactaacaatcggaaatctaatggagaaagttgcttctaccccaggcttggccttcattcctggcaccgagttagcagccgttgctttccaatctgaacccgaaggctatgcacgtactttggaagaagcgatccttgccgttcagttgggaactgatgtttggtcctctcggacgcaagaagactggaaaaattaccgcaagatttcagagttaaaattctcgattcctcgagagccggagtctccgacaattagacagatcgtcttatcgacgtcaaaccagaagacggattttatgtactcgttgctacttaactctgaactgctgaagacagttccgccatatatcctctctgctctccggtggctggactcatga

SEQ ID NO: 73319 - DNA, 1914 bp, Corynebacterium crenatum MT; identical to SEQ ID NO: 72451

SEQ ID NO: 73320 - DNA, 1938 bp, Bacteroides salyersiae WAL 10018 = DSM 18765 = JCM 12988
atgtatctgtctgctctcaaactatggaattttaggaaatactgcgaaggtcctaatggtgagccagggctaatggtgaatttccatgaaggcgtgaacgtgcttattggagaaaatgactcaggtaagacggccatcgttgatgctattcgatatgctctgaagacacaaagcggagagtttatccagtttgatgataaagatttttatcaagatgtcaacggaaatagaaaggaagagtttaaaatagagtgcgtgtttgacggattgaatgaacaggactcaggcttattctgggagtggttgtcatggaacgatgataaaacaagatatttgttgaaggtatggctttatgctaagaggaaagataacgtcattatgccatcgttcacagctggtattgaaggacaagcagacagaatagactctgaagcgcgagaattgttaaaggtggtatatttcaaacctctcagggatgcccttacagatatgactcatggttataagtcaaggttggcacaaatcctcggtgcacacgaactattcaagactcaaaaagatgctgaaggaaacagcactaagcacaaactggagaccgactatgagaatttaaagagagaaatagagaactatttcaaagatgggggtaatggctctattatcacaggagacattaataagttcttaaaaaagcatttcctgcttaacggagacccgcgaaatgcccagattaagctgactggtggagaactaacagatatattgaggttgcttgatcttatcatggagggtaacaagtcgggactcggaacgcttaacttattgtgtatagcagctgagatgcttctgttcaacaaccagaagaaaggattgaagctggcgatagtagaagaactggaggcacaccttcatccgcaatatcagttgaggttgatagattatatttcctcccaacaaaacaatgaacagtttattctttccacccatagcattacgttggcatcgaaaatacgacttgaaaaccttattattctaaaagacaaggaagcatatccaatgtctgcggattacacgatgatggatccagctgactataattttttggaacgttttctggatgctataaaagctaaccttttctttgctaagggactgataatggttgagggagatgctgagaacttattaatcccagccatcgcagaattgatggataggcatctgcataaacatggagtctctattgttaatgtgggaagtacggcatacaaacggtatgttaatatctttaagcgcaaggatgaaaaaacatttgacatacccattgctgtcatatctgacctcgatgttaaggctcttgaatattatgatgacaatagtaaagaccgtaagattcctaaatattggttgaaagataccgttcttacggaattaaaagccatcacggaagaagttgattatgaagctatggcaaatgtgtaccgtagtctaactgtttttgaaaaagaagttcggtctaataagacggagaactttgttcctataggagagactattgaacgtttgaaagcagttctgacggatgataagaagacaaagcttgacgaagcaatgctttcgacaatcagagaagatcggattaagcgtttgaaaagtgaaatcaacaaagggaagaccaaaatatacctgcccaaagattggactttggaatatgagatagcagggagtggtctttataggctgttggttactgctaccagagctgcaaaaatagaaactgataatccggatttggagatgacagacgagaccttgctagaattgtggagtaaggtgaaagaggactatcctgacggacatgtaccaacaagagaggacatttatcgtatatttgcgcctctgaatgagggtgtggtgagtaaagcaatcacagcgtag

SEQ ID NO: 73321 - DNA, 2154 bp, Bacteroides salyersiae WAL 10018 = DSM 18765 = JCM 12988
atgtcattcgcaacagatgatgaaataagaatagcccatgatattcttttgaaagagaagaaaccttttgataatccaagagttgagattatcaaaaaggatagcagttgctatgtccaagcctgtccaggaagtggtaaaacaacgtctttgcttgcaaagttgattattcttgcaaacaagttaccattggcagatggaaggggagtatgcgtacttacacacaccaacgtggccattgacgaaataaaggcaaaagttggacctaaagcagaagtgcttttcagctatcctaatttcttcggaactatacagacatttctgcataagtacattgcaggtgcggcacttcattatttctatggaagtcagatccaatatgtggataatgatattgccatggccgttctgctgaagaaatatagcagtttaccttttgaaaacaagttaaaaggtttggtttttgctcgtatggcagcaaaaaagcataggttaggagaagaagaaataaatgcatggggaggggttgatttattgaaggctgctaatgtaataaagcagaaaggcaaacgtgttatttggtatgattttcagttgagcggtcatgtttacgcaaatatccccagaaatatagtgcagcaaattagggcaaaaaagaaagaaatacttgataatgaatggaaggacattattctttcctttaaggtggattggctaaataatcaaatcatagcagaccaaagaccaattggtttttcttctgaatctggtgctgagtatctaaagctaaaagaagagatgttccaagatggtattttatcttttgaagatgcatacgacctggcatttagatatatacgggaaaaggggcttgatttttgcagattctcagataagaggttcaaatacctttttattgacgaagttcaagactgtgacaaacagcaagttaaactaataaagagtttattcgcagatgataaagtcattgttcagcggtttggggattattgccaagcaatctatgatggagatggaagcgatgggagcgataatactgaattgagagacgaaaatgtactatatatacgtaatagtaatcgattcggagagaaaattgcccggccattacgttttttgtgtatggaagataatcatcttcttgttggaaatgaagatgtatattcggtaaaacctgttattcttacctatgaagacccgctgacggtactacccaagtatgcagaattgctgagaacgacaaccatccctgagatggataacatatcagtgctgaatcttgccgacaaagaaaaaaatgaagatccgttgcacagagtaaatatcaaagcatgtggatgggtgggcaagaaaggagctaacgagcaaaagatatatatagaatcatattacccatcatttgaaaagaagaatgtaaaaacaaggggagagggagattcatttgatgatttcttatataaaagccctcaaggaacagtaaaagattgtgcatcgtctattatacaaggtgttattgaatttttggatctatgtgatgtaaataatgataccaagcgttataccagaacatcattgcttggctatctgacattgatagatgctaaggataaagaagaatttcttagtaaagtgatgaattgggctatgcttgcggcaactggaaataatgcagaagaaagacaacatcttaaagaagatatttatcagtatttgtcgggtacgcttctgcctctatttggtaaaaatgaggtgactgtggttgctaatacattctttaatgccgttgcagacgggaaccaaggcggacaaaatcttgaacatgggaacatatacaaagaagatgacatggagattgagatagccacggttcatgccgtgaaagctgaaacacatgctgctacgttataccttgaaacctttttcaacaagtattatgagtctgaacggctaaaagagcaatttaaggggattgcgtacatggggactgatgatgatacgctaaaaagccttagggtggtatatgttggcatgagtaggcctcgctacttgttatgtgtcgccattcaaaaggatagatttcatactatagactgtcaagagttaagagatatatgggatgtggtagaggcgtag

SEQ ID NO: 73322 - DNA, 1782 bp, Bacteroides massiliensis; identical to SEQ ID NO: 72076
  B84634 = Timone 84634 = DSM 17679 = JCM 13223

SEQ ID NO: 73323 - DNA, 1782 bp, Bacteroides massiliensis; identical to SEQ ID NO: 72077
  B84634 = Timone 84634 = DSM 17679 = JCM 13223

SEQ ID NO: 73324 - DNA, 2037 bp, Bacteroides sp. HPS0048
atgtacatttctaaagttaaaatagctaattataaaggcttcgaaaaggctgaggtagaacttaaagatggtttaaatgtcatcttaggtcataataatggtgggaaaagtacactgttagacgctatatctctagttttaaactcagaaagaaatagaaaactatctgtatgggatttctatcaaggaatctcattggatacattaaaagacaaagctccatctgtagagataagcttatatttttctatgtcagatgcagaagagaatatttcaagtgatgctgcgttattctcttcatatgcaatttctttagaacctaagttagtagcatgtatgacttatgtattctttcttccaaatacagaaatagaatcatacaaagagtatgtagcgaatgcttcgaatacaattgaaataatgaaaatgattgaaagtaaatttattcgtaaatacacttattctatctatggtggaaaacctgcattgcatcaacaagttacttctgaagatcttcggaaaattgacttccaaaaggtagatgcactccgaaacgttgagagcgaactattttctggccgtgccgaattacttcatgatgttctttcttattttttggattataatatcaagtcaagtgataaaactgaaggagaaataaagaatgagataaaggtaaagcgtgattcatttcaattagaaacccaaaagaatattgattccttgattgaaagaatcaaagacggtaagaatgagattataaaatacgcaaataagacaggtgcactttataatgagagtgatttactgttcgacggttccgttacagaagaacagttgttacgtgtcttaaatatattagtatctacatctgttggtttcaatattcctatttttaataatggacttggttacaataatctaatatatatttctttgttgcttgcaaaaatgcaatcaaataaagaaatttcatacatgggaactacaaatgcaaaagcgttttctgttctatcaattgaggaaccagaagctcatttacatcctgaattgcaatatcaattccttgactttttgcgtcagaacatagctgataagaaagtgaaacaagtattcataacctctcactcgcctagtttgactgctaaagttaaattagatgaattgtgctgcctatttaaagatcataggcacaaagtgaatgcttactacccgcgcaagatatatgcaagtgaaccaaaatctaagaaatttgttcaacgctatttagatgcaactcgcgcagatatgttatttgcaggcaaaatcctttttgttgagggtttagctgaacaaatactgattcctgtctttgtgaatttgttaggatataaccaagattggctaagtcaacaagctatagtcattaacatagctggtcgctactttgaccactttctgaagatgtatgatggtacaaatgaaaatacactacctattcgagttgcttgtattacagatagagatcctgcaagaaagagaaaggcaaatggtagcgaaaaggaatcatatttaagctgttggcctattgagtacaatgctttaccgattgaatatgattataagaatcactcagaggagtttgttgcaaaatatgccaatcatcccaatatccgtttctttagtcaagatgagcatggaaagacattagaatatgacatagcccgcatgaattataccaatcagaatattcttactgattccgttgcaaacaaacaagaattaaaaaatatgatgtctgcaagtacttttgatagactaaagtcagaatgtaaatctgctaagctgattgatatatattcggataatgcaacttgggaagaatcagataaattgaaaggtctgatagccgctcgttatttagattcgataaagaagggtgaaaatgccttagaattagccaatgctttgatggatttatctaatgaagaaaaagaaaatttcaatgtcccgacatatattaaagacgcgatattatggctactaaagaaagaataa

SEQ ID NO: 73325 - DNA, 1719 bp, Bacteroides sp. HPS0048
atggctactaaagaaagaataatacattcggatgatgttcaagacatcaatcattgcaatcgagttcttgcaggtccaggtgccggtaagacatattggataactggtcagatacgtcagatactaaattcaggaaaattgggttcaacaagtaaaattgcctgtattacttataccaataaagcagcccaaagcatagaggaacgtgttggtaatgggggaaaagaattggaagtatctaccatccatgcatttttatatgctcatgttatcaaaccctatttccatctgatttcagaaacggaatatttcgcaattgaaaagctggatggtcatgatgatgatatagctataggacatagctctttagttgaaattgttcctaaatctatgaagtattttgcaatgagttttacggattattcatccctgaagagatacattgaaaaatatcattggcatttggacaagacggagatacaattgaaatcagcggcaaataataaatctccgcttagaggatttggagctaaagaagtcaagtcttacaaacaatatgtatggaaagaatatggattaatgcatcatgatgatattttgtattttacatttaaattagtacagacctatcctttaattattgattatctagtagcaaaatttccattcgtgctgattgacgagtatcaagatactaattctattcagcattatatatttcagtgtatcgcaaatgcaggagcaaaagttactattataggagataaggcacaatctatttatcgctttgctggtagtgatataaataatattgcttcctttattgtacctgatctacagtgctttaaaattgaagacaacagacgaagtacacaatcgattttggacgtcttaaatattatgagagaagatctgaaccaacaatctttattgaaagatgattttggaaagcctatgataatggttggcgaagctaaggacaattacattaaagcaaagcagttatgtagccaagaagatttagtatctcttagttggagcaatacaactgcaaactcattaaaattaaatttggccatttctggagcagatgggttgttaaacgagttagttgatagttcttctggaacagatagagcaaagtttgtcttttactgtcttatggctgtagaaaatgcaaagatgatgcttatgaaggatgctatgacttttatattcaaggcctttcatttagataaaaataatattaataataaagaacgagcttttaagttgttattgtatattcttaataatgaatcagaatatagacaaacttctttagcagacttttacaaattagtcaattctttgcgagaaacgccattgcccaaaataacaagaggtgcagctgctgatttattttctaatgcatatctcagttttgcaaaagagattcgtaataaagatgaagagtctatgcatctaaccatacataaagccaaaggcttagagtataataatgtgtttttagtatttgatgaaacgaaaagtgcattggattttctgcttaaaacagatttaaataaggtgcaagatgatcatcgattgtactatgtggcttgtagtcgtgcgaagcatcgattattcctttctattcctaatcttaatgaaggagaaagcgaattgataggaaataaatataacgagaacctgataatttacgctaattgcatatga

SEQ ID NO: 73326 - DNA, 1983 bp, Sphingobium japonicum BiD32
gtgcgtatcgaatctgtaaccctgtcgggcttccgttgtttcagccccgatccgatcacagtgccgatttcatcggagatcacggccgttgtcggcccgaatgcggcgggcaagaccgcgctcctgcacgcactgtcgaagctgtttggcgtatcgcgcgcgcagcgcaccgttcagcgttcagattttcaccttagcgcagacaaccatccggatgatcgcgaacccaaggatttgttcatcgacgtgctgatcggtttgcccgaactggccgatggcaccgcgacaccggagacgatcgccccctcgttccggcacatgcagatcgaacgagagggcaaatcgccagtctgccgtctgcgcctcgtggcgcgatgggaagacgacgggacggtcgaaggtgaggtttcgcaggaactcttttgggtcgatacgctcgatgacgatccgaccgaagacaagtgtcaccctgtttcggcggcggatcgtggcctcatccaactctattatacgcctgccagccgggacgcggcggcccagattagggcaacgacgggcgcactagccgctcgcctgctccgcgctatcgaatggtcgtccgagaccgaggaggctgttcagaaagccactgagaatctggccacggcattcgagagcgagtcggcgattgccgcgatcggcaaagccgtgcaggcgcgctggtcaggccttcacgacgatgttgtcgatacgaagcccaggctcagcctggtcagccgccggtttgaggatgtcgtcaacaaaatcgccgtcatcttcgagcagggaccggacggtcaggaacgcggtctcgacgctctgagtgatgggcagcaatccctattctatttcgcgctggccgcagccgttttcgatctggagcgcgaggttgtcgccggcacggtcgaggggttccgcgacgatactctgcgcattcccgccctcacgatcttcgcggtggaagagccggaaaaccatctctccccttatttcctggcgcgcatcatccgtcaggtccgctcgctgaccgatgccggtggcgctcaggccatcgtcaccagtcattcgcccgcggttttgagccgcgtcaatccgcgggaggttcgctactgccgctgcgatccggagacgcgcatctcgtcggtcaagacgatcaagatgccagcaggtgtcgatgaggcagccaaattcgttcgcggtgccgtactcgcctatccagaactctacttcgcccggttcgtgctgctcgtcgaaggagattcggagcgaatcgtcttgccgcctctggctgaggcgctcgacctcctgatcgatcctgccttcgtcgccatcgtgccactaggcgggcggcatgtgcagcacttctggcggttattgaagcatctgggcatccctcacgcgaccctcctggatctcgatctgggtcgcgaaggtggcggctttggccgagtgaagacggcgatcgagaatctcatcgaatttggcgtgccaaaagccaaactcctagaaattgaaggtggcttgttgtccgacgagagactctcaacaatgcacacatggcaggacgtggaagatcggaagattctgaagggatggctcgatcgcctcaagttgcatggagtctacttctccgcgcctctcgacctcgatcttgccatgcttgaagccttcccggaggcatacgaagcgatcattcccaagggcggcggaccaaagatgaccgctgacaaagcggcggaagtagttctcgggacggctggaccagggctcacgctctacacgggggcattcaaggactatccagacctactgccagcctaccgctatcactttcttacacatagcaagccggcaacccatctcgcggcgctgtcgcacatcaaacccaaggcgttgcgcgaagatatgccttctgttctggccgaagttctcaagcacatcgccaagtcattgcggcgggactag

SEQ ID NO: 73327 - DNA, 1905 bp, Sphingobium japonicum BiD32
atggcggtgctgtcgcgacgggttcgcccggatgattggaagccggtcggcgtggacgcgctcgaagcgaatgcgttgaaggttgtccggtcggcagacaatcgatccgtcatcgccggccccggtgcaggcaagacggaattgctcgcgcaacgcgccgcctatctcctccagacgggcaccgcacctccgccagggcgtattctggccatcagcttcaagcgcgatgccgcaacgaacctcgccgcgcgggtccgtcaacgatgccaccgcattcatgccgggcgcttcgactccatgacgttcgacgcctttgcgaaggggctgatcgaccgctttggtcaggcattacccgaactctggcgacccacgcccgactatgaaatcatgttccccaatgatcgagattatcgggatttccttcagcagcaactcggtgcccctccgacatcggtcggcatctacgccgacattcaagcgataacagtgaaagcgttcgaacgccgtcatctggtgggattgccgctcccgttggaaggctggccaaatccgacgccgtgtcaatgggcagccgatcgctactggcaaacgtcgcttcgcagtggcaagacgagcggcctgtcgtttcccatgatcgggcgccttgtcgaactactgttgcgggttaatccgatggcgcgcgacgcgctgcgactgacctactcgcacctgttcatggacgagtttcaggatacgactcaaatccaatacgatctggttcgcacaatcttcctcggcaccgacactgtgatcaccgccgtgggggacaacaagcagcagatcatgcgctgggccatggcgatggatgatccgttcacggcttttgacgccgacttcgccgcgaagcgaacacctctctacaacaattatcgttcgtcgcccgagctggtgcgtatccagcatgttctggcccaagccttagacgcgcgcgccgtggcaccggtatcgaaaacggtgggcacgatcgcaggggacagttgcgcaatctgggatttctcgacgccggaggtcgaggcggaccgcctggcggcattcgttgccgccgagatgaagacccaaaagctcggcccacgcgatttcgttctgcttgtccgccagaaggccgtcgactacgcggctgtcctcgaaccggccttcgcggccgccggtattcccctgcgcaacgaggccgggaccgtcggcacggtcatgctgcaagaactgctggcggaagaagcatcggaactggtcgtcgccattctgcacctcgcgatgaccaagcgggccggccgatattggacggactgtcaggaggcgctagctgcactccgtggcgtcgcgcccgatgaagaggccgcgcagaccaaacttgcccgcgaactggacgcatacgtgatcaagctcagcgccgcacatcccaatccaccaaaaacaaaggcaatagcgcaatccatcgtggacgacattctggccttcatcggccgggaacggctgatcgccgttcatcccgcctacggccagggcagctggctcgaaaaggttcttgatgcggtcgcggtgcatctgctggtgtcgtcggctgacggcatcgattggtcatcggctcttgacgcctatgaaggcatccatgcgatcccgctgatgacaatccataaaagcaaaggactcgaataccacagcgttatattcgtcggcttggacgatggcgcatggtggagtttctccaacgatcaggtcgaggctactgcgggtttctttgttgcattcactcgcgccaaacagcgtgtcgttttcacctattgcgctcgtcgtggctcacgaaccaagatcgcgacactgtatgagcttctgagtaaggcaggggtgcagagtgtgcgcgttgcttaa

SEQ ID NO: 73328 - DNA, 2100 bp, Streptococcus pneumoniae 1488
atgaagttaacaaaaatggttattaataattttaaatcttttggggagtgtcaagcaattaactttaataatcaaactgtactgatagggaataatagttcaggaaagacaactgtattacaggcattgagtaagttgttttcagataaacaaagtgatagaatcattcgaaaaagtgattttcatttaccaaaagggttaagacctggtgaaaacacaagaaatctttttatagaaactatttttgagtttgatgaacttgatggaactgtctatggaccagccattccaacatttttcgagcactttacagtttctcaagatggtgcaaaaccttttttacgaatcagattagaatcttcctgggaagatgatggaacagttgaaggaagtattgatactcaaatttattatatttcatctgatgaagatactattagagatgaagacaaacatcgtgctcctagaaaggatttggataaaattagggtactttatgtaccagcttcaagaacgcctgagaaggagttgggtaatgcttcaggtagtatgttaagtaggttggtaaatagtataaattggactgaagatgagataaaagaaattaaagataaaattgatgagttgaataacacttttttatctgaaaatggagcattaactcagatcaacaatgagattcagaaatcatgggaattatatcatgaagataaccgtttttctcaagcagagttgattattaattcttctgagatggcggcagcacttagacagattgccttaaaattttcaccaacaaccactgaagaagcatttacagtttcagatctaggagatggactgagatctattttttatttttcacttgttgattcgatacttgatattgagttagaaattaccaaagatcgtgaagagaatcctgataatccaagatttaagttggtacctccaatactaactatcttagcaatagaggaaccagaaaatcatattgctccacatcacattggaaaactgataaaaaggtttaagcaattaggcaataatgacaactctcaattaattttaacttcacattctccagttattgtaaaaagaattgacccagaagatttgaggtatttaagaatagaaaataatgacagtgttcttcaaaccattgtttctgatatacagttacctcaatcgaatgatgagtcttataaatacattaagggagcaattcaagcctatcctgaactatattttgcaaagttagtagtactgggtgaaggtgatagtgaggaactgctattaccaaagttttttgatttacttggactggaaattgatagttctcagatttcagtagttcctttaggaggtaggcatgttaattatttttggaaattattgaacgctctcaggattcctcatattaccttattagatttcgataacgaaagatatggaggtggctggggaagaattcaatatgcaataaaacaattgatactaaatggggttgctaaagaaaaacttgttactgtaacagccgaatctcaaaaatcacgagttctagatgatgatgagattgataaaataaaggactggaagattgatagacctgataatcagttgcttgaggggtggattaaaatgttagaaaaattcaatgttttcttttctgcaccacttgatattgatttcttaatgttacagtattataaagaacattatctggaaactttatctaccaatgagggacctgttgtttcttatactgatgaaaatagtgacaataaaaaaataaaattaactaaaatggatagaacaaatgattatcaattaattggttttaaaaatcgcatcagtgaagctatacaagcaactttaaaagataagagcggacccggtgatagcttcactgaagaggaaaaggaactaatgatttggtatcaatatttctttttaggtagaggaaagccaacaactcatatgcaatttttatcatctattagtgatgatgaattaacaagaaatctaccccctgtatttaaaaaaatagttaaccgtgctgaagaattacttggagatattgaacatggtaaagagtga

SEQ ID NO: 73329 - DNA, 1818 bp, Streptococcus pneumoniae 1488
atggtaaagagtgaggagtggtttcctaaaggagatatcattttagaagagactgcattaggagccgtcaaagatgtgactaactgtttagtcattgctggaccaggtgcggggaaaactgaattactagctcaaaagttagactatctattctctacaaataaatgcgtttctccgaaaaaaattctagcattaagtttcaaaacggatgctgcatcaaatttgaaagaaagagttaagaaacgttatggtgatgaatatgcttcccgttttacctcattaacctattcggcttttgaaaagagaattctagaccaatttagagatgttctacctgaggatatacgaccatcaagagattatttgattgaagattgggatactataaaagaactactctctatgaatggaattaatgttaatggacggagaatgtcagatataagaaattttgtcgaaaatattatacttaatgacgggaatactcacaaatttaaaaagaatctactaaaaggaacacaagataataagccggtcctcttgtatagtcaaataacaaagttgagtactcaaataatagctactaacgaatacatccgtaaagcacttcaactgacatacgattttgtatttctagatgaatttcaggatactacatatgcccagtatagtttattaaaaacttgttttttaggttcgtcttgtaaattaacagcagttggagatgataagcaagccattatgagatgggcaggtgcaaagcctgatatttttccagactatattcgagactttaattcaaatgaatatcaattgttgatgaatcaccgctctgtacctaaacttgtagaatttcaaaaagaggttcatcagatattaaatagtaatcacagttctattcagacaaataattatccagaatttcaagagggtgaaataacattatttgaatttgaaaatgaaagtttagaagctaagttaattgcaaatgatatagaatcaaaaattcaaggaggtatacgaccatcagaaatttgtatcctagcaaaacaaaaggttggtatttatagtttcgaattgatatctatattaaatggcaaagggattaaagcaagaattgaaaatgaatatcaggatattttaaaagatcctacgtgtaacctattattagatttaatatcatgcagtcaaggaaaacgagatcctttaatttgggaaaatattagtaatttttatggaaatatcaatggaatagatgagttaactgatgaattaattttagcaaaatcctataaggagattgacaatatagttagtgatattacttacctaatttcaaatcctattcccgataaagacaggatgctaaatttaattaattgtattatcgaaaaaataggtgacaaaagaattatttccaactttccaatgtacaatgggaaaaatgacttgcttatcaccatcaataagttttcaaaactattatatgaagagtattctcaatcacaaggtgcatggatagatataatatctaatttcaaaggtgaaaactcaatttcaatcatgactatacacaaaagtaaaggattagaatatgaggcagtttattttttagggctggaggattctgcattctggagttttaatgatcaaccagaagaagataaaagtgcgttctttgttgcactttcaagagcaaaaagtcacttaatattcacatactgtaaattaagaaataatagtccgcaaaataatagaaatattaatgagatatattcattgctgactcaatccaatttagttgatgttattaattaa

SEQ ID NO: 73330 - DNA, 1758 bp, Streptococcus pneumoniae 3051
atggaatttaaaaaactagtaattgaaaattttcgtaattttagttctattgaggttgctttatcaaataaaaatgttatatttggaatgaatgattcagggaaaacaaaccttctatttgcaataagatacctcttggacagaactatacgaaataaaggttttattaaatcggattattatagacatgatactagtagacctataaaaatacaacttgagcttgatttgtctgatagaaaaatggagggggatgaagaatcactaaaatcttcacattctcgtcttctaatttcaacggtagctggagcaagaaataactctagcttagatacattctttatctcattagaagcagtttataatgagaaagagttatttggaaatccggtattaagctggggctcaacactagataatttagtggaagttcctcaatatggtacaagaagtgacattgataaaatattccaaatagtttatgtaaatcccgctatagagttagattccttttttaagcgaaatagaaggatattgttctctgatgattctaaaactgatgaggatgtaaagcttgaggaagagattgagaataacattgaaaaattaaatgaaaatatttctaacttacatttgattactagtgttcaatcacagttgactgaagcctataaaagttatcgtaaagaaaatttagaaattaaaattcaatcagagatatctatttcaggatatttagacaatctcacaccatacattaactggaatgatgatactcacaattatccgacgtcaggagacggtcgtaaaaagcttttatcatatgctattaaccatttaatttcagagaaacaatacaacaagaaggtaattatttatttaattgaggagccagagaatagcttacatcgttccgttcaaatctctctttcaaagcaactttttgttcagaatatttatgaatacttttttctaacgactcattcagcagaagttctttatgaaatggataatactcagctcattaagataaccaatcaacaagatgcaacagggcaatcagtctattacacagttcctaatgaattttcaaacttaaagaaaaaattaaataaatcgttggctcagtcaatcttttatgataggattcttttggtcgaaggtccatcagaatattatctattttctgctatttttgaatatgtaagtcccaatttcgaggctgatggaaaatacttattacaagttgatggaataaattttaaaccttattcagagctatataaggcattagggattgatttttggattaaaactgataatgatttaaaagctagtcgtggagataaacatgtattttctcctattggcttaaataggtgtattgacttgcttgatcatagtgcgactcctatattagataattatcgtatagatttctcttcaaaagatgagagaaaacagaatataaagtctaaaaaagaagaattatatttgactaatcataatctagtattacaattaaatgcagatggaatctttatatcggaaattgatttagaaaatgatttagctcaggttttatccgatagcgagagaaatgaaatgagtaaattagattttgtgaattggttacaaagcagtaaacaatacaatatgctagaatatataagtaatcatcttactaaagagattgcgcttaagattgtggaatcaggatattttaaagttttggcggagtttttagactatgagtga

SEQ ID NO: 73331 - DNA, 1539 bp, Streptococcus pneumoniae 3051; identical to SEQ ID NO: 72173

SEQ ID NO: 73332 - DNA, 1752 bp, Xenorhabdus nematophila F1
atgtatctaggtaagctgaaaatttcgcggtttcgatcttgtgatgatgtgaccgttagcctccgcccagatttaactgtattggttggtgaaaataatggtggaaaatccaatgtcgtagacgcaatcagattgcttactttgccgttgagtggacgccgcgaacgatatccagaggatgaggatgtacgacgctattcgacagtcccaagttttcaaatcgaaggggctttccagggtctaagcgataccctcaaaggtctattgatatctgcagttcccgatcctaccaagagcgaggctaccttcggctatcgatatgaatcgcgttctgaacatgctccccgtggtaagactaccgtgtgggctggacgtttcgacactaatggaccagagcttggttcttctgagttgatcagacacgtttatctccctcctttaagggacgcacatcaggtgctgggtactagcagcggcactagagtgatggcattgctgcgtaatttcttgccaaaagagcgggagcaggatttcctcgctggtgtcaggcgtgcggataatcggcctgagatcttaactacaatcaatacggatatcagtgctgctctcggactactcactaatggagtacgtccgcagatagcggcattggattttggcagcgaaaccttactcgatgtagctcgtgatttgagatttcgtatggccgatactggtttgatacccgaagatattcggtcttctggtctggggtactcaaatttactctacatggccactgtggttgtagagctgaataaggccaaagaggcagacctcacgattttccttgttgaagaacctgaagcgcatttgcatccgcaattacaggtacttgtgcttgagttcctcttggatcaagcacgccaatcagcatcacgtatcattgagccaggaaagcctgaaggccgcatccaaattgttgtgacaacccattcccccaacctgacagcatgggtttctccacgtcacctagtggtcatgcgttcgcggcatcgtgaacaagatggaaaagccatctcagaatcagtgagtgtgcccattgctgaaatagggctaaagccaaagacattagataaaattagccgatatcttgacgtgactcgttccgctttgctgtttggtaacagagctatcttggtggaagggatcgcggaagcactattgttgcccgtgttagcacaaaagcttgtgctagctgatgatttagatgggtggcttaggttcaagggggctgtaattgtgccgattgaaggtgtggacttccgtccatatgtagaggtactgctacggccatatggtgatgcacgtattgctgataggctgatagtgatcactgatgcggacccaaccgtgttgggaaataggaaagttgatctggaaaatctggctgcaacgcatggagctccagatgctttgatcgttctaaccaatcagcacacattggagcacgaaatttttggcgctggaaacgaaagtttcctgaaaagcgtgtttcttcgtttgcatcgtaattcacgtagagactgggaagcgcagatagagagcattccagaacaagatcgtcccaatgcatttcttaaattaattgagacgaaaaaaactcgcaaaggcgatttggcgcaagctatggcttcgcgcattgaggcgggtgaaccatttgttgttccgccttatcttattgatgcaattcgtggagcttcacgtatatga

SEQ ID NO: 73333 - DNA, 1776 bp, Xenorhabdus nematophila F1
atgactggcatctacaatctaaccccagagcaagagaattttgcttctcacgttggcggagccttcgttaatgcttgtcctggagccggaaaaacgcgaactatcattgctcggctagcgaggatcgccgctacgttgccttctcgtcagggcatagcgatactttcatttacaaactccgctgtagacgagttccgcgaacgatgcctggctgctgggctcgatactcttttaaagtatcctagtttcatgggaacacttgatgctttcgtcaggcatttcgttgtactgccaagttgtgcgatatcgagtcaaacacggccaattatcctagatagttgggatacgcttggtgtagaaattcgtttatcaggtcaatttgcctttcgaggtcaaccggtaagtctagatttgtttgatccagaaaccaacgttattgatcctgataagattcgacatgcaggtttgcaaaatcatgtacgtcaacatcagaatcgatatcaacaagtagcagcaaatcggcgacgttctttgttacaagctggctatatgagtgcaggggatgctcgtgctcaaacattgcggttgattagagataatgtaattggtgagtcacttgctcgcgcattagcagcacgttttcaagaagttatggttgatgaagggcaagattgcaatccactcgatctgcaaatactgacatggctcagagcacatggggtaaatgttacgttcgtttgtgatcctgaccaagcaatctacgaatttcgtaatggtaatcctcaaggaatacagctatttaaggatacatatcctattgcggcgcaaaaggggttgacggggaattttcgtagtagtccagcaatttgccagttagcagccaccctaaggcgagaaggtcaggttgatcggtcgcttggtgaaagtgcaggtgttgactatccaattttacttcttacctacggtggccgcggcccaacggcaattattggtcaggcattccttagaaggattagggaactggggctggagtcaaccaaggcgattattttggctcactcaggcaaagttgcgttgcaggcagctggcgtcacttccagcatttcaaccgggaactcgcgaattgagtcgctggctcgtaaagtgtcagagttctggtcacctgccgcaaccccaagaacgaaggagaatgtaatccagtcagtcgaaatattattgctggatttaatgggggtgcgtcaacgaaatgagcatctggttaaagtcatcgaacgtcttggattggaccggcgtgcccatcggagatgcgccctaagttttctcattaaccttccaaaaacgtgtagagattccgatgaagagcggcttgcctggatagcctgtgttcatgcggaaattgagaagctgcatctgccactccctgctggcgtaagcttacgtcgtttcttccaacagcctcctgatgcgcaatggtcaaagcatcttgaagtgcccgctgctctcagtttcgcatgtggcaacatacatgaagtgaaaggtcgtgagtacgatgcagtatgcgtcgtagtcccgccgaatcgagcccctgaaaacaggattgaagcactcttcgagtcatggcaagcgcgagtagatgcagaggcaaagcgcgtactctacgttggcctcacccgtgctcgtaattttgttgctcttgcgataccaaacgcctttgcagggcgttgtgttgatttgctggccacaggccaagtgccctacacaagagtggatttgtga

SEQ ID NO: 73334 - DNA, 1698 bp, Xenorhabdus nematophila F1
ttggaaatttcatcactttacctaaaaggctttagaaacttcgaagatgctctgattaattttaattcaaatacgttagtgattggggcaaacgatgttggcaaaagcaacatgcttcacgcactacgcatacttctcgacaaaagcctatcagaagctgatattgagccatcaaaacttgattttcatattgataaagataatgttattgagcaactggaaattacaattacattcaaagatgttacagaagatgctgttttatcagtactaaaaggtaatgtaagcgatgatggtacaacaattatcaaatatatcgcacagaaatacgatctcagctataagatttttgttgggcattcagtagaagaactacaagaagtctcaagtaggttctatctaaagtacatgaatttgaagtatattcaatcccaacgggatcttgaacgttttataaacaaagagaagaagcaactattacgcatcgcacaacaattattaaaagaagctgatgttaaggctgatgaaactttactcgcagagattggctctgatttaaccagactaaatggtaaaatttcccaactaaaatatgtgaattccgcgacagataatgtcaataatgaactgaataagttagctcatcactatactgaatatgaagttcaattagatactggcgctattgaggtgaatgattttatagacaagctacagctcggagcagtaactaatggctctaaagtaatgcttgggggggatggtcgtaataatcaaattcttctggctctttggaaagctaaaagcattattgaacatgatactgaccatgaagtggtcttttatgtgattgaggaaccggaagctcatttacaccctcatcagcaaagaaagttagccaattacctaattgatgaactacccggtcaaacaattatttcatctcattcacctcagatagcggtcaactttaagccagactctattattcgactcctattaaaaaatagagctactgctgctgctagtaacgggtgttctaattatattgctgaggactgggaaggaatgagttaccgcatgagtattttgccagcggaagtcttcttctcaaatggtgttttccttgttgaaggcccatctgagattcttttctataacgagcttgctgaacaactacatattgatcttgatcataagaacctttctattttatctgttgatggtattgcatttaatatttatgttgaaataatgaacaccttagaaattccttgggttatgcgaacagataatgatatctcaaaaattcgagatcaaaaccaatggcaatttgcgggaattaatcgttgtttaaagttagttggttgtgaagcatttttacatagtgatagaaaaatagaaccacaggaaacagttgataatggtaattgggaggatgtttcagagaggataaatagtaaaggaatattcctgtcaaaaattgatttagaatctgatcttgtcagtgaattgtctgccgaaattcttactgttctcaataaacgaagtgaagccgatgccgttgaatatcttcaaaagaaaaaagcgcttcatatgcgtgagcttttaaaggatattaagcataaattatatcagttagatacaggggaattggcgaagccgttacataagttggtagaaataagtaaggcctaa

SEQ ID NO: 73335 - DNA, 1620 bp, Xenorhabdus nematophila F1
atgaatacgtttacaccaacactgcaacaaaaagcagctatcaattatgatggcagcatggttattactgcttgtcctggaagtggaaaaacaaccataatgaaggaaaaaattcgaaaaataattcctgaactaccaaatcataaaggtgtaattgctattacatttaccaagaaagcgagccaagaattagagaaaaaatgcaaacatcatgcacatgataccaaacatagttttttcggaactattgatagtttttgcctaaaagagctgatcttaccttttatatcaagagtatggggtagtaacccaacaaaatgtaaaatagtcaaacgactacaaaatccgtacaagttcttcctaaaagaggaatacacctccctaacaattgaaaatatcttaaatgatgaaggatttaagcgtctttataacgaaggttttttttggatgaattcatttgctgctatagccttgcatattttaaatgaatcagcagccgcaaagcgttatataaaagccaagtattcacatgtatttattgatgagtaccaagattcatcagagtctcaacaccaattattcctaaagttatttgagctggggctaaccgctacagctgttggtgatgcttggcagtctatttacgagtttcgcggtggtaatcctaaattattaaatagtttgattgaagacaataataacttcaaacatttcgaaatagatataaatcaccgttgccacccaaccattgtaaattatgcatcaaggctgcttgatcctaactttagtttactcccatacgacgaaaatgatcttagggtttttagatgcacactaaatggtaacttagcaaatgtagggcaaactatttctaactgggttttaagttggttaaaacaaggacaagtagaaaaagcatcggacatagctatattagcaaagaaagaaaactcactaaaattattaacaagcggagtaattattaattacagattatataccgacaacccgcttgatcagataggatctgattgttctgagttatattcagacctgctggcatttagattgggagctattagtactatccaagatgttatcaacaaacaatttgatcttatttcttcggaagcagctagtattgcagaactaagaaaaatgattagggcattacgtgataaccaatctattgatgagtttatatctaaacttcatattttagcatccattataaacattactgaaacccaagagtcagaccttgccataagaaccattatggatgatcaagtgcttattaaacaatttatgccattggttgataatgaaattcaagttatgactttacacaaatcgaaaggtttggagtttaaatttgtattgcacatcgatcttgaggagtggtctttccctcaccgaattcgtggactcaattgggatgatgtacattatccaagcttggctcaagacacgaatttacattatgtgggtattacacgagctgaaaatttgtgtgtgctcatccgagcgaatcttagacaaaataaacaatgtaagtttagtccatcaattccatcctattttcttcgtcttccccagcttgaagggctttacaaatag

SEQ ID NO: 73336 - DNA, 2190 bp, Enterococcus faecium EnGen0006; identical to SEQ ID NO: 71904

SEQ ID NO: 73337 - DNA, 1794 bp, Enterococcus faecium EnGen0006; identical to SEQ ID NO: 71697

SEQ ID NO: 73338 - DNA, 2190 bp, Enterococcus faecalis EnGen0062; identical to SEQ ID NO: 71982

SEQ ID NO: 73339 - DNA, 1794 bp, Enterococcus faecalis EnGen0062; identical to SEQ ID NO: 71697

SEQ ID NO: 73340 - DNA, 1746 bp, Enterococcus faecalis EnGen0332
atgaaattaagtaggcttatgattgagaactttagaaattttgaagatgtagctattaatttatctaataaaaatgttgtatttggtatgaatgacgttggaaaaactaatttactttgttcgttaagatgtttgttagatcgtaaaataagatctgacggtttctctgaaagtgattattatcatagagatacgtctaatgtcataaaaatcagtcttgaagttgatctaacagatcgtcagactgatagagattcacagcatataatctcaaaagttggtggttcaagggacagttcagagctaaacagattctattttcaagttataggaacctttgatcatagtgaggccctaggtgttccagaattattttggggtaataacttggatagtatgcataaaattcctcaaaatggtagcttttcggatatcgatagattatttaatattatctatgttgatccaactattgatttagattatgttttttctaaaaacagaaaaaaattatttgatcaaaaaaaattaacaaatgaggatatagttatttcgcaagagatttcagatttgacgtttgaaatgaataggaaaattagttctatggaagttatgcggaattttcaaaaggaactaacagatgagtatcatcaactgaaaaaagaggatataacaattgaattacaatcggagatggcaataaaaggtttctttagtgatatacacccgtatataaaaagagaaggagataatgcactttatcctacatcaggggatggtagaaaaaaaatattagcttattctcttttgaattatttaacgaaagaatatgattctgatagaataaccatttatttgatagaagagccagaaaatagtttacatcgttctatgcaagtagctctatcaaagcaattgtttgattattctgtgtatggctattttatcttatccactcattcgtcagaattattatatgaaatggatgaggcttctcttgttagaatatactcacaaaacaaaactgactgtaaatcctatatgtataatgtgcccgaacaatttaaatcaataaagaaagaactgaatgaatcattaacaacagcgctgttttcagatcgtgtgttgctcatagagggcccttcagagaaggcgttatttgaaaaaatattgtcaattgttagtccaatttatgaattagagggcggatatctgttattagtagatggtattaaattcaaaccatactttgatatattaaaagagttggaaatactacctattatcaaaactgacaatgatttgaaagctaaaagaggagatataaagtcattcgatactatcgggttcaatcgttgcttaaatattattggtaaaaaaaatttagaagctattacaattgattactcatcgaaggatgagaatggaaaattaatttggttaataagcgataaggagaggatggtttttgataaaaaaagagagttatatgagtttaacggagcttgtatcagagaatttgaaaagaataatatattcatttcaaaagttgatttagagaacgatttattcgaggttattccagaaaagctgacaaatgtttttggtgataatcctgtagatactctccaagataagaagttattaaatatgttaaaacttattgataatttgaatgatgaagagtgctataaaatttttaatcatgatagatttaaagctttaaaaagattggtggagagttaa

SEQ ID NO: 73341 - DNA, 1548 bp, Enterococcus faecalis EnGen0332; identical to SEQ ID NO: 72071

SEQ ID NO: 73342 - DNA, 1746 bp, Enterococcus faecalis EnGen0341; identical to SEQ ID NO: 73340

SEQ ID NO: 73343 - DNA, 1548 bp, Enterococcus faecalis EnGen0341; identical to SEQ ID NO: 72071

SEQ ID NO: 73344 - DNA, 1746 bp, Enterococcus faecalis EnGen0366; identical to SEQ ID NO: 73340

SEQ ID NO: 73345 - DNA, 1548 bp, Enterococcus faecalis EnGen0366; identical to SEQ ID NO: 72071

SEQ ID NO: 73346 - DNA, 1746 bp, Enterococcus faecalis EnGen0344; identical to SEQ ID NO: 73340

SEQ ID NO: 73347 - DNA, 1548 bp, Enterococcus faecalis EnGen0344; identical to SEQ ID NO: 72071

SEQ ID NO: 73348 - DNA, 1746 bp, Enterococcus faecalis EnGen0361; identical to SEQ ID NO: 73340

SEQ ID NO: 73349 - DNA, 1548 bp, Enterococcus faecalis EnGen0361; identical to SEQ ID NO: 72071

SEQ ID NO: 73350 - DNA, 1857 bp, Enterococcus faecalis EnGen0350
atggatattaatataaaagaattacgaattagaaattataaatgttatgagagtatagatctagatttaaaagattctaatttacttttaggtgtaaataatgttggtaagacatctttattagaagctctggaattatgttttaccccatataaaagaattagcgaagaaattgtatttgttaaaaaaaatgaaatactatcaaaagataagtctataatattggatattttgattgaatctaaagaaagagaatttacggacgactggtttgatttgtttggagtgctaattttcgatgaagacgaaaaacagtatgttggaattaggacaacaataaaatataatcctgtgaacggagagtatcaaattgaaagaaagggtatgaatagttggccaagtagtgatgaagttgaaacttttgataattttgctacagatagaattactaaaagcattattgaagcatttccggtattttatttagatgctaaaagagatattgcttctgaaatgaatgataagtactcatattttgggagattagttaaagatattaagttgtcagaagaaaatctaactgagatggaaagacatttaaatgagataaatgataatatcgttgaaaatagtgaggtattaaaacacctgtctgtcagcttaaatgaaattagtcaggtacttgattccggagagagttctattcaaattaacccagttagtagaaaaataaaagatttaaatcaaggaatggaaatccgctttatggacaaaaaatctgaatccttttcaattactaatcagggaatgggtactagaagctgggctacatttttaactttgtcagcttatataaaatggaaaacaaaagaaatggcggataaagaatctgccttccacccaattcttttattagaagaaccagaggcccatttacatccacaagcacaaagaaaaatctattctcaaatgaataaattagatggtcagaaagttataagtacacattccccgataattgcctctcaagcaaatattgaagagattattcacgtatataaaaaagatgatcaatctaaaactaataatattttgtttcaagaacttaagagagatgaaattagaaaaattaaggaagaagtatttaaaactagaggggatgttctatttgcagatgtattaattttgtgcgaaggagagacagaagatcaggttttacctcaattctttaaagatttttttggttgtgacccatttgagttaggtgttaatattgtaagtgttgggggatttggaaaatataagcctttcatcagggtagcaaaagatttagatattgaattattcattttaagtgatggtgaaaaagatgtgataaaaaaagttaaaaaagcatacagggaagtattttctgatgttactaatgaagatttaattaaacggataaaatttttgccaaatgaatctgatttagaatcatacttgcttgattgtggttaccaaaatgaacttctaaatgtaattgatcaaattgaaggtacagagggatatttaaatcactttattgctgtaaaagatggtactgagaagaaaagagttaaaacagaaaaaatatgtccaacttgtgaacaaaacatttttgaggctccaattagagtttatagtggtgataaagggtatcaagaagctattttagattatttggaaagcaaaaaaacggagtattcttcaatgattggttgtgaaattcttaagcgaaacgacaaaacaaaaatacctgaaattattcgagaaatgttttatgagatatctaacgtcaagaatttagctattacaccattatatttagagaggtga

SEQ ID NO: 73351 - DNA, 1821 bp, Enterococcus faecalis EnGen0350; identical to SEQ ID NO: 72383

SEQ ID NO: 73352 - DNA, 1746 bp, Enterococcus faecalis EnGen0356; identical to SEQ ID NO: 73340

SEQ ID NO: 73353 - DNA, 1548 bp, Enterococcus faecalis EnGen0356; identical to SEQ ID NO: 72071

SEQ ID NO: 73354 - DNA, 1746 bp, Enterococcus faecalis EnGen0358; identical to SEQ ID NO: 73340

SEQ ID NO: 73355 - DNA, 1548 bp, Enterococcus faecalis EnGen0358
atggaaatcgtcgatgagcaagtaagaaaagatatcttagctgctagcggtaatattatagtttctgctagtgctgggtcgggtaaaaccacaataatggttaataaaatcctaaaaaaaatgagtgaaatttcagatcataaaacagttgctacaataacttttacggttaaggctacagaggaaataaaaagaaagtcaaaacaaattggagggaacaataaatttgttgtaatgactaacgactcttttgttgaatatgaaatcataagaccatttttgatagatgctttcggcgaaatgtataataatgattttgtgattagttatgaggattctgtaaaatctggttcttttgatgaaggtctaaatatattagaaaagagtaataaactaggaacttatcataacattaaaagaaattttaagtttgaattagcaaaaaaagtattagaacaaagtacagcggctcaagaatattttaaatcaaaatacacaatgatctttttggatgaatatcaagactctgatacagatatgcataatctatttatgtatataaaaaacgtgttattgattgatctttttattgtaggagatggtaaacaagccatatatctatggagaggtgcacagagaaatatttttaatcaactagaaaatgaagggatgcaaagatttgaattagtaactaattttagaagtcattttgaaattgttaattatgctaatcttatgcataatgcttctcagttcagagacgattattctaaagaagtaactcatgttgttcattgcaggaccaatgactatgttagctctattaatgagctttgtgagtccaatatagtggataaaaataaaaatataacaattattgcaaatataaacaatgatgcaaaagatatttctgataatttaaatgcacaaggatttaattttgtttttattcctaaaacaccattagatgacgggtctgaaaatgctaatgtattaaaagtaattgcctgttacttattggatgataactattctgtctttgacatcgctgaagtattgagagtagagcaaaatagaacgttactgaataaaattgatagtttattaaagcctctaaagaaactagtgccattgtcatctaatcaaactaaagacgatattagtatctccttttttgaatctattactaaatttaataactacttagggatgaatataacaaatgatgaaaaagtattattgttagatagtgttacaaacaagtatttctatccagcgtttataaaatctaatgatttgcataaggttatgactgttttcggttcaaaaggcctggaatttaatcaagtgattagttttgctaattactatagcttcaatgatgaaagtaaaaaaaataatcactatgtttgtgtaactagggctgaagaaaaatttgtgatgatggagggagaatttgggaaatatagtgaacaaattggcagaaaattaatagaaagggggatagatagtgaaagtacaaccttcaagttgatagatcatatctaa

SEQ ID NO: 73356 - DNA, 2085 bp, Enterococcus faecalis EnGen0368
atgaagattaaaactatcgaaatttcaggttttaggcaaatttcaaatgccacgtttaatttggaagatagacttacatttcttgctggagctaataatagtggtaagacttcactagtcgaacttctgaactgtgtttttaattttggtaccgaaaaattatccggtgaagatttttctgtagttaatactcaacagtgggtaaatgatgtttatccacaaatattaaattattttcaagaagatactcaaaaagaaaatattatctccaatattcataatttgatttttcctaatacagatgaaaagaatgaagtaattattgagcccattaaactaaaatttcaaattgattatgatgttacaaatgatgatataagaaatttcgctgactacataatggatcttgatccatcttcttccagtttctattttgtttatgaatataatgtagataactctctttttagaaagaatctaataaatcattacgataaattagaacatcgcatcagaaaaatactttcagatcctgaaaataataacgataaaaatattaaaaaaataattttgaaagtatattttgaatccctatcagaaaccattagatttacagatagtaacttcgaaaatggcggaaagattgatcgtaaagatttcataaagcttttcaattttcaaaaaattatggctggaagaaccttagatgatactagtacggacagaagtaaaattttaagtaaaaatattgttgatattgctagtgaagctgaaaattggggaaaaacaattgaaagtttgcccgatacaatattggaggctattgaaaatgaaaatatcgaacaaattataaaaagcacttccattgactctcttaaagaaactatgtcttcaattttgatgacgaacggtggtcagacaaacgaaatcattattaatatggacatcactgaagattctcttaaatcactacttaaaaacatcacaagtgcccaatatatgctggatgaccactatttaaatgaatcatcacaaggattagggtatagcaatcttatctatatgcatttgcaactagaaaaatttaataaaacaattgatccattgttggttaatctttttgtaatcgaggaaccagaatctcatatgcatccccaaatgcaatatgttttttcacaatatttacttacttactttgcctccaaaccagaattgcaaggttttattactacacactcgcatgaagttgttagaggtgcaaagttatctcaattaagggtacttagaaaagttaatagcttcaagtgttcattatatgatttaagaagttttcataataatttagaaggtatgcctgaattgttggatttttacaattatttttatgcaattagttttccagatattatttttgcggataaagttattttgtatgaaggcgatacggaacggatgcttattaatagtcttttgaaagctgatcaaacaccatttcctaaactaaaaagtcagtatctttcatttgttcaagttggaggggcgtacgcagttaactatgaacctattctaaaatatttggatataaaatctctaataataacagatatagattatggaaaagaatgtaatactaaaaatgaaatagaagtttccagatctacaaacgattccataaataaattattaaatatgaaagtaaaaaccgaaaacacaaaaactattaaagaaatttactcctgtagagaggataatgaaccatatgttttaataggcgataacatatgcttaactttccaaggtgaaaaggacggctatacaagaacgttagaagaagcaatgctatgcaaactgtatgatgtaaaggtatttgatacatcgacaaaggaacagtggaaagataaaagaaatagggataaattaaaatattcgatccctaacactgatgaccttattggagtaaggcacatcgttaatagtacttcaaaaaataaaacagattttatgtattctgctgtattaaataataaattaatggatacattaccttactatattgaggaggggttgaagtggttagaaaaatag

SEQ ID NO: 73357 - DNA, 1953 bp, Enterococcus faecalis EnGen0368
gtggttagaaaaatagaaaattttttcatcgttaatgctcccgcaggcagtggtaaaacaaccactattcgagaaatgattaataacattatttcgattaattccaaagacaatgtattatgtataacgtataccaatagagctgcagatgaactttctaagagtttttcttctcctaatatttctatttcaacaattcactcatttttaaacaattttatgaaacaatattttggtagccaagaaattattgacttatattttgatacttaccaagatagtatacaacaaagaattgataatagagaggctaaagaaaatcagactgaaagcaataaaaaatatattgaaaaatacggagacctgagtatcgatgttcttcgaagaaatattacaaatatatattacaatgaaaatagctttagttccctatattatggcggcttaggccacgatgaccttatttcattttcaagtaaaattattctaaaatataaagtgatacagaatagattatcatacaaattccagtacgttttcattgatgaatatcaggatacaaccgcagatgttctaaatattttttatgaaagcttaaacgaaaaaagaacaatcttatatctattcggtgataagatgcagcaaatttacaaaaattatgatggtagctttgaaccaaagtttttaaaatttgattctagtaaagctttaactactaactaccgttcaattcccaaaataataactctgctaaataatatatacaatgattccagttttgttcaaaatgtttctgaggatatgaacaagattgctcctaattttgatcctagagtaattatctgcaacgatgttgatgaaaaattaactcaaattttggatgagtatccgaattcattaactttgttcttatctaatcaatctagatttcagaaaataggttgcccttccttatatagtacgtttagtaagatggatcgctattcttttagtaaaaagtatggcgtagtagatgtattaacagacaatactaaagataatcctgattctttgataagacttattttttcagtagcttttattaataataactatgcatctaataactacggtgtaatcgttcaaaaaattaaggatgaacagtcaacgattggattaaaagactggaagctgtctagccatcaagataaagttactttaaatgcaattctagaagaattggcattgatagtatcttcttcaaaaaaatctatcaaagatgtcttgatttttctaaaagaaaaaattccacaatcagcagtaacattaagcgagattatggaagatgaaagttattctgatgcattggatgtgcctatcgaagaagtaataaaactttataactatttggagtacccaaaagtatccacacaacatggcgtaaaaggagaaagtcacgatgaagttatttttgttgccgatgatagttataatccacatgtgagtatgtataatttttttgatatttggtcagataccgaactctcactcacatcattagaagaattttattatcaatattctttcgaattaactaaaattactgaaaaagtagggatgaaaattaacaatttaaagagggatagtttcaccgctcatgaagattacttaaaaggcgctgcctctagtataatgacaatgtttcaggagaacgatttatttaataaactctgttttctagaatatcaaacattcatatccaatccaaatgtgactaacgcaaaaaaatgctttaaagaatctcaagtatatggaattttgagtgcttataaactcttttatgtggggtgctcgagagctcgtaaagacataactgtcttattagatagcaacaaaataaagggcaatatggatttacaaatacaaaaatttgaacaacttggatttaaagttcataacgaatctttgatttaa

SEQ ID NO: 73358 - DNA, 1746 bp, Enterococcus faecalis EnGen0367
atgaaattaaataggcttatgattgagaattttagaaattttgaagaggtatctatcaatttatctaataaaaatgttgtatttggtatgaatgatgtcggaaaaactaatttactttgttcgttaagatatttgttagatcgtaaaataagatctgacggtttctatgaaagtgactattttcatagagatacgtctaatgccataaaaatcagtctcgaagttgatttaacagatcgtcagactgatagagattcacagcatataatctcaaaagttggcggttcaagggacagttcagagctaaacagattctattttcaagttacaggtacatttgatcatagcgaggccctgggtgttccagaattattttggggtaataatttagatagtatgcataaaatccctcaaaatggtagcttttctgatattgatagattatttaatattatttatgttgatccaactattgacttagattatgttttttctaaaaatagaaaaaaattatttaatcaaaaaaaattaacaagtgaagatatagatatctcgcaagaaatttctgatttgacgtttgaaatgaataggaaaattagttctatggcagttatgcaaaattttcaaaaggaattaacagatgagtatcatcacctgaaaaaagaggatataacaattgaattacaatcggagatggcgataaaaggtttctttagtgatatacacccgtatataaaaagagaaggagataatgcactttatcctacatcaggggatggcaggaaaaaaatattagcttattcacttttgaattatttaacgaaagaatacgattctgatagaatcaccatttatttgatagaagagccagaaaatagtttacatcgttctatgcaagtagcattatcaaagcaattgtttgattattctgtgtatgactattttatcttatccactcattcgtcagaattattatatgaaatggatgatgcttctcttgttagaatatactcgcaaaacaaaactaactgtaaatccagtatgtataatgtgcccgaacaatttaaatcaataaagaaagaattgaatgaatcattaactacggcattgttttcagatcgtgtgctgcttatagagggcccttcagagaaggcattatttgaaaaaatattgtcaattgttagtccaatttatgaattagagggcggatatctgttattagtagatggtattaaattcaaaccatactttgatatattaaaagagttagaaatactacccattatcaaaactgacaatgatttgaaagctaaaagaggaaatataacttcattcgatactataggattcaatcgttgcttaaatattatcgatagagaaaatttagaggctattacaattgattactcatcgaaggatgaaaatggaaaattagtttggataataagtgataaggagaggatggttttagataaaaagagagagttatatgagtataacggagattgtatcaaagaatttgaaaagaataatatattcatttcaaaagttgatttagagaatgatttattcgaggttattccagaaaaactggaaaatatttttggtgagaatcctgtggatactcttcaagataagaaattactaaatatgttaaaacttattgataatttgaatgacgatgagtgccataaaatttttaatcatgatagatttaaagctttaaaaagattggtggagaactaa

SEQ ID NO: 73359 - DNA, 1548 bp, Enterococcus faecalis EnGen0367
atggaaattgttgatgagcaaataaggaaagatatcttagctgctagcggcaatattatagtttctgctagtgctggttcgggtaaaacaacaataatggttaaaaaaatcctaaaaaaattgaatgaaatttcagatcataaaacagttgctgcaataactttcacgattaaggctacagaggaaattaaaaaaaagtcagaacaaattgatggaaacaataaatttgttgtaatgactaatgactcttttattgaatatgaaatcataagaccatttttgaaagatgctttcggcgaaatgtataataatgattttgtgattagttatgagcattctgtaaaatctagttcttttgatggatgtctaaatacgttagaaaagagtaataaattaggaacttatcataacattagaagaaattttaagtttgaattagcaaaaaaagtattagagcgaagtacggcggctcaagaatattttaaatcaaaatacgcaatgatttttttggatgaatatcaagactctgacatagacatgcataatctatttatgtatataaaaaatgtgttattgattgatctttttatcgtaggagatggtaaacaagccatatatctatggcgaggtgcacagagagatatttttaatcaattagaaaatgaagggatgcaaagatttgaattagtaactaattttagaagtcattttgaaatagttaattatgctaatctaatacataattattctcagtttagaaacgattaccctaaagaagtaactcatgttgttcattgcaggactaatgactatgttagctctattaatgagctttgtgagtctaatatattggataaaaataaaaatataacaattattgcaaatataaacagggatgcaaaagaaatttctgataatctaaatgcacgaggatttaattttgtttttattcctaaaacaccattagatgacggatcagaaaatgctaatgtattaaaagtaattgcctgttacttattggatgataactattctgtctttgatatcgctgaagtattgagagtagagcaagagagaacggtactgaataaaattgataatttattaaaacctctaaagaaattagtgccattatcatccaatcaaactaaagatgatattaagagtagcttttttgaatctattactaattttaataatttctttgggacgaatataacaaatgatgaacaagtattattgttagatactgttacaaataagtatttttatccggcatttataaaatctaatgatttacacaaggttatgactgttttcggttcaaaaggcctggaatttaatcaagttattagttttgctaagtactataacttcagtgacgaaagtaaaaaaaataatcattatgtttgtgtaactagggctgaagaaaaatttgtgatgatggaaggagaattagaaaaatatagtgaacagattaacagtaaattaagagaattaggtataggtagtgaaagtacaactttcaagttgataaatcatatctaa

SEQ ID NO: 73360 - DNA, 1746 bp, Enterococcus faecalis EnGen0330; identical to SEQ ID NO: 73340

SEQ ID NO: 73361 - DNA, 1548 bp, Enterococcus faecalis EnGen0330; identical to SEQ ID NO: 72071

SEQ ID NO: 73362 - DNA, 2190 bp, Enterococcus faecium EnGen0261; identical to SEQ ID NO: 71904

SEQ ID NO: 73363 - DNA, 1794 bp, Enterococcus faecium EnGen0261; identical to SEQ ID NO: 71697

SEQ ID NO: 73364 - DNA, 2190 bp, Enterococcus faecium EnGen0262; identical to SEQ ID NO: 71696

SEQ ID NO: 73365 - DNA, 1647 bp, Enterococcus faecium EnGen0262
atgacaaatatcttcgaaaaaatcgtaaatgatttaaatttagaacaaaaagatgttgtggaaagtgaagataacctttatgtaaatgcatgtcctgggagtgggaaaacaagggtacttacaaggaaaattgcttaccaagcaattaaacacgatggatcactaaaaagaataattgctatcacatacactaatagagctgctgaagaaattaaggaacgcctaagtttacttagtatagatgatgatattaatatttgggtggggacaatacatcagttttgtcttgaatttattatttatccttttaaaatgaatctctcaagagtatcaaaaggatttacaattattgatgattatactcaaagagcttacgtcagccaaattaataatatgctgaatttaaatctcaaaacgtatgaactgaacaaaattgatttgtcactttctcatgattttaaaattaatgaagttcagtatactcaagtttctgaaatgtatcacactatgttggaaaaaaataaagaaattgattttgatatgattttactagtagcgtataaaattttaactgtaaacagtaacgttgcacgtaatattgctagtaatataagggcgatttatgtggatgaatttcaagatactagagaattacaatacaatgtaatagctaaattacttcaaaacaaccctcaaattcagtcaatgtttgttggagatattgaccaagcaatttatggatcattagatggtatagctaaatcagttgaagaactagaaatgctaactagtcacacttttcaatcaaagacgctacatggctgttacaggtctaatcagagattagtagacttctactctaattttcagagttgtccttacgagattgaaagcagagggaataataaaaacgaccgtggttttataagttatgattgcaaagttactaaggaggatttacccaacataataaaaaatataataaaggaaaagattgaaagcggcattcatgaaaaagatatttgtgtacttgctcctcaacactatcctctgttttcactgggtgagtatttaaagaaagaattaccgtattgcaattttgatgctataaatatatcaccaattaaggtaaataatcatagtttatttttcaagttagcaattttgtactttactgaatcaggtgaaaaggttcgaagaagaaagctaattgcaaacgatattttaattatattaaaaaatgaatttggaatagaagttaaagattattttattgacttagatttattacagctaataaacagtgtgaaaagaatgtatagtggagacgacaacggtgttgatttatacaaatttgttaccaaacatatatttgttaatcttaatattgacgagaaaaattacccgtctatttttaagcactatctattttttattaacgaagtagaagatcggataaaaaataattcattatctagtagtgtatctagttttaagaagatgtttaaatctcgagatggtatcacacttactacagcacataaagttaaaggaaatgagtatgatactgttatcgctattaatcttctaaacgggaaaattcctcattggaatgaaatttttagtcaagtccataatcctgtgtaa

SEQ ID NO: 73366 - DNA, 2190 bp, Enterococcus faecium EnGen0264; identical to SEQ ID NO: 71696

SEQ ID NO: 73367 - DNA, 1794 bp, Enterococcus faecium EnGen0264; identical to SEQ ID NO: 71697

SEQ ID NO: 73368 - DNA, 2163 bp, Enterococcus malodoratus ATCC 43197
atgaatttatcgaaaatacaaattgtgaattttagaaattatagctcaacaactttcagtttttctgctagcgcaaacactattatcggagaaaacgattcaggtaagtcgaatgcattgactgcaattagaatgttattagatgataatttttactattctgtaaaaagtttaaacgagaacgattttaacaattctctagacaactttagaggtcattggattattatttctgctgaatttgagaatatttctgatgaggaaaatgataaagaagttatcgcaagtcttagaaaagaaatttcaaatacgagcttttctgaaggaaatgtctgcttaatcattcgtccaaatgtaaaaaaaagacaagaactccatgatgtatctggcgatgtttttgattttgaagatgttagaaactcgatacgtatatcagattatgagtttatttatcgcggtaaaatgactactgattttactgatccaagaatatataaagatatagttggagattttgaaaactttaaatctcctgatcctaaggataaacaggataatgaacaatatataggtagtaagatagatataaaagatattaatgaacatatttcggtagtttttattgatgcacttagagatgttctcagaactgtaggctctacatctaatcctattaaaaaaatagttgaggagatagaagataaaatttctgataccaaatttgaagatgttaaggataagataaaagatttgaatgaatctattactgacattgatgaaattagagaaattaaacgtgatataaataataaattagtagatattttgggtctagtctattctcctgatttatccttatcctcaaatatatcggatgatctcacttctttgtctaggtttttaaagctaagacctcaaaatgaggaggacatgaagtcactcggtttaggacatttaaatatgatttttatagctttaaaaattgttgagtacaataaatgtagttttagagaagtattgaatgttatgctgattgaagagccggaagctcacattcatcatcacattcaacgaactctttttcaaaatttgggaattaaagataaatcaactcaggtaattatgacaacccattctcctaatatcgctgaaagttctgaaatatcaagaatgaatatcgttaaatcgtttaataacttatcagtagcaatgaatcccaatacagaactagatatatttggagaaaataatttaaataccaaaataagtctttcgaaatcaatcgaaagatacttggatgcaaaaagaagcaatcttttattttccaaagcagtattgttggtcgaaggtgatgcggaagaaatactgattccaaatcttgtgaaaaattctttaggagtttctttagatgaaattggtgttggggttgttaatgttggtagtactgcttttgaatatatcgcatcactattttctaatgaacgtataaagcgaaaatgtgcaataattacagatattgataaacaaatggttccaaagcttatagtaggaaataagagacaagaagatgggactttaaaaaaagagctagtgaacaataaaatctataaggcaggggcagaagcaaaaggtttagaaagaaaggataaattagaacgtatttttaacggtaacaaatgggtcagtcctttttatgctgagtctacatttgaaattgaacttgccaaagtaaacaatgggatatttagcagtgttcttgaaaaattatatagtaaagaaaccacgattaaacagtggcgagataaattgtcttgtgcaaatgatttgttttttttgaaaaagcttgtggctaatagtgatcaaattaaatgtaatgcagtattaagtcttgctgattctacaggtaaaggctggttagcaactataatagctcaaaaggtaatagaatctaaagaaaagtatatattaccagaatatatattagatgccttagcttttgtctcacttgaatcggttaacgaaaaggttgttgagaagatgatcattcataacactgatataaagatggggattaaggattttttaggggataaaaaatgggaagacgactgtccatgcttgtattcttttatagaaaagtgggaagcaaaacgaggtgtttaa

SEQ ID NO: 73369 - DNA, 1770 bp, Enterococcus malodoratus ATCC 43197
atggggaatcaatttatcgatagaattctagatacgctttctgattgccaaaaagaagtagttcttgactgtgaaaacaatctatttgtgacagcatgtcctggaagtggtaaaactcgtactttaacaagaaaaattgcatatatgagtaatctttatcctgaatcaatgaaaaaaattgttgcaataacttatacaaatagagcggctaatgaaatcatgtcaagacttgagaaactaaatctaaatgagagtcatatttgggtaggtacaatacatcaattttgtctggatttcattctaagaaaatttggattgaatttagaaagaacagctcggggaattaagataattgatgattatgttacaagtagataccttaaagagatatatgaaaatcgtgggatgagatataatccttatgaacatcccaatttgatggtgactacttcaggaaattattttgaagatgatattgaaaaaaaagatttagtagctgagtatcataagaaacttcgaagagctaatgaaatagattttgatttaattcttacactttctttgaaaattcttgaagagaatcctattccaacaaaaataatctcaaacaatattcgatcaatatttgttgatgaataccaagatacaaacaatgctcagtatcaaattctaggacttttagcgaaaaatgataaatctataaagtttatgttcgtaggggattcagatcaagctatatttacatctttaggtggtgttgtgaagagcaaaaaggagattgaggaaattacaggcttaaatttttcaagtaaaaaattagacggttgttataggtctactcagagaattgtgaatttatattcacaattccaatctgaagcttacagaatcagtagcttagcaaattacagtgaagattatggagtcatacaatatgataaagaaactcataaggataatctttcttctagaattgcagatattattcaaaatttgataaatgatggaattagcgaaaatgaaatatgtgttattgctccaaatcagttcatactaacccctgtagcaaaggaattaaaaaagagattaaccaatttgaattttcgttctcaagatgtttaccccataaaaccagatgaattaaatttattttacaaaatcagctttttagtgtttactcctatcggtgaaaaaatgagattaaggaaaactattgcgaatgaggctattaatattctaaaagatgactttgatgtatctatttccataaagttcaaagctctggattttttagatatcttgaattcagcaaaatcgacggaaagcaatgggctaatttttttacaagaaaaaataatatatttgttcgagattttagaaattgataaagcgacgcaccaagatttgtatcaagcttatgaagatttttttacaaaagcttttaatagaattaatgatacaagattgaaattaagtacagatattggtgattttaggaatatttacaaagaaaagtctggaattaatatttcgacaattcataaagtcaagggagaagaatacgaggtggtgattgctttcggttttcttcaagatattgtgccacacttcaaatcgaaaaatcctgagagtgaagcaaaaaaattgttgtatgttactatgtctagagccaaaaaaagaatatacttgttttctgaaaaaggaagacaatatggggcgtatcctcaaaaaaccccaacatctcttttagagtctgccgacattgaataa

SEQ ID NO: 73370 - DNA, 2190 bp, Enterococcus villorum ATCC 700913; identical to SEQ ID NO: 71982

SEQ ID NO: 73371 - DNA, 1794 bp, Enterococcus villorum ATCC 700913; identical to SEQ ID NO: 71697

SEQ ID NO: 73372 - DNA, 1746 bp, Enterococcus faecalis EnGen0335; identical to SEQ ID NO: 73340

SEQ ID NO: 73373 - DNA, 1548 bp, Enterococcus faecalis EnGen0335; identical to SEQ ID NO: 72071

SEQ ID NO: 73374 - DNA, 2190 bp, Enterococcus faecium EnGen0166; identical to SEQ ID NO: 71904

SEQ ID NO: 73375 - DNA, 1794 bp, Enterococcus faecium EnGen0166; identical to SEQ ID NO: 71697

SEQ ID NO: 73376 - DNA, 2190 bp, Enterococcus faecium EnGen0167; identical to SEQ ID NO: 71904

SEQ ID NO: 73377 - DNA, 1794 bp, Enterococcus faecium EnGen0167; identical to SEQ ID NO: 71697

SEQ ID NO: 73378 - DNA, 2190 bp, Enterococcus faecium EnGen0178; identical to SEQ ID NO: 71696

SEQ ID NO: 73379 - DNA, 1794 bp, Enterococcus faecium EnGen0178; identical to SEQ ID NO: 71697

SEQ ID NO: 73380 - DNA, 2190 bp, Enterococcus faecium EnGen0258; identical to SEQ ID NO: 71696

SEQ ID NO: 73381 - DNA, 1794 bp, Enterococcus faecium EnGen0258; identical to SEQ ID NO: 71697

SEQ ID NO: 73382 - DNA, 2190 bp, Enterococcus faecium EnGen0260; identical to SEQ ID NO: 71904

SEQ ID NO: 73383 - DNA, 1794 bp, Enterococcus faecium EnGen0260; identical to SEQ ID NO: 71697

SEQ ID NO: 73384 - DNA, 2010 bp, Bacillus cereus HuA3-9
atgttaatttctgaacttcatgtaagtaattttagatcgtttggatatgaatcacaaatgatagaaactgaaaatttaacagcacttattggtgccaatagttctggtaaaacaagtttaatcatggccttattaagattatttggacaaaaaaacacagatagaactttaatgaaaacagattttcatattccagagagcgctgacgtatctaaaattaaggaaatagatcttatgatagaagcgaagataatatttccagaactaaaattacagtcacctgctaatgtaaaaactattccagaatacattaagcatttaattattgaagaaacaggtgcggatccttatttgcgaattaggttaaaaggtaagtgggtaaaaggttcaacccccgagggtaatatcgaacaagaacttgtttatgtgaaaaccccatatagccatgaagaaaaagaagaagatttaactagagtaccaatacatcaccaaaaattaattcaaatgatgtatatacctgcaatgagagatccagcaaagcaattaaaaaatgcttccggtactttattatggcgcatatttgatggtattgactggccagagaatttaaatgaagatataaaatctttaacgtctccaattgaaacgttatttaaagagattccaagtataaaaggtattcaggggattttaaataatcaatggaataaatatcataaagatgaaagatactccaacagtcaattcaaatttaatggtaatagtttagatgagtttttgaaaaatgtggacattttattcaatcctacagttgatgggaactctgttaaggttgatagtttaggtgatggtttaaaatctttattttatataactttagtatctactctacttgaaatagaaaataaacaagaaaaagatgataagcctttattaaacatctttgcgattgaagaacccgaaaaccatatttcacagcatttactaggaagaattgttagaaacttaaaagaaatatctaataaagataatgcacaagttatcttatcatcacataattcatctatagttggaaaaatagagccagaatatattagacatttacaaatacagaactcaggatcgattgtaaataatattagccttcctgaaaaaattgatgacgcacatacttatattaaagaggctgtaaaagcatatccagatttatatttttcgaagttagtaattttaggtgaaggtgatagtgaagaaatagtattacccaaactattacttgcagacaatatatatttagatgatttcaatatttcaatagttcctttaggtggtagatatgtaaatcatatgtggaagcttttaaatgatttatcaataccacacattacactattagacttagatagagaaagaggtggaggcgattggggcagaattaaatatgtgttaaaacagcttaatgaaaataatagatgctcagaagaacttcgtacagttcaagcaattaaaaaggggacagaaggaacaatacgtacttatagtatgaaagagatagaaaaatttcatacaaggaatagtgagaaggtagattcacataatacttggataaaaaaactagagaaagaagatattttcttttcataccctcttgatcttgatttttctatgttaatgagttttgaacaagaatataaaaatactatgataaatggaccgcaaattccaaaagatataaaatcaacggaatatgaagaaaaattagaaaagtctatacaagcaactttaaaaaatgtaaaagctactgcagtaacatattctgatgaccaaaaaaaattaatgatttggtataattctttatttttaggtagaggaaaaccaagtacacatatagcggctctaaaagatattggagatagtgaaataataaaaaatgctcctaaagaactcttaaggcttgttcaacgtgtgaaggaaaaagttgggttggtaggagatggtataaatgaatga

SEQ ID NO: 73385 - DNA, 1926 bp, Bacillus cereus HuA3-9
atgaatgataaggtgttggagcaagattggaaaacttcaaatgatgtaacactggaagattcagccttacttgctataagagcttctaatcatgttgcgattgccgctggtccaggtgctggaaaaacagaattgttagcacataaagccggctatcttattcaaactgggatttgtccaaatcccaaaaaaatattagctattagctttaaaacagatgctgcaagaaatctgcaagaacgtgtcgaattaagatacggtaaaaatgtagaaaatagatttgaatcaaaaacctttgatgcctttgctaagggaatattggatcaatttatatacgcattacctaaagactatcaacccaaaaaagattatgagattattttaaacgaaaaatcactaaacgatataataaaaggatatattacagaatctaccccttatcatcctaattggcaatatgaatatcatattaatagagtgttgggaaccatgaaagaaacggaattaccaatagtggtttttgaaagtgatttatattcttggataaacgaaagactgtggatagttttattgaatggtaaggggaatttaacaagttcacttactttttcaatgatatcaattttagttgagtatttattaaaagaaaatccattaatagttaaggcattacaagcgacatatagccatgtttttttggatgagtttcaagatacaacatataatcaatatagtcttctgaaaacaatttttttgaactcagatactgttattactgctgttggagataataaacagcgtattatgggctgggctggggctttacagaatgcatttggaatatttaaatctgattttaatgcaactcagcatacacttttcaataattttagatctgcgcctaaattagtttctatacaaaatattttttctaaaactcttaatgacacttccatggaagtcctcccagttggagagtggaacgaaaatgatggggtttgtgaaatatggaattttaaaaatcataataccgaagcaatcctattagcgtcttatataagtgaatggatgaaagcagaaaatttaaagcctagagatttttgtatcatcgttaaacaacaagaacatatctatgcagctgaaataatgaaggaactttccaaaattaatataagaagtagaattgaaaaagattatcaagaccttttatctgaagaattagttttgcttattattaggtttttaaagttaagttatgaagaaaaatctcctgaattatggatgaatgtcattgatgaaatcatagatatgaagtacagagacgttaatccagaaaatataaaatatttaattatagaaaaagaattggtaaaaatgttagatgaagttagaaaactttattcagatattgaagttacaaacttcaattcacaatttacagaaatattacaagaaattgtagtttttttaggcgaagatagtataaaagctacttatccgaaatacaatcaagctaattattttgaagaagtaatacaaaaaatgatagataaactaaaatatcaaaatcgtatttcaatgagggaattattacaagagttttgtggtgagtatagcatacctattatgacaattcataaaagcaaaggactagagtatcacactgtaatttttattggagttgaggatgcagcattttggagtttttctactcaaaaagatgcagataaaaatgcattttttgtagcattatctagggcgagacaaaaaatgatatttactataagtaaaaaaagaaacattttaaagtttggtgaggagaaaaatataatgcaagagactgaaaatgtctctgagcttatacaaacattaatggatgcaggtgtccctttaattgaagaaagtgatttgggaaaaatattataa

SEQ ID NO: 73386 - DNA, 2124 bp, Bacillus cereus HuA3-9
atgtatatttctgaattagaagtaacaaactttagaaattttaaaaatgctaatttcaaatttaaaccaggagtaaatactctaattggagaaaatagttctggaaagtctaatgctttatacgcaataagattacttttagatgatactttaccgattaattcttcaaaatttttagagtcagattttaatcaaaatattattgattggaaaggtcattggattgtattaaaacttacttttaaagatttagattcgagtgaagctgccagctttttagcacatcattctgaggacgtaactgctgaggaatcaataggtacttatgcactttattatcgtccaaataaagctataagaaaaagtttgtttgaatttacacaacaatcaagacctattgaagaattggacgaaatattaaaaagtataactgtgaatgattatgaaacagtctttacttgcagagtgaatgcagattttaatgatgaacaaatgtataaagagctggttggagatttcgagcaaggaattttcccaaatccagaagacgataatactaatatcttaggaaatatttcaccacatataacgctcataaaaaaagaggtttcatgtactttcgtaaaagccttaagaaatgtaatagctgaattaaaacaaaggaaaagtagtcctttgttaaaacttttacgtggtacggcaaatgatattgaaattgaagaagccgatgcaatcaagaaacaaataaaaacgttgaataaaaatataagtgaattagaagaaatagatatattaacgaaaaaaattaaagcgtctttaaatagaactttaggctatacatattcacctaatgtaagtgtcaaatctgaattgcctgaggaaatggaaactttgctacactcattaactttatgggttggagacgatgcaagtagcaatcaagggaaattagatgacttaagcttagggggtgcaaacttaatttatattactctaaaacttttagaatatgagttttatcaagatcaagaagaaaaagcagcacactttttattgattgaggaacctgaagcacatattcatacacacgttcaaaaaactttatttgataactatcattttgagaatactcaagttattataactactcattctactcatatttcttcagcgagtaagattgactcagtgaatattctaattaaagaatctggatttacaaaagtctgtcaaccgaataatggattagatgctgacacttgtaaacgaatagaaaggtacttagatgctacaagatcaacattattatttgctaaaggcgtcatgttagttgaaggagatgctgaacttatattaatcccagctatgtttaaagctgtgtttggtcttagtctcgatgaaataggcgtaagtgtaataaatgtgagtagcacagtatttgagcatattgcatgcctattcgatgaacaaaggattcacagaaaatgtgccattgttacagatttagatgaggcaatagaaaccttgccaggaaatccggaagaagataataatgagcaagaaaaaatgaggaattcccaaacagccggtcaaataagatcaacattattagatgctacatatggcataaatccatgggtagaggttttctacgcacctcacacttttgaaattgattttgctttaaatttgaacacttatgaaataaaagaaagtttgccgtcaatttataagcgacagtctgatattgataactctaccaaaaagttagattcggaagataaaactattgttggaaaagaagcacttagactagctaataaagaaggtaaaggatggtttgctttattagtttcagaaaaacttagttatgaaactgtcataccggaatatattttaagagctattgcatttacttctaaacatattaaagatgaacatttaatagcaatggcaaaatatcgaataaaagaattgtatactgacttacaagtggacattaatacaatgacgtttgatgaattaattgaattgcttctaccagaaaatgatgaggaacgagaagatgatttggttaaattaattaaattgttaggagttgaattaaaagaacatgtatattaa

SEQ ID NO: 73387 - DNA, 1800 bp, Bacillus cereus HuA3-9
atgtatattaatttaaatccttttcagcaagctgtaatagatgaagaggagaatacgcttgtaatagcttgtcctggtagtggtaaaacaagggtgttaacattgaaaattgctaaagagcttgaaaacttaaaaaagagaactaatagaattgcagcgttaacatttacaaatcgcgcagctgatgaaattgataaaagaatacatgaaatgggcatagacagctctaaattatggacaggtacaattcattcattttgcttacaatggattattaaaccatacggaggttatttgccagaacttcagaaaggtttttctatactagatgaatttaaggcacaggatttaaagagtagatttaaagatgacttcgctatatctagatacgaagattttatcaccaggagggacaggcagggaaattatataaatgcagaaagaaattttaatgaagctgccgaaacctatcacaaatatatcttagagaataaattaatagattttgatttgattttatatttttcttatttattgcttggaaagtatcctaaaattgctaataatctttctagaatttttaaatatttttttatcgatgaattccaggatactcaagatctccaatatgcaattgtcggaaaaatagtctgggcagctgaaggacaatgtaaaattttctttgtcggagatccagatcaagcaatatttaaatcattaggtggcgttgtaaaatcttctacggaaataagccaagagattggagggtatagcattaaaaaattagggttgaacggtaattataggtcaacacaacgtattataaatttatacagcaattttcaaagtacagatttatcaattgaatcattgactaattattgtgatgaagatggagttatttcgtttgatagaactatacataaagaaaaattggtagagaaaatcacagaaattatacaagaacaaatttccgatggagttccgccgaatgaaatttgcgtactagcaccgcaatggaattttcttacctctatggctagaaaattgaaatcccatttaccagatgtagcgtttgatgctccaggcctaactattttgccgcgggatcgtgataatttttggtttaaacttgcgaggattattttaataaccaaagagcctaataagtatttaattaggatgaaatgggcaaaagaaatcttagaagaattagttatgttgaatagtactattattcatgttgagatcgaaagctgcaggaaattcctaaaaataataaattctataaatataccaaaagaggatgcagcagaatatttagaagaagcctttaagtacatatttgaaaagataggttttgattatagttccagtgatttattgatagaacagtggaagagtttttttaatggactaagtcgccgttatgagcatttagactttagtgatattcctaaagatattaactatatgaaaaagatgtttaatacaaaaaaaggagttgttattaatacttgtcaaggtgttaagggagaagagtttcatactgtgattgcttttagcctattaagaggatatgttccacactggagtcaaataattaatcgacctacaagtaatgaaatagaagaatcaaataaattattatatgttatatgttctagggctaagaagaatttgtttttattttcggaaagtggaagattgacacaaagtaaacaacagtatcaagtaaataatcagttgaatagaattgtttttgagtttaatagtctagcaccatatagatcggagtga

SEQ ID NO: 73388 - DNA, 2079 bp, Bacillus cereus BAG2O-3
atgtacatatcaaatatcaatataatcaattataaaaatttccgtgccaattctataaattttaatgatggtatcaacgttattattggacataacaatgctggtaaatcaaatttattacgagcattggcattaatttttaatactaatagtaagaaacatttatcaattgatgattttaataaaaacataccattagatgaattaaaggtagatccacctagtattaaaataactgctactttacagcaagaagattgtgaagaattaatgagtgatgacttagtaactataagtaactggttaactagattagaggaaccttatgaagctaaattgcaatatgaattttacctaccaactaggtttcatgaaaaatatcaaagtgcagtaaaagaagcggaagatatagctgaagtatggcaacttgtccaagatgaatttctaagattgtatacatataaaatatgcggtggaaatcctattaatcaagttactgcagatagtgaatcattaaaaaaatttgattttcaatttttagatgcaataagagatgttgaacgagatatgtttagcggaaagaatacgctattaaaaaatgttttagatttcttcatggactataacataaaatcggatggaacattagaaaaggaacaaaaagaggcggaaattaaaattaaaaagaaagaatttggggaatcagcaggagatttaatttcactattgaatgagcggatgacagaaggaaaaaaacacattttatcatatgcacaggatataggtgcttcatatgataaatctactccaaatttcgatggaagtataacagatattgagctttattctgctttgaaattaatagttgaatatgagacaggtattaagatgcctattattaataatggacttggatacaataatttaatatttatgtcgctattacttgcaaaaatgcaggttgatgcaaatgaagattatttaggtagtaatgccaaggtgtatccaatgttagttattgaagagcctgaagcacatttacatcctacaatgcaaagacaattattaaattttcttaaaaaaaatttgaagaacaaaaaagtgagacaaattttcgttactacacattccactcatataacgggtgctgtaaatttggatgaattaatttgtatttataaaaatgggagcgaaactttaattggttatccaggaaaaactttcggtgaaaataaaaagagtaaaaaatacgttcaaagatttttagatgctactaaatccaatatgctattcgccgaaaaaattattttagtagagggattggcagaacagttacttatgtatatattcgctgaatattctaatgtttctctagaagataatcatatagcagtaattaatgcggatggaaaatatttcgatcactttttacatttatttaatacttcaaatccaaatgctattagaagaaaagtagcttgtataacagatagggatccagagcggaaaaacttaactcctagcgaaaaaactgaaaaaaaatcatttaaaaaatgttatccatttgaaatgtatatagaggaaaaaggatatgagtataaaagaaatgaagagaaaaatagttatcctgataatattaaattctttctgcaggatgaaaactatggtaaaacattggagtacgacttaattcgttttaatccaaactttaaaggattagttacagagtctactgccaatagagaagaaatctttaagctaatggatcaatatagtgagggtaaatcggtcgatataatgcttggaaatttaaatacttcaaaagaaaacgaacggattagacaagcattagaagataaacggttaatatggacagacgaagataagaaaaaagcaataattgcttcaagatatttaaattcagtgggaaaaggagaaaatgcattagaattagcttatgtactagaggaaaatttattgaataagaaagtttctgaccaaaaagaaaatattgaatttaaagtgtttaatgtacccgattatattaaattagctatagaatggatgtgtgaagaatga

SEQ ID NO: 73389 - DNA, 1746 bp, Bacillus cereus BAG2O-3
atgatttctatttcttctcaagatacaatagatattgagcgacatttcaaagtcactgcgggacctggtgctggtaaaactcactggttaataaatcatatcagaaatgttttgggccattctgatagattagagaaaacacgtaaaatagcatgtataacatatactaatgtagctgtagaaactattttgaatagattagggtcacaatccattaatcaagtagaggtttcgaccattcatagctttctatacgttcatattcttaagccatatattaatcatatagcagaattatttggaatagactttcaaaaaataaaaggtcacgataaaatcgaacctagatatagtaaagttaaattatggttagaaaatcattctcagattgaaaaactgaagcatccttatacaataaatcaattgctaaatagaccacaaaacaaagatgcattattcaattggttatctggccttaaatatagatttaatagtgaccaaaacttagatttaagtggtgaagaaagtgatgctagacagttatgtaaggtagttaaaattctagatatagatttacttaattataaaaaattatattggcaagaaggtaaaattgatcatgacgatgtactgtattttagttatgaattgattacgagatatccatttattctaaaagtcttacgcgctaaatttccttatttttttatagatgaatttcaagacactaatccgattcaagctaagataatatccttattagcagaagaagaaactattgtaggggtaattggagatcctgcacagtcaatatactcattccaaggtgctagtatagaagattatattaaattcaaagttgataatctaagtgaatatactattactgaaaatagaaggagttctaatcaaataattgatttgttaaatggaattagaacggatattgaacaaactaaaattagaaatgtagactgtgatagacctatattatttgtagggaatagtatagaggcatataacaaaatccaagacatgtttggtaagggtatatttattcaaaccttatctagggataacccaaccgcaaattcaatgaaatttggagtagacaataataatttaaatactaaactgttgggtgaattagcttcaaaagatactaatattcaacgatacagtattataaaaaattcaatggaagctctagagcttgctaaacatagtgattacaaaaatgctataaaaataatgagtgctaattttaatggttattctgaaaaagaacaattcaataaatctgtatcaatgttacaaaaattaatacagttaaaagagacttttttcgaagaacctttaatgttattctatcaactaattagagaagctataagcatgtctggttttagaaacggtgctattcaagatttttataatacatattcttataaagaaatagcattatgtataaattataaagaagatataagtcagcataggactattcataaatcaaagggcgatgagtttcaaaatgtcttattgataactgatacaattgagtttcttactaatgcaaacttagctgaagatgaagaacaacgaatttattatgtaggtataagtagggctatggatagattatttatagtgacacctaaattattaaaagcgaatcgagtaataatagaatctaaattgaacttccaaataatagatttagaaaaggaacctcaattaatttaa

SEQ ID NO: 73390 - DNA, 2247 bp, Acinetobacter calcoaceticus ANC 3811
atgaaattagttagggctgacataagaaatttcaggaaattaaaaaattgttcacttagtttttcatcagatcaaactattttagtaggggcaaataacagtggaaaaacctcagcaataaaagttttaaaattatttttaaaacatggatcctctaatgatacggcttcaaaggaaggttttaagtatacagattttacatttgataattggggaaaattaaacaaaaaagcccaatgttggtttgataaagcagttgtaatgaatccagaagaagaattagaagaatggaaaaaattttgtcctagtctagacttaatcataaatgttgattcttctgaaattcatcatgtaatagagtttttaccttcattggattgggatggagggtttgttggtttgagattaagatttgaacctaaaaatatagaggaattgagaaatgattttgttgaactatgcaatgagaataaaagagtcatctcgcagaatgatcaaattgcgattagcaatttttggccaaatgaaaatatacaagagttcttaagtcgacatctagataaatattttagaataaaatcatatgttattgatccttattctgaaaatacagaagagattttattggagactagtgaacctctgaaagatttaataaaaataaatgtaattggtgaggatgctggattttttaatagtaatggtgcaaaaaacttactatcgagtattattcaaagtttttataagtcacattttgataatgatgatcgtaagaaaacagccaatgatttagtagcaattaaagcaataaatgattctaaaagtgcttttgatacgacgttaacagaaactttctctgaagtattaagtgagataagagacttaggttatcctggaagtaaaaatgatcctaatattagtatttccagtaagattgaccaaattgagacattaggtcatgaaagtgcaatacgttttaagattaataatgatggggaagaagaaattagaattcctgaaggattaaatggattaggttttagaaggctaatttctattactttaacattgatagattttcgtgaaacttggttaagaaagaataaactagatcaagatcctattgaaccattacacttagttcttattgaagagccagaagctcatttacatgctcaagtacagcaagtctttataaagaaagcatatgagaccttgtgtatgggtcaacctagtcattgcggaacacaattattggtaagcactcattcaagttatttagctcgagagctagacttctcaaatctgcgttactttaaaaggaaaaatagtgatgcaataccacatgcagaaatagtagatctttcaagaacttttgatgaaaactcatcacagaatgagaagtttgtaactcgatatattagaactactcattgtgatttattttttgcaaatggagttattttagttgaaggtgatgctgaaaggttactcttaccccattttattaagaatcactttcctaaacttaatagcagttatatctctatactctcagttgggggggcacatgctcatcgattaaagaacttaattgaaaaacttgatctaccttgtttaattatcacagatctagattcagttagtcgagtaattcaaacggatgaagatggaaatattaaaataaataaaaataatactgaaaaagtgaagtataaaaagagtataccgttaccgaatacaagtcaattaacaaataatgatactttaaaaacatggtttcctattaaagataagattgatgaactattgaatttaacgtatgaagaaaaaactattgggaatataagggtaagttaccagactcaagtcactttagattttaagagtaaaaataaaatagtatttccttatacatttgaagagtctatttattttgaaaatagaaatttgattaatactatttttaaaacagatgttgataaagaggatactcgaattaaagcaactggagttctatttaaaatgatgaaagctgaagatttcgaggagtttgatgattttaggaaaagtgtttttttagctttagaaagtaataaagtggatatggctatggatttaatttatggtctagagcctaaggatttaaaaacaccaaaatatattgatgagggtctaatttggttggaaaataaaatattaggcattgatgagttagcacaaggagaagctaatgaagtctgctaa

SEQ ID NO: 73391 - DNA, 1842 bp, Acinetobacter calcoaceticus ANC 3811
atgaagtctgctaatcctatagttttagaagatttaatatttgattatgtatcgtcatctcctccacaaagttttattctatacgcaggcgctggtgcaggaaaaacacatacattacatcaggtattaaagaaaataaaagaagatatacttttatctcttagtcgagaaaataaaaagctcgctgttataacatatacaaatgctgcctgtgatgaaattaaagagcgaattaatttcgatgataatttctttgttagtacaatacatagttttgcttggagtttaatatcaccctttacaaaggaaattaaagaaattattaaagaaaatttaaaagtaattattagtgaagaggaagaggcattaaaaaaatctagagatttaaacaataaaaccagtataagcaggcaagagagagttaaaaagtctttaaaaagattatctttattagaatcaactaggtgttttacttataatccaaattcgtcaaatgttgaagaaagttcattggaacactcggaagttatagatattttttcaaaattattattagaaaaaaagtcatttaaaaaaattctggtgaataaatttcctattctttttttagatgaagctcaagatacttatgaaaaggtaattgatgcattagtccaaacacaaattgaatttcataatcagtttgtaataggattgtttggtgataatatgcagcgaatttttactaataataagaaagatttaggtggatttgttcctgaaaattggaaacgtccagaaaaggttgaaaactggagatgtccgaaaagagtagtgacattgattaataaaataagattcgaagccgataaatttcaacaagaatctaaagttaaggatgatgggtttgctcgttgtttaattattgatacaaataatcagaatttagataaattgttagttgaagctgaaatctgtaaaactatgaaagaaataaccaatgatgataaatggaatataagatctgagataaagactttgattttagaacatcatatggctgcaactcgctctgggttccataagttttataaaccattatacgattcggcattacgaagtaagttgagtgctgctgatactcaatctttaagatttttagtgggtacattttgtgaatttattaattctgtaaagtctaaaaatgattttaatatcataaagatactaagagaaagttcagatgtttttcgtaatttctctactatagaggatcagttgaattatttgaaaaatataagagataaaaaaaatgaattgtttgatcttttgatgaatagtaataattctataaaaattattcttaattatatttatgaaaataacctcttaaatattccaccattattaatacaggcatcaattttagatagctatgctacagatacagacagtacctcctccgaacttattgcatatagccaagccttagatgcaaaaacagatcagctatttaaatatgcatcttatatagatggaagttcggcattcgatactcatcaaggggtgaaaggtttacagtttgaaagagtaatggcaattttagatgatgatgaagcaggaggttttttatttgattatgaaaagtttctaggaattaaggatttaagtgtaaccgacagaaagaatgagtctttaggacttgatagtgctctatctcgtaccagaagattattctatgtaatttgtagccgtgctgaaaaaagtttggcggtagtttgttatacaaaaagcccagcatttttaaagaagcaattaattgaaaaagagtggtttcttgaagatgaaatacatttaatttaa

SEQ ID NO: 73392 - DNA, 2139 bp, Acinetobacter sp. CIP 110321
atgcatatttcaaaagtcagcttagttaattatagaaattttaaaaattcttcttttctatttaatgaaggagttaatacagtaattggagaaaatggatctggtaagacaaatttatttaacgcaataaggttactcttagatgactcttgtattcaatatgcatataaactaaatgaaaatgattttaatagagagctcggtggggattggaaagggcattggataattattagtattgattttgataagttggatagtaatgaggctatacagtctctttttgtccacggtgcgggattactcgaatcagaatctgcaacaaaggcgtgctacacacttttctttagacctaaaattcacattagacataaacttgctgatttgaatgaaggggatatagttgggttgcaagaggtactagaaaaaataaatattcaggatgactatgaaactgtattccatggaaaaagttcagctaattataatgatccgagcatctacgaaagtttagttggtaattttacagatgttaaatttcctagagatattgatgcttcaaaatttggagtgagggtccctcatcagctatcagtatctaaagaaatttctttcacatttatacaggctttgagagatgtagttagtgaattcaaaaacaatagaactaacccattattaacattattaaaaagaaaaagtgatgaaattaagcaagaggaatatcaacctattagtgaattggtcttgactttaaatggtgctatagaaaatctatctgatgtccaagaaattagaaatgatattaaaaatacgcttttaggtacaattggtcgtacttactcgccatcttccttgtcaataaagtctagcgttccaaatgaggctgaaaaattactacaatcattaaaaatttttatgagtgaaccagatgaggagtatgagggaggggttcatgagttaagtttaggtagtgcaaatttaatttttttaactttgaaattacttgagtttaaatatagaaaatcaaaagatacgtttgcaaattttttaattattgaagaacctgaagcacatattcacaatcacatacaaaaaactttatttgataaattggattatgaaaacacacagattatttactcaacacattcaactcaaatatcagaagtgagtaatgttgaaaatattaacattgtaagtaagaaaacaaacaattctgaggtatatcagccttcaacaggtttaagctctaaaagtattaatcagattcagcgttatttggatgcagttcgcacaaatctactgtttgcaaaaggggttattttggtggagggggatgcagaagaaatcctaattccaatcttaattaaaaatgtatttggtgtaagtttagatgaattaggtataagcttaattaatattcgaagtactgggtttgaaaatgtttcccaactttttcatgacagtcgtattcgcagatactgttcaattttaacagatcttgacagtgctatttgtgataccaatgtattaccaatagatagtgataaagttaaaaaatataaagaaaaagttgctagatctgcaaaaagtggtgcggaacgtaaaataaaattagatgaacttgaaaaagataatgattgggtaaaaagtttttatgcgaattatacctttgaagttgatttcattgctgcaggtaatggttttgaaattaaacggatagttaaagatatttatactgatccagcaacttgtattaaagctaaagaagatataagtgatggcaatgtagcagtttttggccgtagagtcttgacgatggctaacagtgctggtaaaggttggtttgctattttactaggagggcatattacatatcaaacagaaatacccgactatataatggatgcactaattttttctaaagaagattattctaaattcttattagcagatatgattgaatatagaataggtaggtatgaagcggaagatgattgtgatatagatttctctccattaagagaaactttagaagagtataagttttcaggattatcattaaattctgtgattgaggaaatacaatctgtgatcgaagatgatcagattttaatttttttagatagattataa

SEQ ID NO: 73393 - DNA, 1800 bp, Acinetobacter sp. CIP 110321
atgtatatattatcggatgagtctttaaaccaggagcaaaaagctgctatatacacaaatgaaaatgtgttattgattgcatgtcctggtagtggtaaaactagaactctcatttataaaattgcttatgaattgagtaagatgacctcatctaaacaatttgttatagctattacttatacaaatacagcagctgaagaaattaaagaaagagtggaaatacttggtgttgacactactcagctttggataggaacgattcattcattttgtttacattggatacttaggccatattacttatatttggataatctaaaaaatggctttacagtagttaattcatatgattctgaagaaattataacaaaattatgtgaaccatataaaaatgaaaaaattaaattttgggattgtggtgtaatagcaaagccaaatggtatttatctaacttgtagtgatcctaataagcaatcatcattgttaaaaataatcagtgaatattatgaaatattgcaaataaataatcagattgattttgaacaaattttaaaatattcatgggatttgatttctaaaaaaaatataattagtaagtcacttagtaaaattttttcaacaatacttgttgatgagtatcaggatacaaaagaaattcagtattatataatttctgaaatattaaaatcaaacaatggcgatactaaaactcttatcgtgggtgatcctaatcaggctatttatgattctttaggaggctttccaatgccgaaagccgatttagaaattttattaggatttaatttggtttgtctcagtcttgagaaaaattatagatcatcagatagaattgtaaaatatttcgacttttataaagtagataataatactattattgcttcaggtgataattcagaatataagagcttaataacttacaataactcagtagcacttgatgatttaattgatgaaatttctcatttaattttattgaatataagagatcataatatttcccctgatgaaatatgtattgttgcacctcattgggttcatataggtgttattactaggaaacttatgattaagcatcctgatttgaacttcaatggaccaggtatggcaccattttctagagatattgataatttttggtataaggtttcaaaaattattttaactgagccatcgccagacatatatataagaaggttgagatggagtggtgaaatcttaaaagatcttgaattatttggagttaatattatagacatatcaaataaggatctacttaaaatttgtaattcaatcacaataaatgaaaatgatgggctagtatatttgagtaaatttttttcaatactttttgaattgttaaatattgattgggaaataattcctactcttaaaagccattacgattcatttttcgcaagttcttatcaacgaatagaaaaactttctgcagagggattgagtggtgtagagactcttgaaaatttcaagaaagtttttaaacaaaaaggaggaatatcggtatcaactattcatggagttaaaggagaggaatatgatgctgtaataggtttcgctctacttgatggctttgtcccgcattttagtgatccaaagggtgagttaaattccaaaaagatgctttatgttcttgcatctagagccagaaaaaatttgcatttaatagcggaaagaatgagaaatccacatagttatcacgctcctaatggtaaagcgcctacttctcatttagagctttacaaatactcttatgataattaa

SEQ ID NO: 73394 - DNA, 1803 bp, Acinetobacter tandoii DSM 14970 = CIP 107469
atgcgtttaaaaaatttaaaaatcaacaactttagaaattttgaatctgttgatattcctttaagtagtaatattgtattgcttggtgaaaatcgagttgggaaaagtaatttactatttgcaatgcgcttagtaatcgatcaaacactttcagattcagctagacaattaaaaatatcagatttctgggatggttgcgatttatctaaaaaaccgaaaattgaagttcatctagattttactgattttgaaactgatctttatttaacctcattactaactgattatagacttgcacatgatcctcaaactgttcgtttaagctatatgtttagatgtaaaccagaaattacgggtttgccaaccagtagtgaagactttgaatttatagtttatggtggaggagttgaaacaagatcaattcataatcaagtaagaagacgcatttctttagattttcttgatgcattacgtgatgcagaaaaccaactaggctcttggagaaattcacctttaaggccacttatagaaaatgctatgggatcaattgattcaactgagctagtcaaagtatcaactgatttagaatctgcaaatacaaaaattgttgaacaaccagcaattaaagaattgaatgattcattaggcgaaaaaatcctaggtctttcagggaaagggcatgatttaaaaacatcactccgcttttctaatgctgatcccttaagattatttcgtactttaggtatgtatattgatgaaggaaaacgtagtattaccgaagcaagtttaggctcagcgaatgttatgctaatggctttaaaactagaggaattctcttggcgcaaagcaaaaaatgaaagaaattattctttattatgtatagaagagcctgaagcccacctacaccctcaactccagcgcactgttttcaaaaatatttttaaagaaaaagattcctcccaagccctcattgttaccagtcattctccaacattagcatcaattgtacctttacgctctattgttagtttaagatctgtagaaactagtacaaaagcattttcattagctgatttgccaattgatgaagatgaaaaagatgatatagaaagatatttaatagcaactcgttcagaaattctgttcgctaaaggcattatttttgttgaaggcgatgctgaggaggctttagttccgagttttgctgaaatattaggctatgacttagatgggctcgggattactgtatgtaatgtagctggaacgaactttaatccatatatcaaattagcggagggattaggtataccttttacagtgattacagactgggatccgttagagggaacaaaaccagcattaggaagagcaagatgcttaggaatttgggattctcgctgtgaagttaatttaggattaaccaaatttactgaaaaaaatagagaatgggctgaaacagttgactttatagaatttagtagttcatttagtaaggtcggaatatttttaaataatgaaacatttgaagttgctatcgcgcaaacccctcatttaagtacggcattattagaaattctagatgaacaaggttttggatcaattcgtacaaaacgtattaatgagtggaaagcagatctagcaaaagtagatagtacacaactacttgctatgattaaagacattggtaaaggacgcttaagtggaaaattaagaaagaaaatttctggtgagaatcaaatacaagtccctaaatatattcaagatgcgattgagttcatggtgaaaaaatgtctaatcacataa

SEQ ID NO: 73395 - DNA, 342 bp, Acinetobacter tandoii DSM 14970 = CIP 107469
atgtctaatcacataactttacaacaggctttatctgaactggaaaaaaataaagagcaatttgaagctgtgcaaagtaaaagtcattgtgttgttttagccggccctggtagtgggaaaactaaaacccttactacagctattgctcgaactcttcatgaagaagtgattgctccaagagctatagcatgtataacttataataatgagtgcgcaatagagcttgaaaatcgcctcaccagattaggagttatgactcaagatcgaaattttattggtactgtacacagcttcgctttaacgcaaattataattccatatgcgcgctgtattgaagattga

SEQ ID NO: 73396 - DNA, 2076 bp, Fusobacterium nucleatum subsp. animalis 4_8; identical to SEQ ID NO: 72118

SEQ ID NO: 73397 - DNA, 1902 bp, Fusobacterium nucleatum subsp. animalis 4_8; identical to SEQ ID NO: 72119

SEQ ID NO: 73398 - DNA, 1625 bp, Escherichia coli P0304777.2
tgattataggtgcaaatgatgttggaaagaccaacctattatatgccattcgattattacttgataaaagtttatctgaattagatctagaaccaaaaagcaatgactttcatgtaaattcgacaggtgaacaggttgaaaatatagaaatcactatcaagtttacagatgttagtgaagatgctgtaatatctaaattaggagggtatgttagcgatgaaggggaaacatacattaagtatcttgcttcatcattaactatggattacaagatattacttagtcatgaacataacaattttgatgaggttcctaatagattttacttaaagtgtttaagtctaaggtatataaattcgcaaagagatcttgaaaaatacattaaaattgaaaagaagcatcttttaagattggcgcaagaagttcgtagtgaaaaggatactgaaaatgatggggcggtttttactgaattaaataagctacttactgaagtaaatgaaaaagttaaaggaataagttatgttgcatcagcaacagaagagcttaacgaggaacttagaaagttatcctatactcatgatagattaactgttcaacttgatactggtgcaatagggattgaccagtttatagagaaattagaattaagtgcgaatacaaatgggaagaaactaatgcttggtggcgatgggtttaataaccaaatccttcttgcgttatggaaagcaaaaagtgttcgcgagcatgatgttgaaagtgaagtagtgatctattgtatagaggaaccggaagcacatctatttcctcaccagcaaagaaaattggcggcctatttaatcgataaacttccaggccaagcaatcgttacaagccactcaccccaaattgcagtgaattttaaacctgattcaatcataaaactatactatgatgatggagagactctagccgcaagtaatggatgttctgattgtattagctctgcatgggatggaatgggctaccggatgagtattattcctgctgaggcattttttgctaacgtggtttttttggtcgagggaccatctgaggtgattttttacactgaattagcaaaagcattaagtattgatcttgattattataacatcagcattctttctgttgatggtatccaatttgaagtttatagaaaaatattaacagctctaaatattaattggatcgtaagaacagacaatgatgcttcaaaagtacctcataagaatgaatggcaatatgctggtgtaaatagggcgttagcactgtgtggagagaataaagaaccaaactcaagtattcctatagatagtaaagctttgcatactaagtggggaaccatttcaccaataataaatcctaacggcgtttatatatctttttttgatcttgaaggagatcttgctaatgacttttcgaagcatgttcttgattatgcaagtaaggataatctagatgatgccgctgattatttgagaggaaaaaaagctatacgtatgcgtgagttaattaaagagaaaaaagcttttttaactgaactgaagagcaaagatatagccagacctctaatacatgcactgaaaattgctagaggtgaattatga

SEQ ID NO: 73399 - DNA, 1623 bp, Escherichia coli P0304777.2; identical to SEQ ID NO: 73155

SEQ ID NO: 73400 - DNA, 1821 bp, Acidovorax sp. MR-S7
atgaaggttgtccggctgaccatctcgaactttcgcggcatcaagtcggcggagctcctgttcgacggacacaccctgatggtgggctccaacaatgtcggcaagagcacgctctgcgaagccctcgacctggtcttgggccccgaccggctcaaccgcttccctccggtcgatgagttcgacttctacaacgctgaatacctggcccccgccaccgaagaaggcgcggagcaggcgccgattccgcttcggatcgaggccgtcctcatcgagcccggcgccgagatcggagccaagtgcggcggcaacatcgagttctggcatgtggccgagcaaaggctgctcgggccgggagaagccgacgccgccaatccgcctgatgccgtgccctgcctacggatcgagaccatcggccaatacaaccccgaggaagacgagttcgaggcccggacctacttctcgcacagccccgatgcccctcccggcgagctgaccaaggtccccaaggggatcaagaggctgtttggtttcctctacctgcgcgcgcttcggaccggctcgcgggcgctgagcttggagcgcgggtcgcttctcgacatcatcctgcggaccaagggcgtgcgcaccagcctgtgggagaagaccatcgagcgcctgcgcggcctcgacatcgaagccgacgcgaccgagatcgcgccggttctgcgatccgtggagaggcggctggcccgctacatcgcattggagtcgcccggcaacgccaccaagctgcatgtttcggagctcacgcgtgagcatctgcgcaagacgatgacgttcttcttggcgctgtcggcggaccaaggacacgtcccattcccccacgccggcacgggcaccatcaacacgctggtgctcgcgctgctctccttcatcgccgacctcaagcccgacacggtcatcttcgccatggaggagcccgagatcgcggtgccgccgcacacccagcgacgcatcgcccaatacctgctgaccaagacgacgcaggccttcgtgacctcccactcgccattcgtgatcgagaagttcgagccatccaagacactgctgctggctcgcaatgccggcgtggtcacggcgcgaaaggtctccgacgccaccggcctcaaagacaacgactacaagcgcttctctcgctccggcctgtctgaatgcatgctgggacgagcagccatcgtcgtcgaaggcgttaccgagttgcatgcgatgcccgtcgtcgcgcggcgcatggaggagagcgatcccaacttgcagccgctggacatcgcgggtgtggccttcttcgacgctgatggtgagtcgaacatgcccaagttcggaaagttcttcaagacgctggggttacgcaccttcgccttctacgaccttgactacaaaaagaagcgcaaggccgagcaggcgcaggctctggcggacaacttcgaaatcaatgtcgagcacgcctacaagggcttcgaagacctcgtcgttgcggaggtgcccgtggatcggctgtggtccttcctgtcgggcctaaaagccaatgatgagaacggcaacgtcgccatccccgatgcgcgcccgaacgacgacgcggtcaaggccatcgccaaagaagccctcggcggcaacaagggcgccggctggtcggcgcgcctgttcgaagagtgcgagctccacgagctgccggccacggtgacgaagtttctgtcgtcagtgttcgcactgttcccacctccacccccgttcgaagacggcgatggagcagcacccgaaccggccgccgctgctgccgctccatga

SEQ ID NO: 73401 - DNA, 1761 bp, Acidovorax sp. MR-S7; identical to SEQ ID NO: 71755

SEQ ID NO: 73402 - DNA, 2190 bp, Staphylococcus aureus subsp. aureus MRGR3; identical to SEQ ID NO: 71904

SEQ ID NO: 73403 - DNA, 1794 bp, Staphylococcus aureus subsp. aureus MRGR3; identical to SEQ ID NO: 71697

SEQ ID NO: 73404 - DNA, 2196 bp, Lachnospiraceae bacterium 3-1
atgaacatacaaaccataaatatccaaaattttcgaaaactgctgcaatgccgtatagatgctagtgaaaaaactactatttttgttggtgcaaataacagcggtaaaacatctgctatggatgcactcggaaaatttctttcagaccgaaagttcacattcaacgatatcactgtgtccaaacgtgcatatatcaataaaattggcgaaaagtgggtgcaggaggattgcaaagaacctgaggatttgctggaatgggattcattaatacctaaaatggatatttggttgaatgttccatgtgatgaaatttattatgtcacagatataatcccaacattaaaatggcatggtggtaaactaggagtacgtttggcttttttgcctaaagacatcgccaaattttttgcggattaccgtgaagcccatgttgccgccagaagaacagaaaaagctcagaaaaagacggtcgtccacttatatccgaaaaatctatgcgattttttagaacgaaatctaaatagttatttttctatcaagactttcattcttgatcctgctcaaacagatatggataaaccacaacaaactccttttgagatggaatgttttcaagaacgtcctcttaaaggaataattaaggtgcatatgattgatgcacagagaggttttgctgaccccgataatccagataatgatagttcatctaaaaagcaattgtctgaacaattgcggggttattacgataaacatcttgacccagaaaaagtcccatctccagaagatttggatatattaaaagcgacagaagacgccaagaaagtgttcgatgaaaatcttgccaataaatttcaaccagcgatcaaggaattagaagatttgggatatcccggagtagataacccgaaactcacaattgccacaaaaatgactaccggtgagaccttaagacatgacgctgccgtacagtatgcactcagtaaagaagatgaaactttgaagctgccagagaagtataatggtcttggatatcagaatctaatttcgatggtattcggtcttatgagttatagagatgactggatgcgtgaaggaaaagctggccaaacgcagcaggataacagcagagcgattgaaccattgcatttagttttggttgaagagccagaagcccatctccatgtgcaggtacaacaggtatttattcgcaaagcatatgatgtcctaacaaaccacaaacgtatcaaggctaacaaaagcttttctacgcagcttttgattagtactcattccagccatattgcaagagaaagcaattttgcagatttaagatactttaagcggttggcagaaggtgtagaggatgatatcgcaacatcaaaggttatcaatttatctgatgtgtttggaaaagaggacaaaacagataaatttgtcactcgttatctacagacaacgcattgtgacttgttttttgccgatgctgcaattttagtagaaggctcagcggaactcatgttgcttcctcattttattcgtaataaatatcccagattatatcagcggtatatttctattctcggtataagcggacgtcattcccatcgtttaggaccattgattgagaaattatgcctgcccacccttattattgcagatttggattctgcacagaaagaaggacatcataaggcagttcgtccagagagggggaaaggccttatcagcggcaattacacgatatataaatggctgattcaaaaaagtaatttagatgaacttctggaacttccttttaaagagaaagaaatcattaggaagacaccatatgaatttcctatccgtgtcgcataccaaacacctgtaatagttaattacgatgaaaaagataaagaagctctctctagcacatttgaagattgtttggtctatacgaactaccagacatttaaggatttgtcgctcgaagactctggaagcttagtgaaaaaaataaatgacgagattaacacatctaacacttttgacgagtttgtaaatggaatatatgacaccttgcgtaatgggaaatctgaccaaaaggcggagtttgccttagatttgatatatgctattgacccagatgagcttactgtccctacatatatcgatgaaggcctgaattggctgcaatcttatttagaaccggaggtttaa

SEQ ID NO: 73405 - DNA, 348 bp, Lachnospiraceae bacterium 3-1
atgacaacagcagtatcaacaaatgagaattctatagataatcatgttgacgatcacgtggataaagagatacgagaatgtttctctaaagaaaatcctaagtgtttcttcgcatttgccggtgcaggttccggtaaaacaaagagcctgattgatgccctttcctttttagataaagagtatggaaacgatctgttgttaaacggcaagcaaattgttgttattacatatacaaatgcagcctgtgatgaaatatccagaaggctacaatataaaccgatattctccgtttctaccatacatagctttttatgggaacttgttaaaaattatcaaaaagacatctga

SEQ ID NO: 73406 - DNA, 2025 bp, Lachnospiraceae bacterium A2
atgtacataaacaagattcatatccaaaattacagaaattttaatgattttacaatgcaattccataaaggattgaatgttatcgttggttcaaataactctggaaaaacaggattgctctatgcgattaatttgctgagtaatcctgcgggtatttcagtagatgattttaacaaaaataatctactgaaataccccaaactatatacggatgctgcgccaagcatcataatagaatataatattagtcataggatatatgaagatgatactactgatgaaagcattatcagactattaccatttttgggcataaaagaatttgatgagaataggcaacagaaaaatggttctgttgagtacaatatatcagctcaaataaaggcggtttattctttagataacaaattcctagaggaatataaaaaagctgtaaaaaatgaaagtacagattttaatagctatttaacagtattgaagcgttttgttgaaaatcattattcttggggatattcgaacggaattagtagtactaaagctgaacaaaaagcagcaacagaagtttttgatattcgttttataggtgcggaacgtaccagtgaaggagtccggaaagagactaaacgcgagatagctgcttttacgaaagactcggataacgcagccaagattgataaatttaaaaatgatgtatcctcagaattaaaaaagatattatcaccttcacttacaaaactatcttcgctctttgaaaacgaaaaaaatgtaattggtcttgaaaagggcaatgtttccatttcctcggctattcatgcagatttttcattagcagatacatatactacagaggtgaaagatacaaaagctgggtacaccatgcctctgcagcataacggtcttgggtataataatttgataaatatttatatgctcattaaattgacagagatacagaaaggccgagactttcgcattctttgtttagaagaaccagaagcgcatcttcatcctgcaatgcaatataaactgtttaaatacttgagggatttagatcaggcaaatgacctgaaccagcagatttttgtcacaacccattcaagtaatatttccgccgttgcaggcatagataatatattcatgctatcatataaccgcgaaagagatcctgaagattgttgtcagcaaagtctttttgagcagtttaaagaccaagatgatacgacttgtaaggcagaagcaaaagctcatctgacaaaatttcttgatgttacaagatcagatatgctatttgccgacaaagtaattttagttgaaggaattgcagaaaaattattgatgccattatttatggagatatgcggttgcccatatgaagatgaacatatttcaattgtggaaattggcggaaagcactttaattattttgttgaactctttaataacaacgctgtaaagaaaaaaatattatgcattacagacaatgattttatgtggattaacaagcaggggcatttaagcaagatgtcaaaatattggggaaagccagttccgcatattgaaaacatgcggcaaagattttgcattgataatttttgcatatgtacgcaaagtttgggcggccgtacctttgaggatgaattcttattggaaaatatgaaaaaccatgacgtggctgaaacaatttttaaaaaagccctcagtaagacaattgctgaatattacgataagtatggatttaatattttcacatggattgaccataaaaaagaaatagataagagatctgctgatacaatcaataaatttttaaatgcttttttatttcgaagagataaaaaagcaagtcatgtccctttctataacaaattgatatttgctgaaatgtttctccattatgcacggaacaagaaaggcgatgttgcactggaactattaactgatgaatcattatttaatacagatgggacttctaaactaattgttccaaaatatattcaggagggcttagaatggctattaaaataa

SEQ ID NO: 73407 - DNA, 1941 bp, Lachnospiraceae bacterium A2
atggctattaaaataacttcaggtgatattttcagtgccgagcaattagcgtatcattctaaaatttatgcaggtccgggtgctggaaaaacacattttttagttgaaaatgttaaaagaattgtaacaacaagcccattgattgcccaaagtcgggcgaggagggttctgtgtattacgtatacaaatgcggctgttgatgagataaagcgacgtttggacaatttcacagattatatagaggtttatacgatacatggctttattattgagaatataatcaaaccattccaagacgatttaagaaccattatggaatctgattttggaattaatgtaaacaatagaggtattatctcatcccaaattgagggattagggattttgcatggtattaacaaggaagatatttataactttatcaaaaaaactaatcctaccgaatttgcaaatgatgatttatattatagcaaaaaagttatgggcgaaatcgaaatagacaacagtgcatttttgacctcgcttgctaataagctccctcgccaaatgaaatttaaagcatcacaaaaagttgagaaaaggcatattataccacttaaaaaatacatatggtcggtagtgagaaaactaacgcataacgaaatcctttattttggatacagaattcttgaaaacaatccaactgcactatatgcaatacgggtaaaattcccttttatatttgttgatgagtttcaggatactaatcctctccaaaccctattgattaagttaatagggcaaaaatcgactgtagtaggagtggtcggagatattgcacagtcaatatatagtttccagggtgcgcgtccaactgattttgagaatttttctatagatggcagccgtgaaattaaagagtatgatatacatgataataggcgttctactgagaatatcgttaatttttgcaattttttgaggcaatcggataaacatgttgttcagatcagcaaacgaatatatgatactgaagacaagaaaaaacaatctgaagccaaaaaaatacattttcttattggaacaacaaccattattcaaaacgtaattcaaaatgttcttgaaaatgacggcgtagttttaaccagaacttgggcagcagcatttgattatgtgcgggacattgatgagaagcaagccattttattgaaaaatatttataactcatattacaatacttcaattcaaattagggaagaaattgtggaacataataatgtgacatgggttagagcatttcgatttatattagggctttgggaaagttatcttaatgggtcatttattgatatcattcaatcactcaaattatatgttgatattgatttgcataagctcacacctaaaattatatttcaaataaaaaggttgtctgaaaacatatttgataaaattgatgacaacgctctaacttgtaatgtcattgagaatttcaatacggaaattcaaaagacagattacattgattttcggcaaacaatcttagggatggagtttaaaatcccaatatttgatgaacttgatagggagcaacttatagcggctgtcagcggattattttgggatacttcttacaaattattcaaacagatcttttctgatgacagtaaatatatgactgttcaccaggccaaaggacttgaatggaataaagtcgttgtaagtgtgatgcctggcagacgtgataaaataaaaatactttcgatcttttcgtcgccatgcctaatcaacgaatcccccgctgacgaatttacaagaatgtattatgttgcgtgtagccgagcaaaagaagatctatatatacatatcccttctgaatgtaccgaatctgatatcagatcatctatagatgcattttgtatcaacagtgggcaaaagattgaatatgaatttattaagtag

SEQ ID NO: 73408 - DNA, 1938 bp, Dorea sp. 5-2
atgtacttatcggatataaagattgaagggtatcggttgtttaaggacagacagatattgcatttaagaaagggactgaatgtcttagttggtgagaatggctgtggaaaaagtacggtcatagatgctatacgtctgttgctcaatgaagatgagtatgcccgaagtgggatttcagaggaagatttttattcttcggtagataagaaggagtgggctgatactatttctatcaagggaaggttttcagatttatcagaagaaaagaaggttgagtatattacctggcttgataaaaagtataatgctgtcttgaatattgacattgttagaaagcaggatcgtcgtaataattataagaaagcaatatggggaggggaggcatccaatagtatatttgaatgggagccattaaatgatatacagtgtgtttatcttccagctttaagagatgcagaaaaaaagttaaaagcaagccgtggttcgaggctggcaaggttattgattaatctttcccaaaaaactttagaagaaaagcggaaagccggagagctaatggatatcgagaaggatgttaatgattttaatgaggaattggcaaaaaggactgatattgcaagagcaaacgaattgattaatgatagtttggagaacgctttagggacagtgtttgcacagactacaaaaatacggtttggtgatgttacatttgaaagaatcgttgaaacattacgcatagtattttttccagggaaaatacctacggaagaaagcgtgtataggaatctttttgaaaatagcttgggttataataatttgatttatttagcgacaatattagcagaatttgaagggttaaaagagaattacagttctccgcgaatattgctgattgaagaattggaagcacatttacatccgcaaatacagataaaagtattgaagtatttaaaggagcaggctgagaaaaatgatatacaagttataataacaacgcattctactacaatagcctctgcaacaccgattgaagatattatcagctttaatatgactaagaacggaataaaaattacttcccttagaaagtgtataaaaaataagcaggcaaaacaatttataaacaggtggatggatacaacacgctcaacattgcttttctcaaagggaaatatattagtggagggattggcggaagctctgcttatccctaaattggcagaaatatatttgagtggattgaaattagataatgctccgaaatcgttggaagaggcggggatttctgtcataaatatgaatggtatcttttttcaatattttatgaagatttatgatggatatgaacttaaatttcctgggcgagaagataatgaaagcaaagaagcatataaagaaagaatcgattcgtttaggaagaaagataagtttgaggaaggtgaatatgaagagacagattttgtgccaatcctatgtgcagcaattacagataacgatccaaaagaagaggctcctaaaaagagtgataatgttgaaggaaaaaatccacagttgtttttaaaggaacaagtaaagaatatgacggatagatgccggatttatactaatgtaaaaacatttgaatatgacttggcactggaaaaaaataatgctaggaaaatgattgaaatcattttggacgtattgcctactaatggcgatattagagatagaatgaatgggtatttggaggcatatcagaacaacgaaaaagtggaacagccgaagattgctttagacatattaaatcaaattgatgcaagctatttgggaaagggattgtttgcacaattgctattagaaaaaataagcattacaaatgattttattgtaccagaatatataaaagcggcaattagatttgttttggaaattactgaggaaaataatggaaaataa

SEQ ID NO: 73409 - DNA, 1944 bp, Dorea sp. 5-2
atggaaaataagagagaacttatatgcagagtgttgtgcaaaaaagaaaaatgttattcggatttgtatgtctgtgatggaaagctaaacagcaggtgtaagcaattaggaaaaagttttattcataatatgaatgaaggacaagttgactatgtgacgtcacaattaagacagaatacttttctaaaagcgtgtccgggaagtgggaaaacggaagttctggcaattaagatagcatatgaaagagaacaatggaaattaaacaatcaaggttttgcagttttgacatttacaaattcagcagaaaaagaaataaatcatagactagattgctatttgaacagtaagctggcatatccacattatatggggacttttacaagctggctgcatggttatattgctaacccgtttttacataaactgatgaaatatgaaggggatgaacgtggagataaaagtatacgactgatagaaagcagttgtacttctgattttttaaatgcatatagcagtgattatggatacagagaactgggaaatattaaggcacatgaattctttcgagactttaagacggattcatatcaatattgcggaactagaagcagacaaggaaaagaaattttgcagagtctgatacagcaagatgattggagagaattggatcttgcaaaaacaaagatgaaattttggaaaagtggatttgcactttatgaggatattgagtatatgtcgaatttgttatttgaaaaatatcctgagataccagaaatgatagcaaaacgttttccgatactatttgtggatgagtgtcaggacttatcttatgttcagttagaattactggcgactctttgtgaaaaagggtgcaaaattcatttaattggcgatttgaatcaggcgatatatggttttagaaatattgaaccggatgatacaaaagaatttagcgaaaatcattgttttgatattaagctattaacggaaaactatagaagctgtcagcccattgtaggagtgtcggaatatgtggtaaatgggagagatgaaattgtaggaaggaattttggtaaagcggagtttcctttaattgcgatactttattctaaaggaaaagagaatcttgcaatcaataaatttcatgagtatgtacttgaaaataatttgagtgtagcggaaagcaggataattgtaagaaataataatttgaaaaataggctaattggtcttaaaaatagcaatcaaagttcaaataatttagaatcaatagctcaaattgtatatttgcttaataaagagaatcaggcttctgattttaaaatgttgtttgatatgttagcaaaaagtatacagcggatcttttttaagacaagtgagcatttaaatagccagtttttttatagacctaaagagattgagagcaaaaattggaaaaggatgctgtttaagataaggaatgtactgcaagaagcagagcagttaaatgatttctcggttacttggacagagtggaaaaaagtgttaaacaagttaatgacagagaatataaatgttttgcctgaattatctgaatgtacatacaatatcgggataatcagaaaaggaaacaaagataaaatagtggaacagacgctgtttaatgagggggaaagtgatttgagttatcctatcgaaacaattcacggatgtaagggaatgagtttagacgcagtgcttttcttgtcgtcttatcaggcgggtaatgatgaacattcaggcgggtattggaaacaatggttcaatagagcagatattggagaagaaaataggcttgcatatgtggctttttcaagagcaagatatttattggcacttggaataccgaagccaaagagtttttcggaaacagatagaaaaattttagaagatgcgggatttaaaattgtggaaagccggagttaa

SEQ ID NO: 73410 - DNA, 1932 bp, Dorea sp. 5-2
atgcatatatcaaaagtgaatgtattcaattataggttgttaaatcagacaagtgttagttgtgagaaagatttatccttgattattggtaaaaataattgtggtaaaacatcatttttatcagttttaagcaaatgtattggtaataaaagtgaagtgggcaattttgattttaatgattttagtaccttatttcaaaagaaattgtacaaagttgtaaaaggagaatcggtttttaaagaagaggaacttacaggaattagagttgacttttatattgaatacaatgaagatgatgatttgacgaatattagtaaattgatgttagatttagaaccactaaatacgactgtaattttgcgatttgagtatgtattgaaaaataatcttcaaaaactgatagagcagtttgctaaatatgaaacagataggacaacccttaattctgaaatggcttttgaacggttcattaaaaagaatcataaaaagtattttgaatttatgagatatagtgtgttatatgattatagaaacaagaaaatagataacacgatatttaaatatctagacaataaggatatagatttatcaaaaataattgcctttaattatgtgagtgcaagaagaaatgtttctaatgcgacggatttagagctttctgcattagcaagtacttattatgagagatcaaagaatcaagaagaaaataatgttactacactaaattttgaaaaaaaagtagatgagacggatagagcatttgatgatatatattcagagacttttaaaaatcttatggataaattagctaaatttggtggaattaagaagaatgaaaatattgtaaaagtcatttcgcaaatacaagtgtcaaaacttctaaaagataatacaacagttgtatatgatgatcaatcaaattttttgccagagaattataatggtttgggatatttaaatctttttagcattattatgaaaatagaaactataatgagtgactttagaaaagacaataagaaagacgagcaaccagcagatataaatattctttttattgaggaaccagaggcacatactcatcctcaaatgcaatatgtatttgtaaaaaatataaagaatttattgagagaaggaaaaaagattggtgattccgaaagaacaataaatttacagacgtttatgacgactcattcttcacatattgtagctgaaagtgaatttgatgatattaaatattttgttaaagagacaaattccaatgggttcaatgtcatttcaaaaaatcttaaagacttaagaacattatatcaaaaagaaaaaggggaaaataataaccactttaaatttttaaaacaatatctaacattaaataggtcagaagttttctttgcagataaaattattttaatagaaggggatacagagcgtattttacttccggcaatgataaaaaagattgaccaagataataattatgatattcctttgatgactcaaaatatttcgataattgaagtgggaaattattcagagatttattctacatttataaaatttataggaactaaagtgttaattataactgatatagatacatattctttcacggatgatgttgatgataatggaaaacctaagaaaaatagagatggtagtataaagaaaaagcaaacaccgtgtagagtatctgacggtaaatatactagtaatagttctttgaaattttatttaaaggatcagcttgaaactaatatgggaactgaaaaagatatattgactaatttagagttaaaagaaaaagtagtttctgctgatgaaatttacaatgaagaaactggcaaaacggaaattgtttggaaagctgataaagatggaaaggttttgattgtttatcaaataggtgaagtgaattgtgaggggggggggtaa

SEQ ID NO: 73411 - DNA, 1908 bp, Dorea sp. 5-2
atggttgcagaaggattagagaaagaagttatacaaatatttgaacttattgatgataacaggaattttcttctaagcggaggtgcaggcagtggaaaaacgtattcattagtatctgtgattaatgaaatttataatcgaaatccaatagcaaaaattgcttgtataacatatacgaatgccgctgttcatgaaattgaaaatcgtgttttaaacaagaaaacaaggatttcaacaatacatgattttttatgggagaatatttcaccttttcaaaacgaattgaaaacaactcttattgaaagtattaataatcctgaagtgaagtataaaaatataacagtagaaattccatatagcaatgaatttaaagatggagtaaaatatgctgaatatttgcgtttatcagatggatatatatcacatgatgaaataatcactttagcaaatcaaatgtttaagaaatatcctaaactatgtgatatattgaataataaatatgattatattttagtagatgaatatcaggatacttttccagaagttatagagattttattggtgtgtttatcaaagagcaagaaacgaagtataattggattttttggtgattccatgcaatctatctatgatgatggcgttggagatttaaatgattatattgaatctgaaattgttattgaggtgcaaaaaaggcaaaatcgtagaaacccacaatcggttataagcttaagtaataaattacgaatagataaattggaacaggttccatctgaggacgaaaatgctccgaatatgaaagacggaaaagtaaaagaaggaacgattaaatttatatatggagatagtttatccatagattcgataaaaaagaaagagtactttgcaggatgggattttagcaatccgaaagaaacaaaagagttaagattgacacacaatttaattgcatctaatgctggatttcctaaacttatggagatatatgataaagatccttttttaaaacttaagaaggagtttataaaatatattaaagggaaagagatagctgttgatgaaacacaaactttcgatgaagtagtaaattctgtagattggatattctcgaacagggtacgagatgttagtaagagaggaagaaaacagattgaggtttttttggaagatactgaaaatgcaaaatattatgatttagtcaaaaacaaaccttttagtatggtaagacgaatatattttgataaagataatcttatttcggataaaaaggaaatagatgaagaaaagtcaacgcaatcaaagcgtgataagcttattcgacatttatttaaaattcaaacaatagtagaattttatgagatgaaagattataatgagtttattcggaaaacatcatttagaattagaagccaattagataaaaggatgataaaggaaaaaattgatactattgttggtatgaaaaaaagtacaatagatgaagtgatatcatatgcacatgagagtggcttgtgtttaaaggatgataatattgaaaattttattaaggaaaatgggtatctatatactagagtttctaatgttgaatatgaagaatttataaatttatatgcgtatttggaagggtattctcctttttcaacgcaacataaaatcaagggagaagaattcaaaaatgtattggtaattctagataatgggaaatggaatgattataattttgagtatttatttgacccttcacatgtaaaatgtaatcaatctgtacgaatgcgaacacaaaaattattttatgtgtgctgtacgcgtgcaatggaaaatttagtggtatattgtaaaaaaccaacggaatctatgataagtactgctgaaaaatggtttggtaaagataattgtcaagaaatttaa

SEQ ID NO: 73412 - DNA, 2031 bp, Lachnospiraceae bacterium 10-1
atgtatataaataaaattcatattcaaaattataggaattttgctgattttacaatggaatttcatagaggtttgaatgttatcattggagcaaataattccggaaaaacggggcttctctatgctattaatcttttaaattctccctctgatatttcaatagatgattttaataagaataatcttttacagtattctaaattgtacttggagactgcaccaagtattatgatcgaatacggtatttgtcacagaatttgtgaagacgataccgacgatgagagtattattaggctgttgccatttttaggtataaaggaattcgctgagaacagacaggaacatgacggagttgtcgaatataatattgctgcgcgtataagggcggtttactctctggatgcaaaatttttggaagaatataaaaagactgttacaaatgacgcaaaagactttgagacttatttgttggtactaaaacgctttgtagagaagcactattcatggaattacacaaatggaattagtgatacaaaagctgaacagaaagccgtaacagatgtttttgacattcgatttataggggcagaacgcacaagtgaagaagtaagaaaggaaacaaagcgagaaattatttctttcacgaagaatacggataatgtagctgcctttgacaaatttaaacatgatatatccgaagggattgaaaaattgttgtctccatctattaccaagctggctgctttatttgagaatgaaaaaaatgcgattggtcttgcgaaaggtaatgtatcaattgcatcagcggttcatgcaaatttttccttggcagatacctatactacagaagtaaaagatacaaaaagtggatatacactacctctgcaaaacaacggtcttggttataataatttgattaatatttatatgctgatcaaattaacagaaattcgaccgggaaaagacttccgtatcctttgtttggaggagcctgaagctcatcttcatccagcgatgcagtataagctatttaagtatctaggagacttagataatattaacggcttaaatcaacagatttttgttacaacacattcaagcaatatttctgccgttgcaggtatagacaacatgtttatgcttgcttataatcgcgaaggggatgcttcggattgcactcagcaaagtttgctggaacagtttgctgataaagatgggacaacaattaaagctgaggcaaaagctcatctcgcaaaatttcttgatgttacacggtcagacatgctattctccgatagagtcattctggtagaaggaattgctgagaaacttttagtaccactgtttatggagatatgcggttgtccctatgaagacgaacatatctcaattgttgaaattggcggaaaacacttccagtatttcgtagaactttttaacgggaatgccgttaagaaaaaagtactatgtattaccgacaaagatttcaaatggatagattttgatggagatggtaatctgcgaagctattctgagtatgaaagcgatgaaccaacgcatattgccgacttaaaaaagagatttcctattgaaaattttcacatctttacgcagtctatgggtggaagaacatttgaagacgaatttttcctcgcaaatatggcgaatgaaaatgtcgctacaacggtatttaagaaagcaattagcaatacgataagtggtttttttgataagtatggcttcaacttaaccgcttgggaggcacatattgatgaagtagatgggcgttcgcgtaaaaccattaagaaatttcttgatgcatataaatctagagtagacgcttctccagaactggctcctgattatgaaaaattgatatttgcagaaatctttctgcattatgcaaaggataagaagggtgatgtggctttggaaatattgacagacaagacacttatgaacgaagatggctcatcaaagttagtggtcccacgctatattcaggagggtttgacatggctactgaaatga

SEQ ID NO: 73413 - DNA, 1941 bp, Lachnospiraceae bacterium 10-1
atggctactgaaatgacatctggcgacattttcacacctgaacagttaggaaaacatgctaaagtatatgccggtccaggggcaggtaaaacacattttctggttgagaatataaaaaatataattgcaacgaattcactaataactcaaagtcgaatgcgaaaggtcctatgcgttacctacacaaacgcagcagtcgatgagattaaacgacgcctcgataagtccacggatcttgttgaagtatatactatccacggcttcattattgaacatataattcagccatttcagcaggatcttagaggtatcatggaatccgattttggaatagaagtgagcagcaaaggaaaaatctcctctcaggttgagggattagggattttgcacggtgttgataaaaatgaaatttatgatttcatccgaaaagcgagctccactgaattctcagatgatgagtttggatatagcaaaaaagcaatgagcgaagtagaggttaataatgatgcgttcgtttcatcaattactaagggaaggcctcgctgcataggacttaaggtaccctctaaaattaatgaacaacatgttgtcccactgaaaaaatacatgtggtcagaagtaagaaagttaacacataatgagattctttattttggatatagaattcttgaaagtaacccaaccgcattatatgctacacgagtaaagtttccttttatattcgttgatgagtttcaggatacaaacccactccagaccttaattataaaactacttggtaaaaaatccactatagtagggattgtaggtgatatagcacagtcaatctatagtttccaaggagcacaaccaactgactttagaaatttttctattgaaggcgatcggggtgtaaacgaatacgttataaacgggaaccggaggtctactgaaaatgtggtaaacttttgtaattttttgcggcagtcagacaaagatgttgtacaagttagtaaacggtcatatgatacagaggagcaaaaaacgctgtcggaatcgaagaaaatccactttcttgttgggaactcacttgttgtccataatacgattcaagatattcttaaaagtgacggtgtagtgcttacgagggcatgggcttctgcttttgattatatacagggcattgatgaatctcaggctaaattattgaaaaatatttataattcctattataattctccaattcaacttagagatgaaatagtggaacataataatgtaacatgggtgagggcgtttcgttttatttttagtttatgggagagtcaccttaatggatcgtttatagatattatacaaacgttaaaattatacgcgactattgatgtacaaaagattacgccaagggcaatatttcaaataaataggctttcgaataatgtttttagcaaagtcagtgaacaaagctatacttgtgaaattatcaaaaaattcaataaagaaattgagaaaccggattttgcaaattttagagaaacgtttttaggatccgatttttctattccattatttgacgagcttgacaatgagaggctaacaactgctgtaactgggcttttttgggggacatcttataaattgtttactgaggtcttttctgaaaatagtaaatatatgactgtccatcaggcaaaagggcttgagtgggataaagttattgtaagtgttactccaaataaattcgataaaattaaaattgccgacctttattccaagccgcaattgatggatgagaaccccgctgatgaatttacaaggatgtattacgttgcatgcagtcgagcaaaagaagatttatatgtacatatattagatgaagggttaatttccaaacttcaagcatccatagatgtttatgtggaaaaaactgggaaaaatattgcttatgaattcattcaataa

SEQ ID NO: 73414 - DNA, 2160 bp, Corynebacterium glutamicum SCgG1; identical to SEQ ID NO: 73318

SEQ ID NO: 73415 - DNA, 1914 bp, Corynebacterium glutamicum SCgG1; identical to SEQ ID NO: 72451

SEQ ID NO: 73416 - DNA, 2106 bp, Corynebacterium glutamicum SCgG2; identical to SEQ ID NO: 72450

SEQ ID NO: 73417 - DNA, 1914 bp, Corynebacterium glutamicum SCgG2; identical to SEQ ID NO: 72451

SEQ ID NO: 73418 - DNA, 2424 bp, Pseudomonas aeruginosa PA14; identical to SEQ ID NO: 71738

SEQ ID NO: 73419 - DNA, 1932 bp, Pseudomonas aeruginosa PA14; identical to SEQ ID NO: 71739

SEQ ID NO: 73420 - DNA, 1701 bp, Klebsiella pneumoniae KP-7
atgtatataaatagtgtatatctcaaaggttttagaaactattctgatagttttataaaattcaaccactcaactttgataattggaagcaatgacgttgggaaaaccaaccttttgtattcactgagaattttattagataaaagtttctcagacttagatatcgagcccaaaaatagtgattttcacattgatggaaaaggcaaccaatgtgatgaattagaaataatcatcaattttcgagaaataaaagaagatgctgtactttctaagttaggaggatacgtaagtgatgactccgaaacatttattaaatacaaagcgagtagaaatactttagactacaaattatacatcggtcataaagaaactgatatggacgagattaatggtaggttttatctaaaatatcttaacctacgttacgtcaattctcaaagagatcttgctagatatatatcatcagaaaaaaaacatttgcttagacttgctcaagaaatgagggatcatgaacaggtgataaaagatgaggaaattttaaattcattaagtgatttattggttaatgtaaacgataaagttaaagagataagttatgtttcatcggcgacaaaagaattaaatgatgaattaaaaaaactatcgtataacaatgaaaaaatttctgttatgctcgactctggagcaatcggcatcgaccaattcattgagaagttagaattaagttcaaatacaaatggtaaaaaagtaatgcttggtggagatggattcaacaatcaaatattacttgcattatggaaagctaaaagtgtacgcgagcatgacactgagaacgaagttgtaatatattgcgttgaagagcctgagtcgcatctttatccacatcaacaaagaaaactatctgagtatctaattaataaattacccggacaatctcttgttacaacccattcaccacagattgccgttaattactcacctgattcaataattaaaatatgttcatccgatggtgagtcttacgctgcaagtgagggatgttctgattgcataagtgatgcatggaatggaatgggatacaggataagcatattacccgcagaagctttttttgcagatgtggtttttttagttgaaggcccatctgaaatgttattctatcaagctcttgctaaagaatgtgagattgatttggatttttataacataagtattttatcagtcgacggagtccaatttgaagtttatagaaaaatccttgattcatttgaaataaaatgggttgcacggacggataatgatgtatctaaagtacctagaaaagaagaatggcaatatgcaggattaaacagagctttagccctctgcaaatatgaaccattaaaaaatgaattagcagaaataacacaaaaacagaaattagagaagcatgccatctataaagatattctcaaacagaataatatatatgtttcaattaatgaccttgagggtgatattagtaatgaactgagtgagcagcttaaagaatatgtagggacagatgatgcagaaaaggcggctgattatctaagaggtaagaaagccacacgaatgcaagactttttaaaggaatattcaagctcgctcagctcaatatattccggagaattaatactgcctcttttaacatcagtatcactcgcaaaggagggtaagtaa

SEQ ID NO: 73421 - DNA, 1623 bp, Klebsiella pneumoniae KP-7
atgattaattacacaaaagaacaaagtatagcaatagagtatccatcgagtatggtattaacagcctgtcccggaagcggtaagacagccgtaattgtttctaaaatagtaaacgatttagctctttgcaacgactatcaaggtgttattgctatttcttatacaaacaaggctagtgatgaactgaaaaaaagatgtttgaaagtaatttcagacccaaagtcaagcttctttggcacgattgataaattttatctaactgagataatctatcaatatatcaagcatatttgggggtatgccgataaaataaaaatcataaaattcaatgaactagatgatgcaaccaaagataaactctcttgtttttcaaatactgaggatgtatgtaaaaaaattgacacatatgacttcaaagaagttcgtgatttatacatcaagggttatgtagttttagaattcatccctttaatttctttttacgttttaataaactctttatcctgtcgtagatatctggcaaaaagatataaatccatatatattgatgaatatcaagatgctggatttattcaacacctaatttttttatccctattcaaactcggaattaaagctgttgctgttggcgacgttgaccaatctatatatgcttatgcaggaaaaagctcaaaatacttgtcatcattgttagatgaaaaaagtggctttaaaccattcgaaataacaataaaccatcgttctcacccttcaattattaactatgcatctcgattaataaataaaaactcttctttgctaacaagcgatgctatacatgtatatagaactacaattaatggttcccaagaagatattgtcaaatggattgactctaatattggtagtatcacatccacttttggaataaaaaaagaaagtgacattgccattctggccgcgacaaatagctcagtttcgttagtatctggaataataaagacaaaatctagagcttaccttgatgatgacctttcaataataggcggggaaacatccctcttattaaaagaactattgcgatttcgttttaataaaatggcaaccgcacaagagatcattgatagtttaagagataaagtttttgagaaaaactcactaagagaaatgaggtgtgtgattaaggatgtaagaaaggctagtgagcctcaactgattcccacattacgcaaagcagtgaaattattaattactagtgacatctcctctcagcatattgatgcaattaactcagtcattcaaaacaaaatgatgcttaataattacttacctgttagtgaagatgagttgcagataatgaccttgcataaagcaaaaggtcttgaatttgattttgtctttcatctagatctttatgattggatattacctcggcgcgaatatatcaaaaattgctttgatgaggttttctctcactatgaccaatgtcttaaccttcattatgttggagttactcgagcaaaaaaagccattgtattaataaactccacggaaagatttaatttccagcatgatttaaaaagagcaaaaccctctcagtttctctcattaaacggacttgaaggactctataaaaacatttaa

SEQ ID NO: 73422 - DNA, 1701 bp, Klebsiella pneumoniae KP-11; identical to SEQ ID NO: 73420

SEQ ID NO: 73423 - DNA, 1623 bp, Klebsiella pneumoniae KP-11; identical to SEQ ID NO: 73421

SEQ ID NO: 73424 - DNA, 2193 bp, Enterococcus columbae DSM 7374 = ATCC 51263
gtgtatttaaagagtttaagcgtaagaaactatcggaaatatggagatagtggggaaaatatattttttgctcatagttcttgtaaagaaaatataaaagaatacttatccaataattctacgttgattgttggtgcaaataattctggcaaaagtactattattacattgttatctaaattagagaaattaaaaagtggaagtcgatcagtctttgcgccaaatgattttaattatcaatatattaaatcatggtttgacaacaatgtgtataaagctgcgataaatgagcaatctttaaatattgaagcgactccagaaatagaatttatcctcacaataggtgttgaagataaaaatgagaatatttatgctaatttttttgatgttttggttatcaatgaaaataccaatctggaaaatatggatatcaaaataaaattcaaatatgagttggtagatgaaaaagcgtttaaaaataatcttgataaattagtactaaagtccgctaaagctaaagaaaaaaaggggaaacaagaattttttcgagagtttgtcaaattattaaatggagatcattatgcattgaatgtttatccagatggttcagatactaaggttaagaatttttcattaagttcgctatttaatgttaaaacaattgctgcaaatacagttaaatctgatgaagtattatctaaagcatataataaaattgttcaagcgtacataaaaaagctaagaatggaacactcttcttcagaaaatcagcatgagaatagtgaaaatttattagagaagattgataattttataattgagattaattctcaactcaatacaattgcaaataagaaaatcaaagaaaagatacaagaagctgtaagtagtattgaatcagctaaaaatttggaaatgaatttacagcccaatgtcacaatcgaaaaacttttatcggatgggatactttatgaatatgttgaagataatagctatattcctgagagtcagtttggcatgggatatacaaatttaatggtaatcattgcaaatatagttgattacattcatatgtatgataaagaaaaactgaacagctcaattaatattctttgtatagaagagcccgaaacttttatgcatccacaaatgcaagaattgtttattagaaatatttccagtgcaatggataaattaattggtaatactgaattaaaaaaatcttttcagattgttatcacaacacactcatcttatattttaagcagtaagattagttcagaaaactcctttaataatatagtatatgttagaagtggacggaataaaatatttgagaacgaagacgatactaaaagttttaaacaaataataaatttatacaatgaagaattacaagaggaacttaggaagaaaagaacagataatttggagattgataatgtgaagatgagaaaatatattgcaaaatatgtttcattagagcttatcgatatattttttgcagatgcagttatttttgttgaaggttctactgaagaaatgtacataaaatatttaataagcaaagatgatcaattatctaagcttcatatcaaagtatttgtagtaggaggggcatatgcccatttgttttcatcattacttaaattattgggtattaaatcaattatatatactgatttggatataaaaaaagatattggaaaaaataatatcttaagtagtaatcttgatgatagccttgtagatttagaaatgcattctacaaattctagtttaaaaacattttatagtagttatgataaaaaacatattaatgaggataggataggaagtgaggaatctaaggattatatattttttccactaaataatatatctgtatattcacaaggaaagataaatggtaagtatgcaacaagttttgaagaggcaattattttatcaaattgtgaggaaaataaaaattccttaataaaaattttatctaaaatccttcctaaagataaggagttatacaaggggaatattaagaatcattcaagagaaatacaaataaaattagcttctaaaaaaagagaatttgctttgaacatgattctctttttaagtaccgatagtgaatttaggcttaaaatccctatttatataaaaaaaggattagaagaacttggttttaaggacgagtag

SEQ ID NO: 73425 - DNA, 2049 bp, Enterococcus columbae DSM 7374 = ATCC 51263
atgaacataaatcaaaaatcaaatcaaaactattcattagaaacaatagaaaactgtatagatacaggtaagagtttttgttttaaagccggagcaggggcaggaaagactacaaccatgcaaagggctattgaatatattttgtctaaaaaaggtaatctattgaaatcaagaaatcaaagaatattgtgtattacttataccaatatagctaaagatgaaattaaaaatcgtttgggtaaaaattcttctgtaaaaatagcaactattcatagttttatttgggaatttattcaacaacaacaatatttactaaagaaacaacacatactaaaattagaagaaagaatacaacaagaaaaaaattttattttttcgctagttactgatgataaggaatttgagcaattaaaatcattcatcaaaaatagttctgacgaaggatttcttgataagtataatagacactatttagaaaatgcaaatgattttagaaagataatgggtagatttgcttggacaaaaaggtatttaactaatgttaaaactttcaaaaaattaattaatagcttaaataagttaataagttatgaaaaagcactacaatatgatatcatccatgataaaaatattgttatacgctatgtttcaaataaaaatatagataatttagtgaaatttcaaataagccatcaaacacttttggagtatgctagtaagatcattcgagaatttcctattttacaaaaaataatttatgataaatatccatatatatttattgacgagtatcaagatgcaagtgattatgtcattgatttattttttagtttttttgataatacgcaagccattgataaagaaaaaaattttttattaggtttttttggtgattcatcacagaaaatttacagtacgcaaattaatgctgattttaatatcgcacaattagagaatatacagagtttgtataattatcgttcaggtaaaaatatagttaatgtgataaataaaattagaaatgataatttaattcaaaatagtcagttagatgagttagatgcaggtagagtaagattttattattgtgaaagatttgatttaaataattttttaaattgtacatatattaagaatgataccgaagagaatactgctgttttgattacaaaaaatgaatatatagccaagtataatgattttaatgctttatataatttttttaaaaatattaatcgtttcaagggaagattttggaacaagattaatgaacaattatttaataaagatttaactagaatagatccattttttagaaatattcataattttattgattttattaatacaataacaagacctaacgtttttttgagagatgttttaaagtattatgaaggatatagcagaaaaatgaatctagtagatttttttgaaatgtatcaatgttttcaagatatagtgatagagaataagtcttttaaggaagtaataaaagaagtaattgtaaaaataaattgtaaattaaaaggtaaaataattatagcaaatattttttcattatttgatgataagaataatatagttggatttacagaggaagacatttttctcgagattaattcttcttttagaagatatatcaataatgatgaagagcttgaagaagatgaagcaacggaggagttttttgaacttccttttgcagagtttatgaattggtataactatattcatgatgtacataaagatgaagtctttcaatattatactttacatggatctaaaggattagaattcgacaatgttattgttgttttgaatgaccattttgcacgcaaaagtaactattttaaatatttttttgaaaattatagaaatagtagaaataatgatgacaaagtgtttgaggagattcgtaacttattatatgtttcttgttccagagcaaggaaaaatttaactgtgatttatgaaaccaacagcatagagaatatcagaggaaatattgaggaaatatttggtaaagaaaatgtttcggttctatga

SEQ ID NO: 73426 - DNA, 2082 bp, Enterococcus saccharolyticus subsp. saccharolyticus ATCC 43076
atgaagattaaaactatcgaaatttcaggttttagacaaattacacatgcaacgtttaatctagaaaatggtattacttttcttgctggagctaataatagtggtaaaacttcgctagtcgaacttctgaattgtatttttaattttggtaacgaaaaattttctggtgaagatttttcggtagttaatactcaaaagtggataaacgaagttttaccactaatattagctttttttcaagaagaaacacaaaaagaaagtattatctccaatatttgtaatttaatttttcctgatacagatgaacagaatgaaataattattgagccaattaagctaaaaattcaaattgattatgatgctgcaaatgatgatataagaaattttgctgactatataatggatcttgatccatcttcttccagtttctattttgtttacgagtataatgtagacaactctcttttcagaaagaatctaataaatcattacgataaactagaacatcgtgctaaaaaaatactttcagactctgaaaataataacgatgcaaatattaagaaaataattttgaaagtatattttgactccttatcagaaactattagatttacagatagtaaattcgaaaatggtggaaaggttgatcgtagaaacttcataaagcttttcaattttcaaaaaattatggctgggagaaccttagatgatactagtacggacagaagtaaaatcttaagtaaaaatattgttgatattgctagtgaagatgaaaagtgggcaaaaacaattgaaagcttacctgatacaatattaaaggctatcgaaagtgaaaaaatcgatcaaattgtaaaagatacttccattaattcacttaaagaaactatgtcttcaatttcaatgacgaacggtggtcaagcaaacgaaatcattattgacatggatattacagaagaatccattaaatcattacttaagaatatcactagtgcaaagtatatgttagatgaacactatttaaatgaatcatcgcaaggattaggatatagtaaccttatctatatgcatttgcaactagaaaaatttaataaaacaattgatccattattggttaatttgtttgtaatagaagaacccgaatctcatatgcatccccaaatgcaatatattttttcgcaatatttactaacttattttgcctctagaccagaattacaaggattcatcactacacactcacacgaagttgttagaggtgctaagctatctcaattgagggtactcagaaaagttgatagctttaagtgttctttatatgatttaagaaattttcataataatttggaaggtacccctcaattgttggatttttacaactatttttattcaattagctttcccgatattatttttgcggataaagttattttgtatgaaggtgatacagagcggatgcttattaatagtcttttgaaagctgataaaacgccctttcctaaactaaagagtcagtatctttcatttgttcaagtcggaggggcatacgcagttaactatgaacctattctaaaatatctagatataaaatcgctaataataacagatatagattacggaaaagaatgtaatactaaaaaagaaatagaagcttccaaatctacaaacgattctataaataaattattaaatatgagagcaaaaactgaaaacacaaaaactattaaagatatttactcctgtagagaaaataaagaaccgtatgctttaataagagataatatatgcctaactttccaaggtgaaaaggatggctatacaagaacactagaagaagcaatgttatgtaaattatatggtatcaagtcattcgatacgcagacaaaaatttggtggaaagacaaaagaaagagcgacaatttaaaatattcgataccaaacgacgcatctattggcgtaaggaaaattattaatagtacttcaaaaaataaaacagattttatgtattctgttgtcctaaataataaattgacaagtatgttgccttactatattgaggaggggctaaagtggctagaaaaatag

SEQ ID NO: 73427 - DNA, 1950 bp, Enterococcus saccharolyticus subsp. saccharolyticus ATCC 43076
gtggctagaaaaatagataattttttcattgtcaatgctccagcaggcagtggtaaaacgactactattcgagaaatgattcgtgacattatttcgaataactccaaagataatgtattgtgcataacatacaccaatagagccgcagatgagctttctaatagtttttcttctcctaatgttgctatttcaacaattcattcatttttaaatagtttcatgaaacaatattttggtagtcaagaaattattgacttatactttgaaacttacgaagacagtatacaacaaagaattgataatagagaggctaaagaaaatcagactaaaagcaatctaaagtacattgaaaaatatggagatctgagtatcgatactcttcgaagaaatattacaaatatatattacaatgaaaatagcttcaattccctatattatggcgggttaagtcatgatgacctgatttcattttcaagtaaaatttttctaaagtataaaataatacagaatagattatcttacaaattccagcatgtttttattgatgaatatcaggatacaaccgtagatgttctaaatattttttatgaaagtttaagaggaaaaagaacaaccttatatctatttggtgataagatgcaacaaatttacaaaaattatgatggaaactttgaaccaaattttaaagaatttgattctagtaaagctttaaacactaactaccggtcaattccgaagatcataagtttactaaataacatatacaatgattccagtttcgttcaaaatgtctctgatgatatggtagacattgttcctagttttaatccaagagtaattattagcaaaaatgttgatgaagaattgactaaaattttaaataattatccaaattcattaactttattcctatctaatcgatctagatttcaaaaaatcggttgttcttctttatatactacgtttagtagaatggaacgctattcttttggcaaaaagtatagtgtagtagatgtattaacaaatatcaccaaagacaaccctgattctttgatgagactgatctttttagtagcagaaatcaataataattacacttccaataactacggcgcaattgtccaaaaaattaaggaagagcagccgatacttggaataaaagattggaaattatcaaaccatcaagataaagctaatctaaatacaattcttgctgaattagcttcgatattatcgtcttccgaaaactctatccaaaatgttttaacttacttaaaggaaaaaattctgcaaacatcattaacattaagcgagattatggaagatgatagttattctgacgcattgaatgttcctattaatgaggtggtaaaactctatgactacttagagtccccaaaagtatccacacaacatggggtaaaaggagaaagtcacgatgaagttattttcattgccgataatggtagtaatccttcggtaagtatgtataagttttttgatctttggtcagacaccgatatttcactctcatcattagaagaattttattatcaatattcttttgaattaattaaaattactgaaaaagtgggagttagaattagcgctttaaatgcgggtagtttcatacctcataaagattacttaaaagacagtgcgtctaatataatgactatgtttcagggaaacgatttatttaataaactttgtctgcaagattatcaaacatttatatcaaaaccaaatgtgactaatgtgaaaaaatgttttagggagtcacaaatatatggaattttaagtgcctataaactgttttatgtaggatgttcaagagcacgcaaagatcttactattttattggataataccaaagtaactggcggtttaaacaggcaaatacagaaatttgagcaagtcggatttgaagtgtataataagggaacttaa

SEQ ID NO: 73428 - DNA, 2001 bp, Enterococcus sulfureus ATCC 49903
gtgagtaatccatatctttcaaaagtaagaataaaaaattttagaaattttaaagatgtatctgtgaacttggaaaagcaacaaattgttattggtgaaaataatgttggtaagaccaattttattagagcaattcaattaattttagatccttctctgtccgaagaagagaggtatctaaatgaaatcgatttttttgaggggcttgaatcacctttcgagaacaatgaaattattgaaattgagattgaattaagaaactatgaaaataatttaaaacttttgactattttatcaggtgcaacagttagtaataatccagatactattagaattacttatcaattttatccagaagttgactcaattggaaatactgaatataaataccgaatttttcaaggagaaaacaaagaactaaattttggtcataatgaacgtagattcttgaatatgaaagtaattcctcccatcagagatgtggaaaaagatattcgcaacaataagaaatcgcctataaaagcattacttaaagactatgatatagacgctaaagaattagaaactatatctgaggaattagataatgctacaagttctttgttagatatggatgaactaaagtatctaacagattcaatcaacgatagatttggtgcagtagtgaatagccaaattgatttgccagtatcatttaaaactatggatattgctcccactaagttactaaatttcttgaaaattgttttaggagagagcgcaagaggactacacgatacaagtcttggaataaataatcttttgtatatatcactacttctgctttctttagaagataatacagttcctagcatactttctgaaaaacaatataatactcttatagaagatgatacagagctgatcattgataaattttacaaaattacttctaatggaaaacgtataatagattctgaaatttccgaagcagactataaaaaactgtataccttcatggatgaaaattataaaaataaaaattttcaaggtttctcaattcttgttattgaggaaccagaagctcatttacatccggcgatgcagcgcacgatttacaaagatatatttaatagaaatgtctcaatgcttatgactacacattctcctcatattacttctgtggcaccgataaatagcatcgtacatttgaggaagagtagtcaaggtactttgataaacagcacagcaaatttaaattttactgatggagaacaaaaagatttagaaagatatattgacgtaaaacgtggagaactgtactttggaaaaggtattctcttagtagagggagttgcagaagaatacttaattccggaattctctagagtgttggaaaaagatcttgataaacatgggataatttgctgcaatataaactcaactaattttaaaccatattataaatttttaagagcactaaaaatgccaactgcaataataactgatggcgatttctatttccaagaagagaaaatagaaaatggtgaaaaaaagataatatctacttttcataaaatggaatataacacacctactggagcaaacaagttttatgatggattggaaagaatgagacaacttgtaaaagatatagggatgttttcagaggctgttgatacccttgatgataaagctttagaagctaccttaaacaaagaaggtatctttatcggtttttatactttagaaatagacatttttgaaaatttagatgctattgacaaagataatgtctggaacctatttaatgaattaaccgcaggtggggataatcataaaagtaatttcaaagaccatctggacaataaaagatttgacgaatgtttaaaaatgatagagggcaccacatctaaaattggtaagggaaggtttgctcagagattatcattagacatttctccagaaatggtaccagaatatattgaaaaggctataaattatattgtcgaaaatgtttaa

SEQ ID NO: 73429 - DNA, 1779 bp, Enterococcus sulfureus ATCC 49903
atgactaaatattttgaaaaactatcccagataaaagaagataaaaatcagtacgaagcactattagcaaactctaatgctgtaattaaagcaggacctggcagtggtaaaacaacagttttaacggtaaagttaaaactgttactgatggaaaaaattgttgaacctagaggaattgtttgtttaacatacagtaattctgcggtgaagaattttactcaaaaattaagagagttaggtgtaagcaaatccaatagagttattctttcaactgttcatggattttgcatttcacaaatccttattcccttcggtaaaatgtataacacaagaataaattttccgattaaaattattaatgacaaggaaaaaaacgaaatatttagagtttctaaaaatgaattagctatttcaaaacaatatactttagaaaatgttgaaaaatatagaaatgaaatgtatggttcacgtagttcagtagatataaataaagataagcaactagagaaactatgtttgttatttgaagctaaaatgttagaaaaaaatctttgtgatttcaatttaattataagtgaatctcttcgtctaatggaggaacatccatatattattaaatgcttagaagcaaaattcccatggattttgattgatgaataccaagacctagggaaaatattgcatgagattgttttattgtttcttgaaaaaactaaaattaagttttttgttgtaggtgatcctgatcaatcaatttatagatttcaaggtgctttgccattttattttttagagctttatgatcatccggacatgaaaagaataaatttaaccacaaattacagaagtgatcaatttttaattgattctgtattgaagacattagactgggatgatagggagtacgtatctggaataaataatgagaaacctgcaaaaatcaattttttcgaatgtgaggttggcatggagcaacagtataaattagttgctcaacaattaattccaatgtgtattgccaatgatatttccccttcagaaatctgtattctagttggatacaataatcaattagatgatctttccaatgcattagatgaagaaggtattgcctattatagagaaggattatcgtttttaaaattaaaatttgtgctatggttacaagaatgttgtctatatttatcaggtaataacaaagtgaacttcaacgatatatctgacgaatggttatttataaataataaagatatacgtgattttgatgaaaaaatgaaactatttaagagtttagaaaagagtaaattgaataaaaatagttttaagaagtggcttaaagcaatttttgtagaactggatttatctactgtgctgtcctgttctccgcacagtaatgaagttaatgatgtaaaggaattcgtcagacaagttattaaggatgaggttttagaaaattatacagttagtcaatttggatacatctcagctttggataaccaggtaactatctctactcggcatagttctaaaggattagaatttgaggtggtcattattcttggtctggaagaaggaagttttccctattacaatcatgcgataggcagtcaagaatatcaagaagatctgagagttttttttgtctcattaactagagctaagagagtagtgtatttagttagatcaaaagccatatctggtatcagtagatatggaaatccgtatcgaattgagaaggagccttcaccattttggaaattattaaaacagaatatttaa

SEQ ID NO: 73430 - DNA, 2163 bp, Enterococcus malodoratus ATCC 43197; identical to SEQ ID NO: 73368

SEQ ID NO: 73431 - DNA, 1770 bp, Enterococcus malodoratus ATCC 43197; identical to SEQ ID NO: 73369

SEQ ID NO: 73432 - DNA, 2190 bp, Enterococcus villorum ATCC 700913; identical to SEQ ID NO: 71982

SEQ ID NO: 73433 - DNA, 1794 bp, Enterococcus villorum ATCC 700913; identical to SEQ ID NO: 71697

SEQ ID NO: 73434 - DNA, 2193 bp, Enterococcus columbae DSM 7374 = ATCC 51263; identical to SEQ ID NO: 73424

SEQ ID NO: 73435 - DNA, 2049 bp, Enterococcus columbae DSM 7374 = ATCC 51263; identical to SEQ ID NO: 73425

SEQ ID NO: 73436 - DNA, 2082 bp, Enterococcus saccharolyticus subsp. saccharolyticus ATCC 43076; identical to SEQ ID NO: 73426

SEQ ID NO: 73437 - DNA, 1950 bp, Enterococcus saccharolyticus subsp. saccharolyticus ATCC 43076; identical to SEQ ID NO: 73427

SEQ ID NO: 73438 - DNA, 2001 bp, Enterococcus sulfureus ATCC 49903; identical to SEQ ID NO: 73428

SEQ ID NO: 73439 - DNA, 1779 bp, Enterococcus sulfureus ATCC 49903; identical to SEQ ID NO: 73429

SEQ ID NO: 73440 - DNA, 2316 bp, Klebsiella pneumoniae UHKPC57
atgcatttgagaaagctggcagtccgtaatttcagaaggctgcacgatgttgttatcgatcttgcgtcagacatttcaattttcgttggggcgaataacagtggtaagacttctgtcggtcatgcacttcaactattcaccggtaaaagccgattcaatattcatgacttcaatgctgaatgttggactgacattgtcacatttggagaaggggcggatgctgcgtcgctatcttcactggaacttgatatttggtttgaagtaacaccgaatgatgttcatcgtgtagtcgatcttctccccagcctatcgtggtcaggttctctggttggaatgcgcgttgctttttcccccatcaatcctgaagaaatccgttcgcgcttcctcgcagtacgtcagcttgctatcgatgccacacctaaagatgaaaatggaactcccaaatacgatccttcacctcgtaatctttgggaatatcttcgcgatagactcaatgacgaatatgaactccgctattttgttcttgatcccgcacgtttcaatgcggaaatgatatccgaggaaggctatgagcctactccgctcacagggcgtgatcgaagtggtcgcgaaatactgaacagccttatccaaatcaactttttgaatgctcagcgtcatctttcagatggttccagaggttcccgttcggaggatctttctcgtgttctcagccgtttttacggacgaaatcttgaacaaaaaggtgaagattatgaagcattaattgctttagctgcgtctgaatcagctttcaatcagcatcttgaacgtgtttttgcacctacgctgaaaagtctggcgaaactcggataccctggactttcaaacccacgcatgatgattcgttcggccttagacccggcgcagatcatgaacaaccaaaatggggccgtaatacattacgcgttgggggaggatgacggtaatcctaccccaccaacactacccgatagttataacgggcttggatttaagaatctgatctttatggttgttgaattactcgacatccacaaccaatggttagcaatagaagagaatcgaccaccggttcacctgatttttattgaagagccagaagctcatctccacgcacagttacagcaggcttttatacgcaagataatggaccttcttgccatggagagtcaggagcttatgcactacaccactcaagtggtggtgacttctcattcaactcatattctttacgaacgtggttttcggccgatccgttactttcggcggaagcgttcatcaaatatgtcggcaacagatgtgctcaatctctctgttttttatgataatactgatcctgaaattcgagactttcttgagcgttacttgaagctgacccattgtgatttgttttttgccgacggggctgtacttgtagaaggcaatgttgagcggctactgctcccgcaaatgattgctaccgccgcacctagattaaaatcctcttacctaacagtccttgagattggcggtgcttttggctatcgattccaaaaactaattgaatatcttgggcttacgacactcattattactgatctggatagtgtgtactgtacccctccggtacaagatgcaacagaagctcgagcagatgagttagatggtcttgcagaaaatccggctgcaaatgatgatggcgaggaacctgatgatgatgaggaagaacaggccaacacagaaacaccaggaaaggcttgtattgccagtcatcctggagctatgacctctaatcaaacacttcggcagtggttaccgaaatgtgacaccgttgccgctttatgggaagcaactgaggaaatgaaaatacaaagccgcacagctgagtgtgacgctttggttcgtgttgcttaccagtgtcagacaaatgttacatggaaagaggaaacactggcacttgctggccgtactttagaggaagcttttgcacttgaaaatctgtcctggtgtcaagatgtgggctgtaagccactcaagctacgtattgccagagcagtaagtatggatctactgcaactggcccagcgcattcacaagcgcgtgcaatcaaaaagctttagtaaaactgattttgctctgaatttacttcttaaaaaaccggatgaatggtctgtcccaacatacattgctgaaggattaaaatggctcgaagctgaaatagccccgccggaactagaagttgcagaaggtcaggaagaggatgttgaggatatgtccgtcgctttagctgaaacagatggagggagggttgcatga

SEQ ID NO: 73441 - DNA, 1878 bp, Klebsiella pneumoniae UHKPC57
atgaccagtcgcattggtagccctgatacacaggcagatattgatgttcgtgcttgtctggatagctcgccaccacgttcatttgtcatggtagccggtgctggttcaggtaaaacaacatctctcattaaagccctggcacatttggctgatacccgtggttctgctttacgtcgtgccgggcaaaaaatatcctgtatcacgtatacagaggtagctgttggtgagattgccgctgacgttggtaactcgcagttatttcatatttcaaccattcatagctttctttggtcggtcatccgaccttttcatttagatatcgcaaagtgggtcgtagcgcgaatacatgaaaaaatagctgaaaagcaagcccattatgataagcccagaacacaagctaaaacaaaatctcgtcttgaagatgaaattgcctatctctctgctcaacttgagtgcattgatgatgttgataaatttatctacgggacaggaagtaactatgctaagggtattttaggtcacgatgatattcttaaactcgtccctgcttgtgttgaggctcatccacttttgagaaggattgtagccaagcgctttccatttgtttttgtcgatgaaagtcaggataccgatcctgatgtgatctctgcgcttcgaactattgctaatgacaatcctgacatgtgcataggattttttggtgatccgatgcagaaaatctatatgagcggagctggtgctattccgttaagtgatgggtgggctgaaattacaaaaccagagaatttcagatgtccgacgtctgtacttggtgttatcaattcgattcgtgcttctggggatggtctccaacaaattcgtggtcgaacgactatcgtagatggcgttgaacaaactgtatcaggcacagtgaatcttttcatcttgccttcaaatgtggaacgaagtgcctatctcacatctgtcagacgttaccttgcaaatgaaactagcgatgaacaatggttaagtgatacacgcgaaggtgatgttcgtcttcttgttttggtgcatcgtatggcagctaatcgactggggttcccgaatttatttgctgctcttactgataaagcaccgatgagtttgagtgaaggggtgaacgatgggtcagcttggccgcttcgtccgtttgtccagcatatacttccaatttttgctgcggctcaggcaaacgatcaatttcagattatgtcgattatgcgtagcgagtgtccaaagctggagccgttacgactgcatggtcaagctatggtggcagttttaaatgaaatacaacaaggcatcgatggcctgtttgcactgttagaagaaggatcacaagcaacagttcgggatatattgctacatgttaaagactgcgagctgttacgtcttgacgatcgttttgaaaatcatttaagtgatgaacctgtgaatgatggtaatgatgacttcgaaaatgttcagaactatctaagatgcaatgcccatgaactttgggcataccgccgctacctttcagaggaatcaccttttgccactcatcatggtgtaaaaggtgcacagttcgagcgcgtattggttgttattgatgatgaagaagctcgcttcagccaatattcgtatgggaaatattttcaatacattcccctatccgacaatgatctagccaatcttgaagagggcaaagagtcagtactcgaccgtactcgtcgccttttttatgtctgttgctcccgtgcgctgaaagacttggccgttgtcatctttgttccagatgtcgccgtcgctcaagcggcaatcgttgagcaaaatttattccctgcatcgacaattctagggcagcatgatctaagttag

SEQ ID NO: 73442 - DNA, 1785 bp, Lactobacillus paracasei subsp. tolerans Lpl7
atgaaagttaaccatgtctggattgaaggttatcgaaatttgagaaagactgattttgcggtaggagacaggttagttctgattggtgagaataatagtggaaagtcgaatttacttcgagcacttacttacccaatgtctgcaggcggagaagtaatgtatactcgtccaatgtctccccgagacttgaacgattcagataaaacggattattataaatttcttgaagatcatgttagtgatttgacaactactgaagttccactcgaagtacaaaaaaagtttcaagcagtgatccccaaagttatcattcgtcttcaattcgaagttgaccaaaggtctatgtactactttgagaagttatccactcaagatgatgaagggaacattgtgtaccagcttgaatatcgttatcagattcaggacatcagtaagctgttagatcacgttaggactataatgcatgcaagagaaaaagactctacaagtcttttgaaatttcagattaaccttctaccttccaacttatataaaagtagtatactcgttccaaaaaagggagaacaggtgacttatgatttgctgaaaaatctaaagactttttcacttgttgcggaacgagatggcttttcaagtagtcgctctaaagtgggttcatcagcgattatagaattattgaacagaaatattaatgatgaaagtaagttgaatattgagagcggttatcacgatttctttgatcaggtgaaggagtcggcaaaaatggatcaggtttttaattggcccaaatatgctattgactatacaaatgctgacaagtttttgggtgaaatatcaatattaccaaatatgcctccaataaatactttgttgaacagtgttcaacttgggtacgcacatgagcccttgtcacaacaaggacttggatatcgaaatcttgtttacttgatggcaatgattaatgctttagaagatgataacgagaatccatatgcagcattgactctcgaagagcccgaggcccatttgagtaatgaaaatcaaaaattattaatgagctttctcgatgcaacttcaaagcaggcggtgaatgtccaattgatgtattccactcacaacacaaacttcctatcaaaagatgcgttgcaagaggtcgttgtgatgaacgatgggaatgcagtctcactgtcgactgcccttcatcctgaatgtttgtcatatttaatgcgtaatccaaatatggacatctacaagcttttattttcaacaaacgttattttagtcgaagggatttctgaagaacttttgataaaggcctatttacgtgttcacagtaatgagctaaacaatatcgaagtcctttcttttcataaaggatttaacaagattctagatttgtggagtcgaattaacttaaacagttctagaaaaattgcggtaattcgtgatttcgacaaccagcccaatgcaaaacaagaagctaacaagagaatcatccccggtaaggtgtacattggcaccactaaaggttatacactagaggatgatattgtttccgaaaactttgaactactaaaacaattcttcaataaacaattaagttggaagttatcacaagatgctactgaaaaagaattatctgaccgttggaaatcaggaaaggctgagactatggccgaagtggcttatgcactcggcaccgatattttccaagattttaagttgccagaacatatcagcagagcacttgatttttttgagggcaagacaaatgaaattgattaa

SEQ ID NO: 73443 - DNA, 1380 bp, Lactobacillus paracasei subsp. tolerans Lpl7
atgaaattgattaattctggagcgggttctgggaaaacaacatctctagcagaagtaattttgtcacggaatagtaagtcgtcagtaaacacgcatatctttgtaattgcatacagtaactatgcatcttcagtgattagaactcgtttaacaacatccaaaagaaaaacgcaggctcagattcatatttcaacaattcattcattcttatggaatttcgtaattgagccatattactatttactttttggaactcagttcactgaaatctctagtcagatacttggtggtgaccagaagttccgtgcctctaagctaaaacaactgcgtgaagatcatattctgcatgtgagtgaattttcgcgtattgctaagaaagtaataattgggagcaagaccgcttgtaagcgagaaaaggccattcgagctatagtgctgaagcaccttgcgttatttgttgactccatttatattgacgaagctcaagacatggaccaaaatactgcagagattattgaagtgctagatagcaaaggtatattttgctacttagtaggagacataaatcaagacttacacgcccgaaacggattcaagtatttaattaaaatgcacaagtcaaattctgagttaaaaactgagaattatcgttgtccacgaacgcatgttatgctatcaaatagatacatttcctacaatcaagtttcgatgtcaaccacatcggggcggctaggttacgtattggaaaaagatacagatgtacaactcttattagaagaatacagtaaaggattgatttatattaataaatcaatccgtcactttaatgtgcatagctctaacagctcagattcattgaaacgaatggaatacatccttagaaaatatcatacaactgtagctgattacgcagaaagtgattctgaagtatcaaaaaagtgggcttttgatatagccagatgggtatggagaagtattgagtcaggtacggaatcgcaggtcgttgttcaaagtttgattaaacttttacaccaagcctattcccgaaaactttatgctgagctctacgaatgtatcaatcttttgcaaaagataaaagatagtactgggagtatgtcatcagtgcctttgtgctcaattgaggctgcaaaaggtagccagtcggatcgctgtctgctcataatgtctactgacctgtttcgagttttaataggagaaagtaacaagaaaaattccacaaccaatgccttatacgttgcattaactaggtcaatagatcaactgttgataatacttactcgagaagtcactagccattattcagatagaaaaattgagaaatcaatgaatcaacttggaatttttctctgccgtaaataa

SEQ ID NO: 73444 - DNA, 2076 bp, Lactobacillus paracasei subsp. paracasei Lpp123
atgaaactagtcaaaatggagattgatggttttcgatcatatggggaaaaaactacattaaagtttggcaaactgaccacacttattggtgataacggtgttggtaaaacaactgcactattagttctcaataaaatgtttggtgctaatgcttcagaccgcatcattagagagagcgacttttattcaccaataggagaaaattcagttactaccggtgaaaaaaagatgttgtgcgatacttattttcaacttgacgatagtgatgatcgagctcaagcgcaactactgagtcatgtatgtattgcaaatccccagggggtattaatcttacatgtacaactgagcgctagttggatggatgacgggagtaccgagggtgctatagaatctaaaattcactttataattgacgactcagatccggataatattaagcaacaggaagctccaaggcgggaattaaatttaatcagaatgatttatgtgccagcagttcgaaatccagagaaacaacttggttcaacatctaccagtctattagcacgattggtgcgtagcgttaattggaatgctgagactaaggaagatattgaagaacaactttctaagttaaaccaaactgtattagaagaaaatggtctaagaagaattaatgaaacattatcagcggattggcgaaagtattatcaagatgaacgatttgcgaatgttgctttaacaatcgactccacaaatttgaattctttagcaaatagaattcaatcaacattcacttcccaagcaactggccataagtttcgacctgaagaaatgggtgatgggactcgctcgttgttctacatatccaatgttgcaagcgtattagatattgaacaatctatactggaagatgaaaacattcaagaaaagcctttgattgatcatcaaccaccgttacttactcttgttgcgattgaggaacctgaaaaccatatttcaccacatttattggggaaactagttggaagattaaaagatatggcagaattagcaaactgtcaagtattgttgacctcacactcaccagccattatcagccgtattagtccagaatcaattcgttatgttcgacttgacccgcatgagggtacatcaacaatccaatcactgaacttgccagataaagagaatacagttgaggcctatcgctatgtaaaacttgccgtacaagtatatccggaactatattttgctcaacttgtagtgcttggcgaaggagcaagtgaagaaataataattccgcgttttttggaagccaggggtgagtgcttggatgaaaatggtattgcatttgtaccacttgcaggacgatttgtgcattatttatggaatctcttgaatcaactaggaattccgtttattactctattggacttggatcgagaacgtactggtggtggttggggacgaattagctacattttaggggagttaaacatgattgactgtaaagttgagaagcttccgttcggtatcgaagaaattaacaatgatgctttaaaggaactttcaaagaggcttattgagaacaggaatgatgcaaaagagttggacgaataccttgaaaatttagaaaaaaaacacgtctatttttctaatcctctagatattgactttttaatgctcactcattactcagacgagtacaaacatctgctcaaaggaaccgaggggccaatcattaaaactcagaacggtcaacaaaaaagagtaaaagaatacgaacctcagaacgtttctagcaaagaatatcttaaccgcgcagaagaggcgacgagatctgcactaaaaggcggtgttgatgttactgccggggaatcatactctagttcagaaaaagccttaatgatatggtatgtgtatttctttctgggaagagggaaaacaactacgcacattcaagtcttggatggagataaagatggaagcaaactaacagatgaaaaattgcttaaaaaaatcccgtcagtgattaagcgtctctgtggagatgtagcggcacaattgaatatcggagcagaaagtcatgattaa

SEQ ID NO: 73445 - DNA, 1812 bp, Lactobacillus paracasei subsp. paracasei Lpp123
atgattaataaaagtgaatggattcctacagatggttttatacttgaggataaagccagtgaagccgtaaaagccgacggaaatttgcttgtaattgcaggaccaggaactgggaaaactgagatgctcgcacaaaaagcaaactacttacttgaaacgggcgtttgtcgtaacccatataacatccttgcaattagtttcaaaaccgattcagctagtaatttagcggagagagtaaaacaacgttgtccagatttggcaaatcatcggtttaattcactgacctatgatgcactagcgaagagaatattggatcaatttagaaatgggcttgcacagtcgaatcgccctaatgcagactaccttgttcaagacgaagaaaagttgcacaagatattttattatgtttatggtaaaacattacgtgataatcaagaaaattcattctggagacatttttcattgttaaatcaagtaaacagtgatgctgaaaaacagtttcgtcagataatacttcacggtaacaaaacatttcaggcgaacctcagttttcagatgattatgcagctagctataatcattattgatactaatccacttataaaaaaagcttttcaagctgcatatccgtatgtatttctggatgaatttcaggatacgactgatttacaatatcaattcatcaaaacattatttgaatcaagtactgcggctattactgccgttggtgacgataaacaacgaattatggattttgcgggagctagaaaatcaatcttctcagattttaaagacgaatttaattcagatgaattgcacttaatattgaatcatagatccgcgccaaggctcattaaattacaaatgaaaatgtaccaatcgttgcaagctggagaatatgaaacaaaatggcctaaaaatcgggaaaatgatgacggcgagatttcgttgattcaaagccaagatgaatatgaggaagcggccttcgttgcacaagatataatcaagaagttaaagcaagggattaagcctgacgaaattgcactattagtgaaacagaatgactcgcaatatggcactccaatcattacagcactatctgagttgggaattaaatcaagagttgaatcaaaatatcagtccttgttaaaagagccacttgtacagattgttttacaatccgttatttttgcagtggtagcaaatcctactgaagattgggggaactttttcgacctatatttaaaatcacgcgagataacagatgttgaggatgaggatacgctttacactgctgagctaaatcttaataaatttcttcatgaaatttcagcactaatcactgacatcgaattgtcagcttcaaaattggtacagcatattattgatttttggactaaagatttttttagatcaaattttcctcagtattttaatgaatcaagttttgaagctacgattgatagcttcatcaagctattaaatatggagcgtcaagccggaggtaaatggattgaatctatcaattccttccgtggtgttgacacaatacctataatgactattcataaaagtaaagggcttgagtttaaagcagcctatttgatagcgttagatgacactgcattctggacttttcaaagtgatcctgatgcaacaaggagagcactgtttgtagcaatttctcgcgcaaagttatatctgacttttacatttgcacagagtagaagtaatttaaacttccattccggaaagcaaagtcaccaactaatttctgaattctatgatttgattgatccgtttataaattag

SEQ ID NO: 73446 - DNA, 1785 bp, Lactobacillus paracasei subsp. tolerans Lpl14; identical to SEQ ID NO: 73442

SEQ ID NO: 73447 - DNA, 1380 bp, Lactobacillus paracasei subsp. tolerans Lpl14; identical to SEQ ID NO: 73443

SEQ ID NO: 73448 - DNA, 2091 bp, Lactobacillus paracasei subsp. paracasei Lpp43
gtgtttctaaaaactgttaaactgtatgattttcgaaaatttgtttctcaggtgaatggggaacctggattgatagtaaaatttcatccgggcttgaatatcattgtcggtgaaaatgattcagggaaaactgcagttatcgatgcaattaaaatgttgcttggaacagttagcgatgatcgaaccagtattcaagacgaggatttctattttgacgggaccgagttttcaaatgattttaagattgaggctgtattttgtagtctcaacaagtacgaggctggaacttttctagagtggctgtcgtttgacgataataatgaatatgagttacatgtaaaactaacagttgagcgcaaaacgagtgaagctggacgtcaatatttagatcgaaatctagttgcaggagatgaaggtgcagaatcttcgttagcaagtggggcacgagtatacttacgtgttacatacttaaaagctctgagaaatgcaacagatgaattaactcctggctttcgctcacatctgccacaattacttgcagcacactcggagtttcgaaatcacccagaacataaattaaaacttgtccaagcgttggaggaagccaacgcaataatagagggatatctctcagatggctttccaagtgaatcgaatccacctaaagataacgatcatctttctgataataatttggaaaaacaatcaattaataaagaacttcattcggtattgaggcagttatttgatagtcaagatcaggataaaagtgacacgcgctttcaactaacacaagttacacttgatcaaatattcaaacagctaagtttaagttcagaaagcgtcaatttgggattggggaacttgaacctgttgtacatttcgaccgagttagcgctgctaaaggatcattcaagttcagtggtttatggtccaaacattatgcttatagaggaattagaggcgcacttgcacgtgcaggctcagatacgactaattaaatacatcgagcgctatattcttagcacagaggataattcatctcagcagtttatattgacttcacatagtgttgcactgaccgcatcgatagatcaaagatcgctgatatatatgaacgctaataaagcctattcgatggcacctgaggacaccatgcttgaggaagctgattatgattttttgaatcgatttttagatgcaacaaagagtaacctattctttgcaaaaggaattattttggtggagggatatgcggaaaatattttattaccagccctggcagatttaataaatttaccgttacatcgttctggtatctcaattgtaaacgttggcgggacaagctttaatcaatatattaaactgttttctcaaaaagaaaaatcagaaaaaattggtatccctatctctataattacagattcagatattaatccgactgtgtatggtatcgattcagagagcgctgaaaaaatccaggagttgattagtggccctagcgatttgaatgttgacttgttcggagaggagtatgcgacttttgctgaattagtagctgcttttaaactaagatttgaaaatactaaaattaagaatttaattattcaagtaaaaaaattccgatctgattctgactgggccagtaagacagcagaaaggcaagagtgtctcaatcaaaaatacgaagaatttagttccaatagtaaagtattcatgtcgccattatggactttggagtacagtcttttgcgtagctctttgcgtcatcttacgattcaagcgatagctgaaacacaattcgttagagaaaatcatcgggaaaaacttattaaaaaatttgaagaagattataaaacaagtccgaataaggctgcatacaatgcgtatgcagccttgaacaaaggctcggtttcaaaaacacaggttagtgaacaattagcaaaactaattatgggtcttagtcaagatgaaaaggaagagctgaaaaataaaattattggcgatacaacacattcacaaaatgaagaatgcaagtatttaattaatgcgattaagtttgcaagtgggcaggaggttgaacaagattga

SEQ ID NO: 73449 - DNA, 1788 bp, Lactobacillus paracasei subsp. paracasei Lpp43
ttgaacttgatgcaaattgaaagcatattgttgcacggtgcgcattttacagcggaacagcgagaagttattcaagcaataggacgaattgacgtcgtagctggacctggatcaggtaaaacaaccgtattagcagcgaaggtgttaaggttattgaccactcgcaactacgaagataaaggcatctgctgtattacacataccaatgttgctgtaaaagagattctagcacggttgaagcttgctggtgtggatgaaattgaatatccaaattttgtaggaactattcaaagtttcatggataaatttttaggtaaaactgcatttgccacggtcctacccggtgtgacgcttaagcttttagatgatgaaaagttctatgaaaagtatgataaaaattttaggggaattgttaaggactatcgttcagattggaacgtacctaagccgtccaaaaatgggtgcaagctagtaattttagatgacggatcattttattacactaacagacaccagaatcagcgttgtcaatatgccattaatcgtgcatgcgaatggctgttaagggatggctatgtttcatattctgatctcaaatcattgtcttattggtatctaagtaaacatagagacgagttgagcgtggcatttgagaaacgattttcatacttaatgatcgatgaagctcaagataccgattggattcagtttgccattataaatggtctggctaatggcaaacagttgaatgtacaaagatttggagatccgtatcaagcattatatactatctatggatccgagacagaggactcttggaacccgagacccgataacgaattctaccagactaaagaaatctctgaaactacaaggtttggcagtttaattgctgctgtagttaaacatgtttgtgttcaggaatatgaacaattccattcgaatcaagaactaaatttctttccgaagtattttatgacatatgaaactggagacgaactcaaggaaaagcatactcggctgatcgaagacgctgccagttcaaatccaaattttcgtatattgcagaaaccagatgctattgtcggaataatgcacagtgacattataaaagttgaacccaaatattccaaagaaggttcagagcaacgagctcatgaaagaagtgtcagtgaaatttatgcattggttatcaaattattggccaatgcgaatggcgtttcttttatggaagaatcagtactaatccgtaataatcatgatagcaaccttgaattagcagatgtcatccagaaactcgcaaaacaaaatatttcattgaacgaggtacaatatcatttgtacagtctaattggttcagaaactatttcagaagcttatttgcaaagagaatgcaagcatctgcttcaagacgttagcaacctagaaggtgaacctgaaagaatgaatttatcgacagtccaccgagaatttgcaacaattcacggagttaaaggtgaaacacatcgatcgacactgcttttactaacttcatgtgtacacatgaagtttaatgaagaagacaaaatcaataagttcttcaaaactatctttccttatttactaggagaccgaccagatttttcatcggatccagaaatagaacagttacagcgggattgtcttaaactagcatatgtagcattaagtcgtccaaagtacttattagcagttgcaattcccagtcaagatcttgctgatgaaaaaaaaacgagcttattgacacacggttgggtagaggcaaaatag

SEQ ID NO: 73450 - DNA, 2025 bp, Lactobacillus plantarum IPLA88
gtgtacttgtctgaaatcaaattatataattttcgacggttttcatcatcagctgatggtaatgctggattgactatcaaccttaataagggattaaatataattattggagaaaatgattctggaaaaactgcaatcatcgatgctattagattgctagtaggggatataagtgatgattttcaacgtattgcagaggatgatttttattgtaatgaatcaggagaatatgtgacttcatttcatatagagggggtgttcaaagatttaagtaagaaagaggccggaatatttttagattggctatcttttgatgatgaagggaactatgaacttcaattaaatttgctagttgagaaaaagaaaaatgataataatcaaatgtatattgatcataaattggtggcaggagaaaagagttctgctatgccgttgaataatgtgactcgttcatttttaaaggcaacatacttaaaacctttgcgtaatgcagatgacgaattgactccaggattccgttcacatttaccgagaatgttaatggctcactctactttcaataaagatgatcataataaaaatggtttggtagatattatgaaggaagcagactcgaaaattgaacagttttttggcgatgactccagtatcaaaaataagacagaagacacattatctgatcatgcttcgcttaatgagcaattatcacatgtattatcgcaattatacgatcagcaggatcgttctaaaagtaaagttcatttgcaacttcctgaggcaagtctttttaaaatattgaaacaattgagtttgaatccggataaaaagaatcttggattaggcaatatgaatcttctatatattgctacggagcttgcattactaaatgatcatttaacccataatgtatatgggcctaatatcatgttgattgaggaattagaagcgcatttgcatgtgcaagcacaaattcgattagtaaaatatatcaataagtatatggaaaagcaacagggaacgagtgtgcaatttattttaacttcacacagtgttgctctgactgcttctgttgatcaaagggcacttatatacttaaataatggaaaagcctattcattggctccggaatacacaatgttagaagatgacggctatgaatttttaaaccgctttcttgacgctaccaaggctaatttgttttttgccaagggattaattttagttgagggatacgcagaaaatattttattgccggcacttgctgagttaattgattttccattgcatgaaaggggggtctcaattgtaaatgttggtggtcgatcttttgacaattacattaaattatttgcaagaagagattctaagtgttcaattgggttacctgtttcaatagtacgcgattcagatataaagccgtacacttatcgtattaacgataaaaatattgataatataaaaccattattgaatgaagaaaactttgataaaaagcacctaggaactaaatttccaacttttaataaacttcaaaaaagttttaaattagaattttcgagtgttaacatgaatcttattgaagaaaaaacatatcagcttttaaatgatgatgaattaacccgttgtcaaaatgctaagaccgatagtctgaagaaacgttataactgttttaatgtaaaccaagaagtatttgtttctcccgcatggacgctagaatattccctattaagaagccctttgaaagacctattaactcgtgctatagcagaaacgaggtatagtaatgaacataaaagggagaaatttttagaagatcttaaaagcaaaaacttaattgaagtttatgaagattttgaacgtaatgtttcaaaagctgaaactgctcaacatcttgccgaaaaaatacattttttgagtgatacagatagaaaagaacttagagataaagtgttaaaggatagctattgcaaatatcttgtagatgctattaaatttgcgtgtgagccgggtgaaacaaatgagtaa

SEQ ID NO: 73451 - DNA, 1782 bp, Lactobacillus plantarum IPLA88
atgagtaataatttttatgagatagaaagaaagcttttgccgttgggtcaccaattttctgaagatcaaagaaaagtaatagaagcaagaggaaacatcaatgttgttgccggaccgggatctggaaaaacaaccgtattaactgcaaaattgctttctcttttgacaaatcagaaacaaggtgataaagggatttgttgtatcacccatactaatgttgcggttgatgaaatcagaaaaaaattattgcactgcggaataaaaaatattaattatccaaattttattggtactattcagagtttcttcgattattattttggaagcaaagcatttggcattatatttccagataaaaggttacgaatatttgatggcaatcagtatcaaacaatatacaatcaggaatttattaacgaaaccccttggtggtcatatgatacagcgcctgattataaacgacgaaatgcccatttggttatttcagatgacagactagtatctttcaaaaatgacgaagcaaaagcatatagtaataacatcaataaagctcttaaaaatattatttcacgtggaattatcaataatgatcagatgacagttttagctaaatggtacgtaaattcacataacaatcttttgtctgctgcaatagagaagcgctttaagtatgtattgctcgatgaggctcaagacaccaacaatcaacagtatcagttgttaatgaacttattagaaaatacagaggtttactttcaaaggtttggggatccataccaagcactatatactatatatggaaatgaaactaaagatgcatggcttcctaatcatgaagaacaaaaaggaattgctcaagtcaaggaaatttctacgactgtaagattcgatcagagaatcgcaaaccttgtgaaaaatgtctgttatgaagagtattccacatttcattcagaacgatgtgacaataaatttgataattattttatcacgtttaggaatgagtctgatttaatggcaaaatataatcggcttattgaacagtgtgcaactaatgattcagacttctttggatgtgctaataaagatatgattgttgctcctcagcataaagatctagaaaagtggttttcgggttatgatagatcgacacaatctatctctaataattctacaaacccatttaaggagttattaacagtggtgacgagaaaacttgcacgagaaaatttcattacagtgactgaggagcgaaaaaaaatacaatctgatttgaaatattcaatcgctataagcgaaattataaaggaattgttttctaacaatcctgacatagaaatattaaaacaatgtatgaatgctttttcgttaaaaaaaacgtcacaacagatgattgacgaactattcaaagaaaaagagatatctttatgtgatttatctaatggcggaaccagtgaaaatgataaattgggagtatcgacaattcatggtgtgaagggggaaacacaccgttctacattcttgttaattgattctaaagttaatagtaattttagtttcactagtccaaatccattttgggagaaaatttttccgtttttaatcgggaaacgaatagattattctcatgataatgatgcaaaattcacaagatattgtttaaaatatgcgtatgttgcattaagccgtcctattttttttgctggagttgctgtcccaatcgctaacttaaaatcgaatcaaaaagataaaatgctttcctatgggtggaaagaagcaaaataa

SEQ ID NO: 73452 - DNA, 1839 bp, Delftia acidovorans CCUG 274B
atgcgtgtagcccggatagaaatagagaacttcaggggcataaaacaggcgaagctgttatttcccaagcatggcgttcttatcggcgacaacaataccggaaagacaacgatcctggaggccctggatctcgttcttgggccggatcgcctcaatcgccaacccgcaattgacgagcatgacttcttcggaggcatttatgctcaaatgcccgacgcccctccggaaaacggtggagccgacggcgctgctccgcccgagcctggtgaagaagtcgcagaggactcggcaccggactcggcaccgaaaatcgtcatagaggcgacgatcgccgacctgactgacgagcagaaggggaaatttggagattacatcgaattctgggactcggctgtggacaagttctacgaggcgcccaatcctgccggcgttgatgctgcttcgatcacagaggcactccgcgttactttccatggttggtacgacaaagaagaggatgacttcgagggtgccacctacttcacccgcagcctcaccgaaggcgacaagcccgacccgttttccaggaagcacaagcagctttgtggcttcctatacctccgctccattcgcaccggctcgcgagcccttagcctagaacgcggcagcttgctcgacatcattctgcgcttgaaagaggtccggccgcagatgtgggaggctactctcaccacactttccaatattgtggtcgccagcgatccagcgctgggcatctcccctgtattagagagtatcaacacggcgctgaagaaatatgtccccaaagaatggggggttgagcctcatctcaaggtgtcgaatctcactcgcgaacacctaagaaaggttattacagccttcatcgccaccggcgacggcatgcatgcggcaccgttctaccggcaaggtacaggcacgatcaacatgcttgtcctggcaatgctgtcccagatcgccgagagcaagcagaacgtcatatttgccatggaggaacctgaaacagctatacctccctatgcgcagaaacggatcattcacgaagtacgcaaactggcatcccaagccctctttacgtcccattcgccctatgtgctagaggagttcgagacggatgaaaccgttgtgctcgctcgtgacgcttcgggccggatggggcaaagggctattgcgctgcccgacaatgtgaaaccgaagcgctacaggcaggagtttcgcacccgcttctgtgaaggtttacttgctcgccgcgttcttctggcggaaggaccaactgagtattcagcgttcccggtggtgtgccgacgcctcgcagagatcaatccaaagagctatctctccctcgaagcgctcgggatatgtacagttgacgcagacggcgagaaaaacgtccccggcatggcgcagctctacaaagctctggggaagcgaacctttgcgatttgcgacaagcaagaggaagcaaacaaggcactaattgaggcacaggtcgaactgctgctcatgcacgacgaaaagggctttgaggatttggtcctgaaaggcacaacggaagaggccctgaagcgatttgcaaagcagttggactggccaacacacttggcgcagaaatacccggatccggaagcacaggcggaagctgcactgagagattacttcttttggtcgaagggcaactggggcactgccgactttcttgctcaatgcagcgaagaagagattccggagtggcttcgtgatgccgcgctgaaattgaaagcggcttgtacgcccgctcacgctgaagcagacgcggaagctggtgccgatggaactgactga

SEQ ID NO: 73453 - DNA, 1815 bp, Delftia acidovorans CCUG 274B
atggaactgactgagggtcaactgaatgtaatggagtcggatgggcacctgcttgtcacaggtggacctgggtcgggtaagacaaccatctccatcatcaaggcgtcccagatcgcggagcaacatgttcgcccaggtcagaaaattctgtttctcagcttcgcgcgtgcgactgtttcccgcgtggtggaggccatcgaatacgaacagaagatcccggccgccacgaaaaatttcatcgacgtcgatacctatcatgcattcttctggcgcaccttaaagacacatggctatctgataggcctgccccgtagattagggattctcaccccacccaatgaggccatcgctctctcgggggtcaggtcgggcttcccagccagaaatctcacggatgaacagaaggaagccaagaaagctgctgaagcggcggagcgtatccgtctggcaacgaacgaggggcggatttgcttcgacctcttcgctccgtatgtgggggatattctgcatggtagcgagcgcatccggcgtctcatcgcaaccatgtatccggtcatcattcttgacgagtttcaggacaccaacggcgcgcaatggcgcgtggttcaggcgttgggcaagtcgtgcaggctgatcgccctcgccgacccagagcaacgaatttacgactggataggtgccgatcccgcacgccttgatcatttccgggatgcattcgccccaacggcggttgacctcagtaccgacaatcacagaagcgcagggacggaaattgccatttttggcaatgacctactcaccggtgaatttcgccagcaagaatacaagggtgtctcgtttgatgtctttgacccgttttccggtccagcgatgaccaagctggtgacaacaatctatgcggctcgccagcgtttgatgactcaaggcattgagaactggtctctggcgattcttgttccgaccaagaaattgacgcgcctggtgtctgacgctttgcgtcaccctccggccgggatgacggaggtgtttcacacggcaaccatcgagatggaggccgcgatccttggagctgaagtcattggccttttgatgcaaccttccggagatagtcgtcacttcgcgcagttcattgacctattgtgcaactacttccaaggcaaagatgggagtgagccgacgcaaggggcgttgaaggaggctgcgagcatccggggcgcttatgaagagttgttggcaagccgtgctaatggcaaagccatccgcaggaacagtatcctcgtcaacgtgttgacggtatacgatcaggttcgcgcccttgtcttgacgggcgatccagacaaggattggcgcgctgtgcggcgcgttctggaagatggtgcatgcaaacgcctgaaagagatcgcggaggaggttcgaaacatccgcctactggaccgaggtactcaacttcgccaacaactttctcaggattggcgagacaacggatatcgcaatgcgctggcgatcattcgacaagccttcgtccaagagcacttttctacgagcgctaagcccgaatccggcgttgtcgtgatgaacatgcacaaagcgaaggggaaacagttcgacgaggtaatcatttttgaaggttggccgaagcgggcaaaagggaagatcgtcgcaaacacagaccgcattgtgcgcttcaactccagagatcaaatcaatgaccaagcacgacagaactttcgggtcagtgtcacgagagggaggcggcagacgacgatcttgacgcctaaaggcgatccttgcgtgttgctcgttggtgaggcgtga

SEQ ID NO: 73454 - DNA, 1905 bp, Pseudomonas fluorescens LMG 5329
atgtatctccgcgccttggaaattgatggttttaaatgtttcaacacaggcttcaccattgagttgcatgatggcctcaacgtcctggtaggggagaatggggctggtaaaacggggatcatcagtgcaattcggcagttgttcaatgactccgagtcgggaaagcgaaacatccatgagcgagacttctaccgcggcttcgagccaggggcattagctaccgaggctattcgtattgaggccacgttcagcgggctggaccaagatgagagcacagcctttatcgattggtgcggccaggagcctgaggccaaacttaccttcactgcaacgaaccgggagtcgcgcggccgatatcgatactccatctggggtgggcatcagcggatcaagcctgtagaggtcgaaatcctcgatctgatccactgcgtctatctcccgccgttgcgtgacgccgaagtcaaacttcgcgaaggtcgccagtcacggcttgcccggttgatgaaggcgctttgccgcaaggagatcgacgagtgccgcaaggcaggagtggctcatccgctcgagcagcgggttggagaattcaatcaagagttggccgagagcgatgactacgccatcaagcaggccaaccagcggattggagacaacctcaaggaagccttgggcatgaatctctctcagggcacgctcatccagttttcggaggtcaatttctcgaaaattgttgagggtctcagactgctgtattacccagaccttaatggcgccgatgctactcaattcaggtcactcgaagagaacagcctcgggtacaacaacttgctgtacatcgcatcgattctggcggagctgatcctagaggtagatgaggaccgaggtgaagagacgttcctgcgcctactactgatcgaagagccagaggcgcatttacatcctcaattgcaaatccgtttgctgaggcacttgcgaacagtcgcggcagcgaaggggatccaggtcattgttaccactcactccaccgtcatctcgtcagcggtgtccgtcgacaacattattcatctgtcccgcaaagaccagccgatcgcagtccctctgcgtaagtgcgggctttccgatccaagccgtcgattcattgatcgctggttggacgttaccaaatcgaacctactgttttcgaaaggcgttatcttggttgagggtatcgccgaagcgatcgttgtaccggagttggctcgtatcgtgctacgagcatatgggaaaggccgagattccctagacgactacggcgtatcgatcatcaacttgaatggcatctacttcaatcacttcatgcagctgttctgtgacgcggatgagaaagtccaagccagcaatgtgccggttcgatgtgcagggctcaccgacaatgatcctcccaagtcggtcgaaaccattgaggacgatgagggtaaaaagacaattgttccttacttgcctcatcaagagagctttatggcaggcagtaaccatgccctcaagcttattccgatcattgcaaaatccgagtacggaagactttacgccggtaagtacaagaccttcgagtatgacatcgccctcgagagcaacaacctgagcaggatgtttgcagtcgccgcgaatcattggcccactcaaggcactgtcaaaaagggactggacgaggcatcggaattgaattttggcgacatgccgaacgctcaaaaggcagagtacgctgggcaactgctggatcgcatcgactctgatgacatgggtaaaggcctctatgctcaagtcctggcagatgccttagcggaaaacttggaggatttcgtggtgcccgaatacattcgtgcagccatcctctgggcttgtgaggcacagccagagggcgccgaatga

SEQ ID NO: 73455 - DNA, 1743 bp, Pseudomonas fluorescens LMG 5329
atgacgttccccaccgatgagcagcgggcttatataggcgcttcgctggaagagaatatctacctaaaggcttgtccgggaagcggcaaaactgaagtccttgccgccatggtgtgcaagtcgattcagaaatggcggcggtttccatccggaatcgctgtgttgaccttttccaatagcgcgactgatgagttgaaacttcggctcaccgaacatttgggagagccactggcacatccccattgcgtctctacgttcgacagcttccttctcacccatatcgtggcaaaaatagcgagtcagataacaggttatccggggagggatggtgactatcgcatccggctcatcgataagacagccaacatttttcgcacgaagaccaagatatgtgggaggacgatttcagcgtgcaaatatgactacgacctggacagtaagcgcttcgtgttcgctacaggagagctgacggatgtccagctcaatgctgcggagctgagtgctgagaccaagcaggatctggtcgataccaaaaagcggttttggaagggcgggttcgcaacctaccgggacatcgacatgattgccctcatggctttgagaggcactcagttcgaagaatatctcgccaaagtcgttcgccggttccctattacggtcgttgacgagtgccaggacctgtccgcggagcagttggacattgtcaggcaattagctaggcgaggaatgaagtttcattttgtgggtgacttgaatcagtctatatacgggttcagaaaatcaaatccagagcgcgtacggaaactgctggatgatctgcaattcactgagtacgaactaactgccaattggcgaagcggccaggcgattgtcgatctttgcagtgatctgctgaatgtcgcaaaaagtgctggcaacccaaacatcgagccattgaagccgaagctgattcagtatcagcagtgcccatcggagctaactcccctgatcatcgcccttgctcaaggctatcaagatgtggtgatcgttgctcgggggcacagcacactccaacgtttctcacgcggtggaaagttcagtgtgttggaagacttggctttgtcctgtgtatcgatcgagagccaaaacctagaggaggtgaggcgcgcactgaagtctttcgcaggatggttggctttcaagctgaatctcgaagtcactcccgcgagcctctattgtccgattgagatagagtccaagcttgcgtggcgccgatttgttttcaattgcctcaaatacctgagtgtttgtggggcatcagatattggtctgacttggaagcaatgggcagcactcgcgaaacgtgcgattcggcagatccctgaccaacctttcgcgttggaagctatcgctgcaaagcttacaggccttaaggaggtaagcttagtcgcaccagcgggtttggggtcccaagcgctatccgctcgactatccatggcgcatcagcaaccggcatcgacacgccgctacgccacgatccatcaggtgaagggtgagactcatgatgtgactgttgttgtctcgtcgctcaaatcgggttcccaatcgcattggaaggattggcttaaagatccgctttcagaagccgcgcgttttgcctacgtcgctagctccaggcctcgtcacctattgatttggggcgtgaaggtgctgaaacccaacgagaaacagcgaatggttgagctcgggtttgatatctgttga

SEQ ID NO: 73456 - DNA, 2091 bp, Cedecea davisae DSM 4568
atggacaatactgagggactcatgcgtattcagcaggttcaaatcaagaattttcgacttttagcagatgtagagctaatgctggaagaacagaccactgttatcgttggacgaaataatagtggaaaaacatctctgtcggagataatccgcaggtttttggcagatgggagctcagcctttcagctcgaagacttttccagtacctcttatgactgcttctgtgaggcgctggatgcactgaaccaaggggctgaagaaaatattattcgtcagcttatccccgccattgaacttcgattgaaattccaatatgaccctactcaacctcagttaggtcccttgagtcctttcgtgattgatttggatcccggatgcactgaggcactggctgtaattcgttatgagttgaaacatggtcaacttgcacagtttctagaaaatcagcctaataagccgctaacctatgaaacccgtatattattccttcgtacactacgggaacgaatacccaataatttcagcacaaaaatatgggccgaagatccaaacgatccagataatcgccgtgagttacaacctagcgcattacgaggcttagtcaaaactggatttatcaatgctcagcgaggacttgatgatgtaacatctcgagagtctgacgtgttggccaaaactgtagaaggacttttcgcaacagcttcttctgcatcagctgatacagcagataagcaaattgccgaggctctaaaagacacagttcaggacattcaagctcagattgatacgaactttggtggtcagctcaaaagcttgattcctgcgcttaaaacatttggataccccggtctgggagggcaagagcttcataccgaaaccctgttggatgtcggaaaattactgtctaacttcactaaagttcgttacgcgggttatggaggcgtagcattacctgaatcatataacggcttaggtgcgcgaaatctgatatttatccttttgcaattagcaggcttttataaggcatttcgcgcagaaaccaaagagccaggcgtgcacttgatcttcattgaggaacctgaagcgcatctacatcctcaaatgcaggaagtttttattcgccagctagctaaaatagcacagcagttggttgatggcactgaggataagaagccgtggcctgttcaattcgtcgtttcaacccactcatcgcatattgccaatgcagctggcttcgagaatattcgctactttctcggggctcctattacaggtgcacaacaaggtatacgcgaaaccaaaataaaagatctacgcaaagggctgaagcacatatcacccggagataagaagttccttcatcaatacatgacgttgacacgtagtgacttgtttttcgcagataaagcggttctcgtcgaaggactgagcgaacgtttgctgcttccagtcatcattgcaaaattagaagccgaagaaccggaatgtcctaagttgtccagccaatatgccaccatactggaaataggaggggcttacgctcacctgttcttcgagttgttgcagttccttgaacttcgcagcttaatcatcacagatctagatgccgtcgagaaacctggaggaaaaacttgcgcagtacacctcggaacatattccagtaacgcctgtttgaaggcatggttctccgcggatgcttctttcactttagctggactacttgccaagaaagactcggacaaaatacttaaaggaaatcgcattgcttatcaatgtgtagagaaagaagatggtccctgcggacggacatttgaagatgcatttattcttgcaaatccaaagttgtttggcttggtcaaagaggattcccaagaactagaaatcgaagcccgttgcaaggcggatgagtggaaaaagtctgaattcgcattgaagtatgcaattactgaaacggaatgggtgtctccgaaatacattaaagacggcgttcgctggctggctcgtgagaacgtggcagtaccagatccagaattggcattggctgtagaaacaatagccgacgcgttgaatggaggtgaggctaatgtctga

SEQ ID NO: 73457 - DNA, 1749 bp, Cedecea davisae DSM 4568
atggaggtgaggctaatgtctgagatccattcacctgccgaggttgcaagtcagcgtgctcttgaggccatgtacacttgtcttgctgagggacaaagctttcgtttagaagccggtgctggtgctggcaaaacatattcgctgatcaaagcaatcaagttcctaattgaaaataataaatcaatttttttgaaacatagcaagcaaattgcatgtatcacctttacaaacgttgcaaaggacgaaattgcaacgcgtacagatcggagtccgttggttttctgcgaaaccaatcacgcattctgttggtcgctcatttgtggcttccagaaatcgctccggatcctgatcgaaacgatgccagtttggaaagaaaagattcaggaggctggaggaactataggtaatcgtactatcgaatacagcctcggacatcggtcaatacgcgatcatagcgtgtccattcaccatgacgacgtactgcctctaacaatatcactcatggcccatgaaaagtttcgtcgcatgatcacggatagatttccgatcattttggttgatgaataccaggacacaaactatgagtgggttgaagcgctcaaggagcatttcctaggacaaccaagtgcacctttgtttggcttcttcggagaccattggcagaaaatttatggtggaggatgtgggaagcttgagcatccaagcgtgagagagatcggaaaagaagctaactttcggtctgttaagaaaatagttgatgcactcaatcgcatgaggccagagctgaagcaattcgttcaagaccctgagtctaagggtgaaatatgcatttttcatactaataactggcagggagtacgtcaaaaaggacctcactgggcaggcgatctacctttgactgatggacatgccactttggtacgcgttaagaccgcgctagaacttgacggttgggacttatcacccaagcacacgaagatcctcatgttgactcataaacttttggctaatcaacaaggctattctaatttggcggcagcttttcgatacaatgaatcattcaccaagaaggagcaggaacacattgctttctttgttgataaattagaaccagcctgtgatgctttctctaatcgtaagtatggaatgatgtttgaatccctagggggttctacacctcacttacggagtcattccgacaaagccagttggcacgatgcaatgtcacagttgcttgctatccagagtacaggaagtgttggcgaggtgatcgatcacttacataaagtgcgaaaaccaagacttcctgatgccatcgaaaagcacgaacttgagctccgtgagttcaacgaggctgctggtgttgagttgccacgaacgctggaagaattaaaaaatttccgaaatgttgcatattctgaagtgaaggcgcttcgcaattaccttgtaggttactcgccttttgaaacgcaacatggcgtcaaaggcgctgaatttgataatgtattgatcgtagttggacgtggctggaatcagtataacttcggtgagatgctggaacttgccagcgctaaagtagttcccccaccaaaagaagaagcatttgaacgtaaccgcaatttgttctatgtcgcctgctcaagaccacaaaagaggctttccatcttgttcacacagttcttgtcaccagaagcacttaatactcttgaaaattggttcggaatcgatgcgattaaaccagcaccatag

SEQ ID NO: 73458 - DNA, 1749 bp, Pseudomonas aeruginosa PGPR2
gtggacctggtgcttggcccagaacgcctcagtcgccgccccgtaatagacgagcacgatttctatgccgggacgtatgtagacccggtcaaaaaagaggtggttccgatccagatcgaggttattgtcgccggcctctccgatgagcagcagcggcatttccgcgaccacatcgaatggtgggatgcgcaggccaaaacgttacttgtgggggctcccccggaaaggacagacgcccctcacgttggtgcagcaatgcgcgtcttcttcaacggctggtatgacgtagaagaggatgacttctctggggatacctattacgccactcctgaaacaccggatggttcctacctgcgcttctctgcacccgacaagcgaaagtgcggttttctctatttgcgcaccctgcgaaccggcacccgtgcactcagcttggagcgaggctctttgttggacgtgatccttcgactgaaggagacacgactgacaatgtgggaggacctgctcgaccagctaagggcactgccagttggagagaccgaagacatcggcgagctgcttgccgcagtccaagatgccgtgcggcactacgtaccatccgactgggcagaagaccctcacatgcgtgtctcggatctcacccgagacacgctccgccgaacactgaccgtcttcatgggtacgggcgcaaagaggccggacggttccgtctactctgcgccatatcagcaccaaggcactggcacgattaacacgctggtgttggctctgctgtccatcatcgccgaactcaagcaaagtgtaatcttcgcgatggaagagccagagatcgcgcttccgccgcacacccagaagcgaatcatcaattctctgcgccagaagtcagcacaagccatcttcacctctcactcaccctacgtgctggaggagttcgagcctgcccaggtggtggttctcaagcgagtggccggtgtcatgaccggaatccctgctacatacccaccatcagtcaagcccaaggcttatcgcaccgaatttagaactcgattctgcgaagccctactggcccgttatgtactcgttcttgagggtcgtacggagtacgacgcattggctgccgccgcccgccggcttggcgagttggatcccacacgattcaaatcactcgaaaaccttggggtagccatcgtcgacgctcgcggggagaccaatgtcgctccgctgggtgcattcttccggtcactcggtaagaccgtgtttgcggtgttcgacaagcaatcgccggaggcactcgcagccatcaaggcctcagtcgatcatccttacgagtctgcgagcgcaggcttcgaagacctggtgctgcagggcgcatctgaggccgcactccgcagctatgccgctgctgtagttgccggaggcgattggccgcagcatctcgcggcatggacaccagcagccgcaacgccgttggctgatctgcaggctgctctgtcgagttatttcagctgggctaagggtggtggcgacgccggcgacttgctcgcctcctgtcaaaccgccgacgacatgcctgaatacgtgagaaccacgttggcagccatcaagaacgtcattgagccaccacggctgcctccattacctccccaggcagccggcatgccccttctcccagaaactgcagccaagccggcaccattggcagccgcctatggaaggtttcaaccgtccccgccccagccttcgacatga

SEQ ID NO: 73459 - DNA, 1287 bp, Pseudomonas aeruginosa PGPR2
atgactgaagtgtggagcgatcagaagcgcggcttcctggcgtgcaccgggcacgccctagcgctgggtggtcctggtggaggcaaaacacacgtcgcgctggtgaaggctcgcgatgagattcgctcaggagtactcaagccaggccagaagattctcttcttgagcttcgccaggcctaccgtagcgcgcatcatcgaaaaggcttctgagctgatttctcgtgaggacctgaagcaactggaggttagtacgtaccacggttttgcatggagcattctccggagccatgcctatttgctgaatggcaggcgaagcctgcagctcctgccaccgccagaagcagcagcgcatttgactgatatcgataaggcccaacacgaaaatgagaagcggcgccttttcgagcaggaaggccgtctgcatttcgatttgttcgcaagcttggtcagcgacctgcttcgtcgaagtgatcggctaaacaccatcttctccgacacctatcccataatcatcctcgacgagtttcaggacacaaacagtgatgaatgggcgctgattcagcagcttggaagacgcagtcgcctcattgcactggcagaccccgaacagcgaatctacgagtttcgaggcgctgaccccaggcgggtgggcgactttctggagagcttcagcgccgctcacttcgatttcgccggtgaaaaccatcgcagcggcggtaccgatatcgcaacctatgggaacgaccttctcaccggggcgaacaagggcaggacctatcaacaggtcaaaatcattcgctacggcttcttatatggaaagagctcgcacttcagcgccaagaccgcagtttactcggcattggaacggctcaagaaagtaccggacaagtcgatcgcggttctggtgccatccaaacggctaatgcttgagctttctgactatttctcatccacgtctgatggtctgccggagctatatcacgacgttgcaatggatgcagagccgccggctctagccgctggcgttatcgccacgctactggagggaggtacggctagcgatgtggcaagccgcatgctcggcgcacttcactcgcacattcgcggacggcgcggaggcaagcctacacctcagacggagcttgacctggcaggactcgcgttcccccgcatattcgcggacggcgcggaggtaagctcacacctcagacggagcttgacctggcaggtgttcttagcggtttcctttccacaggaaagatccgcagtgccaagcgccagttga

SEQ ID NO: 73460 - DNA, 2067 bp, Treponema denticola SP32; identical to SEQ ID NO: 73086

SEQ ID NO: 73461 - DNA, 1905 bp, Treponema denticola SP32; identical to SEQ ID NO: 73087

SEQ ID NO: 73462 - DNA, 2100 bp, Acinetobacter gyllenbergii CIP 110306; identical to SEQ ID NO: 73260

SEQ ID NO: 73463 - DNA, 1734 bp, Acinetobacter gyllenbergii CIP 110306; identical to SEQ ID NO: 73261

SEQ ID NO: 73464 - DNA, 1698 bp, Acinetobacter rudis CIP 110305
atgtatatcaataaggtgaaaataaataactaccgcagttttcgttcttttgaagcacaacttcagaaattaacaattgttgttggagagaacgatacaggtaagacaaacttttttactgcactatcattaccgcttggtggaaatcagataggtttcaatcaaaagaggttaagcatttctgatattaacaaagattccgttatcgatttcttcacgtcaataatcactaatgaagccaaagaaaatcagctacagaagatccctaaagtatctgtaactatagaattcactgatcccaaggacagttatgaggttgcgttactagctaaatggcttgttgccgatggagataaagaaacttatcaaattaggtatgactttaagcctaaagatgacttagatttacttgaagtagttaaggctactcttacgggtaaaaccatcgaagaagtgaactggtttactctccccattgagctttacgactaccaaattgtttcagtgaataatggaaaaactataagttttagtgacttaaaaaatgtgagtatccataacatcaatgctgaacgagatgacttctctgaaagtagctcaatgaaatctaatagcatcttcacaaaactgctgatgaatacgcttggtgatgaagataaaagtaagattaacacggcttattctgaattctttactgctattgaagacacacaaacattcgaaaaggtcattgggactaattcagaatttgataattacgatgacattatcaaaaaattagaatgcatccctaacttaccgaatttaaaaaatattttatctaatattacgctaagatacggtaatgaatttctgtatcagaaaggtttaggtcaacgaaatttaatttatattctcattctatttgcttactataagtcgtgtggtagaacatttaatttatgctgtattgaagagccggaggcgcacctaagtgttaataatctacgcttagtgagggatttcatcgagaaaagttctactaatagcagctcgcttgtacagactattatttctactcataatccgacgatcattaataagttgaatctttcgaatgttttggcattcactggtgaaaaagcaattagcctgtcagatgctccacctaagttagttgactacctaagaaaaagacctaatttcgatatactaaaactgttattcgccaacaaggttattttggtcgaaggtacgaccgaagagatgttaattactacatttttatcaaaaaaagaaaatcttcaagacatagaaattatagctattggccaacgcggctatacaaatttcctagatatatggcttatgttaaataaagataatcctaataaaaaaattggtgtgattcgtgactatgataattctgaaccagcaaaagcaaagcatgatatttacgatgcagataatgcaaatattagtgtcagaacaactaaaaattatactttagagattgatttagttgaaactgaaggaaatctaagcctattaaatacattgttcagaatgtctggtgatataaagtcagtctcagatcatatgattggtggtaaagcgtcacggatgttagatgtatgtgatgcgatggtcgaagaaaaaaatccgctagacattaaactgccagcgcatattgccgaagttattgaggctgtatcatga

SEQ ID NO: 73465 - DNA, 1374 bp, Acinetobacter rudis CIP 110305
atgattgaaattcaaattgcaggggccggagctgggaaaacttatgggttagcagagactctaataggtcatattaaagcctgtacaactcataaaaagacatttgctttgacgtataccaattcagccacagcaaagatcgagcaagagataatcaagcaatatgggtttatcccgcaaaacctttatatacagacagtacatagtttcttacttaatgaaattgtgtatccattctcgtcatttacgcttgacgatgtatacaacgattcatcaattatgcacgttgggaattctaaatataaaaataggcttttcaagacgctaagagaaaaaaaaatcattcacgcagaaaatgtctacaatatttctaaacagattgttgatgagatgataagtaggcacagtagtaaactcaaaaaagccaaggtaaagcgacttctggcaattctggaaaattgttttgaaaaaatatttatagatgaagttcaggatcttgatgacgatgctcttcgattcttcgaagtattaggaagcaatggaattgatgtgtatatgataggtgacccaaaacaagcaataaagtatccaaaagcttttgataattttgttgataaagtatctgcaaaagaatacgtcaatatacttgagatcaataaccaaactacacgtgtacctagagagattcttgctatctctaatagcttttgctacgaaggacaacagcaagaatcactatccgatgttgttggcgagttaatgtatatagaatctactgatgctaaatatgatgatttgcttagtagttatataagtgcgaagcaaattgtttgtattgataagaaagtaggaagatattcaacctcttccaaacataagcattcatttcctcaagaaattgaagaaatgattcgtgagtctaagcataagaaagataaagtattattcgccaaagctgctttttctgatttctttaatgatgtagagatgtatggagcaaagatagcaataaataatcttagaactaagcatttattaacgtttgagaacaagcattatgctcaactatacgaactatgcagtgtatttacagaaaataatgttcaatttatagtgcaaagtattgattctgttaaaggattagatgcaaatacatgtgtaattataactagtcctaatttactaaaatatttaactaaaaacggtatcaaggaaggtgattattttaataaagagtggaaaaaagtctatgttgctctgactcgagccaagcatcgattagtacttgccttagaccatgacttacttttagcttcagatatagaagcggtaagaagttccattagcgaactaggttttgtctatcaccactga

SEQ ID NO: 73466 - DNA, 1851 bp, Acinetobacter rudis CIP 110305
atgaaaattgataaagtgattttgaaaggctttagaaattatcaagatgcaacaataaattttaataataacactttaattattggtgaaaatgatattggtaaaaccaatctcatttatgcattacgcttaatgttagacagaagcctttctgaaatggatatagagccatcagagttagattttcatgtaaatgatggtgttcagtctgaagtgttggaaattataattaaatttgtagatatcaaagaagaagctgcattatccattttgaaggagcatgtaagcgatgatggagtatgtatttttaagtatactgcttctaaagaaaatctagattacaaattatatcttggccaaagtgagagtgacttatctgaaattcaaagtcgttattacttaaagtatataaatttaaagtatatttcttctcaacgggatttaagtaagtttatttctaaagagaaaaaacaattgcttaagatttctaaaacaaaaattactgaagagcaagaaaaacttgatcgagataacctaataacaatttctaagcaattggttgagctcgatgataaagttgcgcaactagagtatgtaaaaactgctactcaggaagtcaatttagaattaaaaaaattagcatatgcccacgatgactatgacgtaaaattaaatgcgagtgggatagaagtagctgattttattaataaactacaattaggtgcgataagtggtggctcaaatgttatgttgggaggtgatgggcgtaataatcaaattttgattgccttatggaaggcattaagcgtatttgaacatgattcaaatgatgaagttgttttttacgttattgaagagccagaggctcatttacacccacatcaacaaagaaaactagctagttatttatcttcagaattacctagtcaatgtttaataacaacacattctccgcaaatagcttcaagtttttcgccaagttctattattagattacttaagaaaggaggaattacaattgcggctaataatggttgtactagagaattagaaaaagcatggaaagaattaggttacagaatgagcattattcctgcagaagcattcttttcaagtggtgtctttttagtggagggaccgtctgaagaaattctatataaagaactattattaaaaaataaagttgatattgattactataatttatcagtttttgcagttggaggaatacaatttaaagtattttcagctgttttaagagctctagaaataccttttgcattaagaactgataatgatatcaagactatagaaatgaattgcaatttttctagttttactagaattaatgttttaaacccttgttatgtatataaaaggattgaagttaattataaagataaaaaatgtaaaaaatggcagtatttgggagttaatcgatgctatggaatattaaataaagattctgagaagtggaaccatagcctatatcctttagatagggctaagatcttaggtgataaaagatggaacccttttgaaaaaatgattaattctaaaggcatatttatgtcagatagagatttagaattggacttagtcggtgtcgcttcagaagaaattaaaaaagctttgggtaaaacaacggatactagttcggttgaatttcttaaaactagtaaggcactaaatatgcaggtattaatggcaaaaatagaagatgaaggatttaagaaaatttatgaaagttcttttggtgagcctataaagtatttaataaagttattatcaaataatactatgccagtgattgagtcaatctctttagttaaagaagaagccttaacatga

SEQ ID NO: 73467 - DNA, 1611 bp, Acinetobacter rudis CIP 110305
atgaaacttactgatgatcaaataaaagcaatccaagatgtagaaaataactcagtaattatggcatgtccagggagtgggaagaccactgttcttattcataaaatgagtttatgttgtgaaaagttaaaaagccataatggagtaataggtttgtcttttactagaaaatctagtgcagaattaagaaaaaaattccaaaaaaagatactaagctccaatctcaattatctaggtactatagatagttttttcattaatgaagtaattagaccatttttgccaaagctatgggattgtgatcatgacgatattgagatcgtaaatgttttattggaagaagaagaaattccatttattcaagaatattcgaatagagaaatatgtttaacagatatagaaagtgatagtgcttttaaggggttatttctaagcggaaaaatatggcaaagaacagtaacgcctttagctttatttgtacttagaaattcatcaatatgtagaagatatatatcatctagatataaatacttgtttgtcgatgaatatcaagacacatcattagctcaacatttagtttttttagaattattggaattaggattaaaatttacagcagtaggagatattgatcaatcaatttataggtggcgagatgctgttcctgagaatatggaatcattagtgagtgaacatgattttaaggaatatacaatcgataaaaatcatagatgtgatctatctattgatttgtatgcgagagtttttttaaaagatataaatgagagtgagatcactgataaaaatatttttagattacatattaataatttaggaagaagtcgatacgccaagttggataattttatacaaaaaattaaagatgataataaatttgaattatcagattttgtaatattagcagctaacaattcaacagttcagcattatgctaagaatactatccataattatagaatttacgaagatgatccattagacagtatgaatcactatattgcacaattatgttctgacttgcttctatataaatatagtaaaaattactctagttattcaatatatgaaagttataaaaataggtttataaattttaaattagataattttaagtcagaagctaaagaaataaagcttgaaaatgatattgatgaaatttgtaaaataattgaaaatataattattaaaactagttatagaggaaattacgaaaattttattctagcaacaaagaatatccttaataaccctcatttacttaaaaaataccagccaagcaataagaatgaattgcaaataatgacaattcataaagcaaagggcttagaatttaaagtagtcatacacattggtttagaagagtgggtattgcctcgaagaacaataaaaaatggtaagtgctactttcaagattttgaaggagataaaaacttacattatgttgcaattacgagagctgaaaaattttgttatttagtggatatgcctattagagtaaatgcacggttcagagaaatagaagcgattaaatctgaattcttatgtattgaaagtttaaataagcatattgtgaatttaggagttatatag

SEQ ID NO: 73468 - DNA, 2100 bp, Acinetobacter baumannii NIPH 410; identical to SEQ ID NO: 73278

SEQ ID NO: 73469 - DNA, 1734 bp, Acinetobacter baumannii NIPH 410; identical to SEQ ID NO: 73279

SEQ ID NO: 73470 - DNA, 2100 bp, Acinetobacter gyllenbergii MTCC 11365; identical to SEQ ID NO: 73260

SEQ ID NO: 73471 - DNA, 1734 bp, Acinetobacter gyllenbergii MTCC 11365; identical to SEQ ID NO: 73261

SEQ ID NO: 73472 - DNA, 2085 bp, Streptomyces afghaniensis 772
gtgccgcctcgcctcaccaaggcggtcatccgcaacttccggctgctccgcagaaccgagctttccttcacggacaaggtgacactgtgcgtcggccgcaacaacacgggaaagacctcgctggcgaaactgttcgaattcttcgtggcgaggaagaaggccgcgctgcgcatcgaggacttctccgccgactgctacgaggagttcctcgccgcccatcgcctcttcgcctcgggtgaggcggagcaggcgcgcgacacggttccggcagtcaccctcaccctccacatctcctacgacaaggactgcggccagtacggacccctggcccccttcgtggtggacctcgaccccgactgctccgaggtggtgatcaggttcgccttcgcgttgggggacggtgccctgaaggagttcttcggcggcgtgccggtggggccggatgccacggccacgcttgagcagctgggcagaggcatcccgaagcacttcgagatgtcggtgatggcggtcgacccgaccgatgaggcgaacgtccgaccggtcgacctcgcggacgtgcgcgccctggtgaaggtcgacttcgtcgaggcgcagcgagggctggacgacgagagcgacgggcatgccgcaccaatcggagcggtcttcgagcaacttctgaccgcagcggagaagagccagaacgcgacgtggctggaggagctcgccgcgaacatcgacagaacactcgtggacacctccggcagtctcgacagcagcctccagaaggtccgcgaacgggtggcgccgacgttgaaggcattcggctatccgggtctggccaaccaggagttcgtcacggccgcccggctggactccaagaggctgctcaggaacttcgcgcgcattcactatccgggagtggccggtgtgcggttcccggagtcgtacaacggcctgggtacgcggaacttggtgatgattctgctcaggctcttcacctgctaccgcgaccacacggcgacctctccggagtcggggatccatctcgtcttcctggaggaaccggaggcccatctgcatccgcagatgcaggaggcgttcatccagcgactcacgtactccgtcaatctgttcccccggatcgacgctcagatgagagcgacgatgcccgggcaaaagggagcggtcgaggagagcagcaccgcaatcgacagcagcccccggtggaacgctcagttcgtggtgaccacccactcggcacacgtggccaaccggggacacttctccgacatccggtacttccggaaggaggaggacaccgtggagagcggaagcgagccggggccggcccgcaccgtcatcaaggacctgtcccaggtgaccggcgacgagaggttcctccgcaagtacctgaccctcacccgggccgacctctacttcgcggacaaggccatcctcgtcgagggcgccagcgagcgtatcttcgtcccggctgccgaggagaagctggcggcgaggaggcccggagagacgccccagcaccagtacgtgaccttgatggaggtcggcggggcgcacgcccacaggttctatccgctgctgaaggtcctcgggatcccagccctgatcatcacggatcttgatcccgtcgacgaccatgagcccaagatccgcaaatgcctggtgtccgaatccggacgcacgtccaaccagtccatcagggcgtggtcccccgagatggccgacatcacggtggccgagctgctgcagcgggccgagacggacccgccgatcgccggcggcagcatgtgcctcgcctaccaggtgccggaggagcccggcggtccgtgcggccgcactttcgaggacgccttcgcgctggccaaccgggccctgttcggtatccccacgggtgccgctcccgccgaggaactggaacaacaggcccgtagcagcgtggagaccaggcgcagcaaggtcgacttcgccctcgaccacgtcctcggagaccacgactggcaggtcccgaagtacatcaggcgcggcctcgagtggctcatggcacaggacgggacggcgacgaaggcggacgtccagtga

SEQ ID NO: 73473 - DNA, 1815 bp, Streptomyces afghaniensis 772
gtgacgaccgaggcggaagacgtcacgcacacgatcctgacggctctccaggcgggccgtcacttcaaggtggaggccggtgccggtgcgggcaagaccagctcactgatcggggcgctccagagcatcctggctgaccgcccccgctacctcccgcggccccaccagcgcatcgcctgcgtcacctacaccaatgtggcccgcgacgagatcatcagccgtaccgaccgcagcccgtatgtgttcgccgaaaccatccatggtttcctgtggcagctgctctcccctttccgcaagcacctgttgcgccacatcgtcgagctggacatcatgctgtcgaagatggagggccacacctcactggacggctacaccgtcgagtacagcaccggcttccagaaagtggaccacgacagtcgtcgggtgcagctgggtcacaacgatctgcccgtcctcgcgagggcgtttttcgcccttcccaagttccgggccctggctgccgaccggttcccgatcgtcttcgtggacgagtaccaggacacccccgccggtctggcggaggccatgctgggcacgccgggcgatgaggccaccgcgcgcggccccctctgcggcttcttcggggaccattggcagcagatctacgacaacgcgtgcggggcactcgaggacgtccgcccgacaccgatcttcagacggcgcaatcggcgctcgcagcgggccgtcgtgaacctcctgaacacgatgcgtcccgaactgacgcagaccacggcgtcaggagttggcgagggcaccgtcgccgtctatcacaccaacgaatgggccgggacgaggctcacccaccaccggaagggtcagctcggctgggacgcggcccacgcggcccggaaatgggtactggacgacgtctgcgaccggttatggagcaccggggcatccggtcacgatgcccaggcgcgggcggaggagcccggcacgaagatcctcatgctcacgcacgagacgatcgccggcgaactgggatatcagaagctccacggggcctttcggcgcaacgattcctacgtgaggaaggaggaccacgccatggccttcttcatggacacgctggaaccggccctgctccaccaccggaacaagcgctacggcgcgatgttcgacgcactcgacccccgtggccgcccacccatcaactcgtcggccgacaaacaggaatggatggcgttcctgacgaaactgggggaggcccgcaagacgggcacggtcggcgacgtcctcgacctctgtcttgagcagcagctcttcgacggcctggggaaggtgcgcgagcgtcaccggaaggccgtgtcaccatcgggcaccgacccgcaggctgtgagtgacgacaaggccgaagcccgggcggcggcgcggtcgaaggagtaccaacaactgcgccaggtgccgtacgcggagttgctggcgttgaacgagcacctcggcggcggcacgcccttcgccacacaacacggagtcaagggactggagttcaaccgggtcctcgccgtggtcagcaagggacactcccgcttccagatccccgagatgctggctaacttctcccggcgcgacgaactgacggacaaggaactggaggcgttcatcagggcacgcaacctcttctacgtggcatgctcacgagccagagagcacctggccatcctcttcaccacgaaacttgagcccgctgcactggacaccctccgggagtgggtcggcgagtcgcggatcacgcaactgcggttcgacggggatacggtggtgggtggcgaatga

SEQ ID NO: 73474 - DNA, 2139 bp, Pseudomonas sp. CF149
atgcacatttccaaaatgactttggtgaactaccgaaacttcagcaacacaacgctaaagtttcagcggggcgtcaacaccatcatcggcgaaaatggctcaggtaagtccaatatcctgcgcgcaatccgtctactattggatgacaccatggtgcgtgcagcctatcgactggaggagtccgacttctgccgatcgctcggtgaatggcgaggtcactggatcattatcagtgttgagtttgaacagatcagcgccgacgaagccgttcaggcgctatttcttcacggcaccgctgcgctagaagaaggaccgctagcgaaggcaacctataacctcatcttccgtccgaaaaaggagatccggctcaagctggctgctctagatatttttgatgatgaggtgctcgcggaaatacgcagtaccatcacgatcgatgactacgaaactgtgttcacgggaagaagcagcgccgacttcagcgacccttccgtctaccagtcgattgtgggtaatttcgaaacgtgtactttcagtgctgaaactgaattccctcagatcggggctaaagtacctggattcctctcggttacgaaagaagtgtcactgaccttcatacaagccctccgggacgtcgttgccgagtttcacaacaaccgaacgaacccgttgtttgcgctactcaagagtaagagtggggagatagatccagtgtcgatgcttcctataacccaaatggtcagagacctgaatgcctctatcgaaggactcgaagatgtgcagtcggttcgtaaccacattcgcgaaacgatcaaagatgcggccggagaaacctactcgcctgcttcgctttcgattaaatctgacctaccagatgaggcagaaaaattatttcagtccctgcgcctttttgtaggcgaggccgatgatgggtatgagggtggtattcacgagctgagcttgggcggagcaaacctcatctacctgacgctgaagcttcttgagttcaagtatcagcgtgagaagcttgccattgccaactttctactgatcgaggagcccgaagcgcacattcacacccatatccagaagactctgttcgaccgtatttcctacagcgatgcccagattatctacacaacgcattcgacccacatctccgaagtgagcaatgtcactaacgtcaacattctggggcggcaaggctcatattgcgaggcttaccaacccgctacggggcttgagccatcagaggtgagaagcatccagagatatctggatgctgtccgcagtaatttgctcttcgctaaaagcgtactactcgttgaaggcgatgcggaggagatactgatcccgatattggtgaaaaaggtgcttgggctgagcgttgatgagttgggtattagtgtcatcaacatacgcagcacggggttcaaaaacgtcgcagtcctttttcacgacctccgaatccgcaagcgctgtgcgatagttactgaccttgataccaccttctttgatgtgacgccgcagcccactgatcatgagtttctggcaagcaagaaacgcaaggcgataggttcccaaaaagctggcgtcgaacgcaaggttggtctcgatgcctttgtcgctggaaacccttggatctcggccttctatgcaccacacacctttgaagttgacctcgtatcagcgggcaacgaagaggcgttcgctcgagcagcgagcaaggtctatatagcgccgcacactatcaaagaggcggtggaagcccttcgatcgggtcaacctcacctagtaggttttcgtgcgctgttgatggctgagtatgaggggaaaggctggtttgcaatcatgctcgccgaagagctggaccatcaggtagcgatccctccctacatcttgcaggcccttcaattcgcgcatgggcacatgtcccctctgctgctcgccagaatcctacagtatcgagttgcccgccaaatccatgccgatccttcagcacagccacgactaacactcctgaggggtgaggttgagcgtttccaacgcggcgaaatcgatctggttttcctaaaagctgctgtcgccctcgcgctaccaggcgatgccattaattcgttcatggttggcattgcctga

SEQ ID NO: 73475 - DNA, 1785 bp, Pseudomonas sp. CF149
atgttcgcctgggattcccgtgaattgaacgccgagcagtctgccgcaatcgaggagccttcgagcgtattcctcatcgcatgccctgggagcggaaaaacgcggacgttgacctataagatcgcttatgagctttcgcgggccacggacaagcggattgtcgtggcgattacttatacgcaccgcgcagcagatgaaattcaggagcgcattgaaggtctcggtgttgacacgtcaaagctgtggatcgggaccattcactcattttgcctcgagtggatcattaagccatatggcatctaccttccagagctttcccgcggctatcgagtcctagacagacacgaccgcgaactcatgctcgataggctatgcgcgccctacccaaagatcacgcactgggattgcgattattacttcagcaaaacgggctatcacctaggatgcaaagatgcttggaagcatgaaacgctacataaaattcttggtgagtattttcgcgagctcggcgaagcgcgtcagatcgatttcgagctgatcctttggtatgcgcaggtcctgatgagtgatcaaaagcatattgcatcaattctcgcttcggtcttctcatatgttctggtagacgagtatcaggacacgaaacaaattcaatatggccttcttaccgctattttgcgtgccggagcggggcgaacgaagaccttcatcgtaggcgatccaaaccaagctatctacggctcgcttggtggctacgcagttccggtggctgattttcgtgccgaagctggaatcccgataagagaaatggcgcttacccggaattaccgttcgagtaataggatcatttcccacttctcgaatttcagcgtttatccgacatcaatcgagagcgcgggatcggatgcgtcgtttccaagcaaggtttcgtacaaccagcacgtaacactcaccaatttgcatgacgagctagtacgactgatccaagcaagccttgctgccgggcatcctcctgaggagatctgcgtgctcgccccatggtggattttattggcatcgacgacgcggcatctagtaaggatgcttccggatcagcagtttgacggccctggtctagtcccctttagtaacgatatagacaacttctggttcaaggtttcgaaaatcatcctgactgagtcatcgccgaagatgcttgttcgtcgcatgcgatgggccagagatgtgatcagcgacctgggtgatttgggcgttgatacatcgcgcctgacacagcggctcctattgagggaatgcaactcaatttcaatctccgaaatggatgggattgcctaccttgaccaagccttcaccgcgctgcttgaacgactcggggtagcccttcatagcttccccgcattaatggagcaccgcgatgcgttctttcgcagctcactatctcggatcgacaggctccaaaaggacggggccccgtacatcaacgatatctctttcttcaggaaggtatttcgcgagcggactggtatcaccgtttcgacgatccacggggtaaaaggtgccgagtacgatgtggtcatcgcgttcggccttcttcaggggatggtgcctcatttcaccgaggcagcaagcctggatgccgcgaacaagctcctctacgtcgtaggttcccgtgcccgcaagaatctacatttgatttctgagagcggacgcccccaagggcactatgggcactatgcggctacagaggcactgttcacatgtgtctttgactacgacgcagccgagtag

SEQ ID NO: 73476 - DNA, 2139 bp, Pseudomonas sp. CFT9
atgcatatttccaaaatgactttggtgaactaccgaaatttcagcaatacaacgctgaaatttcagcggggcgtcaacaccatcatcggcgagaatggatcaggtaagtccaatatcctacgcgcaatccgtctattactggatgacaccatggtgcgtgccgcctatcgactggaggaatcggacttctgccgatcgctcggcgaatggcgaggtcactggatcgtcatcagtgttgagttcgaagatatcagcgccgacgaagccgtgcaggcattatttcttcatggcacggctgcgctcgaaggaggaccgctggcgaaggccacttataacctcatcttccgtccaaaaaaggagatccggctcaagctggctgctctcgatgtttttgatgatgagcagcttaagaaaataagaaatgccatcactattgacgactacgaaactgtgttcacaggaagaagcagcgccgatttcagcgacccttccgtctaccaatcgatcgtgggtgattttgaaacgtgtattttcagtgccgagactgagtttcctgagatcggagctaaagtccccggatttctctcggttacgaaagaagtgtcactgaccttcatccaagccctccgggatgtcgtggccgagtttcacaacaaccgaacgaacccgttgttttcgcttctcaagagcaagagtggcgagatcgatccagtgtcgatgcttcccataaccgatatggtcagggatctgaatgcctctatcgaaggtcttgaagacgtgcagtcggttcgtaaccacattcgggaaacgatcaaggatgcggccggggaaacctactcgcccgcttcgctttcgatcaaatctgacctaccagatgaagcggaaaaattatttcagtcgctgcgcctctttgtaggcgaggccgatgacgggtatgagggggggatccatgagctgagcttgggcggagcaaacctcatttatctgactctgaagcttctagagtttaagtatcagcgcgagaaacttgccattgccaattttctgctgatcgaggagcccgaagcacacatccacactcatatccaaaagaccttgttcgaccgtatttcttacaacgacgctcaggtcatctacacgacacattcgacccacatctctgaagtgagcaatgtgagcaatgtcaacattcttggaaggcaaggtccatattgcgaggcctatcagcccgctacggggcttaagccatccgaggtgagaagtatccagcgatacctggacgctgtgcgtagcaatttactctttgctaaaagtgtggtgctcgttgaaggcgatgcggaggagatactgatccccatcctggtaaagaagttgctagggctgagcgttgatgagctaggtattagcgtcattaacatacgcagcacgggattcaaaaacgtcgcagtcctttttaacgacctccgtatccgcaagcgctgcgcgatcgtcactgaccttgacactaccttcttcgatgtaacgccccaggtaacggactctgaagctcttgccaagaggaagcgcaaagcaataggttcgcaaaaggctggcggcgaacgtaaggtcgacctcgacgcctttattgcaggaaattcttggctctctgtcttctatgctcgacgcacttttgaagttgaactcgcgtttgcgggcaatcgggaggcgcttatccaaactgtaagcagtgtctataaatcgccggagactatcaccgaagcagtggatgccctacgatcaacccaaccccatcttgtgagctttcgggcgttactaatggccgaatatgctgggaaaggttggtttgcgatcatgctcgccgaagagctggatcatcaggtagcggtccctccctacatcctgcaggccatccactttgcacatggacatgtatcggccccgctgcttgccaggattctacagtatcgcgttgcccgccaaatagaagtcgatccttcaactcagccctgtctagcgctgtttttggttgagattgaccgctatcaacgaggggatattgatctggtgggactcaaagctgcggtagccctggcgttgccgaacgacgccattggttcgttcatagcgggcattgcctga

SEQ ID NO: 73477 - DNA, 1785 bp, Pseudomonas sp. CFT9
atgttcgcttgggatccccgtgagttaaacgccgagcagtcagccgcagtggaggagccttcaagcgtattcctcatcgcatgccctggtagcggaaagacacggacgttgacctataagattgcttatgagctttcgcggagcatggacaagcggattgtcgtggcgattacttatacgcaccgcgcagcagatgaaatccaggagcgcatagaagatctcggtgttgatacttcaaagctgtggatcgggaccatccactcattttgcctcgagtggattattaagccttatggcatctaccttccagagctttgccgcggatatcgagtcctagacaagcacgaccgtgaactcatgcttgatcggctatgtgcgccctacgcaaagatcacccactgggattgcgattactactttagcgaaacaggctatcacctaggctgcaaagatgtttggaagcatgagacgcttcataaaattcttagcgagtattttcgcgaactctcagaagcgcgtcagctcgatttcgagctgatcctttggtatgcgcagatcttaatacgtgatcaaaagcatattgcaccgattctagcttcggtcttctcatatctcctagtagacgagtatcaggacacgaagcaaattcagtatggtcttcttaccgctatcttgcgtgccggagcagggcgaacaaagaccttcatcgtaggtgatccgaaccaagctatctacggctcgctcggtggctacgcaatttcggtggctgactttcgtgcacaagtcggcatcccgataagagaaatggcgcttacccgaaattaccgttcgagcgagaggatcatttcccatttttcgaatttcaacgttcatccgacatcaatcgagagcgcaggatcgaatgcgtcgtttccgagcaaggtttcgtacaaccagcacgtaacactccccaatttgcatgacgagctagtacgactgatccaggcaagccttgctgcagggcatcatcctgaggagatctgcgtgctcgccccatggtggattttattggcatcgacgacgcgtcaattagtaaggatgcttccggatcagcaatttgacggccctggtctagtcccctttagcaacgatatagacaatttctggttcaaagtttcgaaaatcatcctaactgagtcatcgccgaagatgcttgttcgtcgcatgcgatgggcaagggatgtgatcagcgatctgggtgatcttggcgttgatacatcgcgtctgacgcagcggctcctattgagggaatgtaactcaatttcaatctccgagacggatgggattgcctaccttgaccaagccttcaccgcgctgcttgaacgaatcggtttagccctgaatagtttccccgcattgctggagcaccgcgatgcgttctttcgcagctcacaatctcggatcgacaggctccaaaaggacggagccccatacatcaacgacatctctttcttcagaaaggtatttcgcgagcggactggtatcaccgtttcgacgatccacggggtaaagggggctgagtacgatgtggtcatcgcgttcggccttcttcaggggatggtgcctcatttcaccgaggcagcaagcttggatgccgcgaacaagctgctatacgtcgtaggttcccgtgcccgcaagcatctacatctgatttctgagagcgggcgtccacaaggccgctatggacactatgtagctacagaggcgctgttcgcatgtccctttgactatgacgcacccgagtag

SEQ ID NO: 73478 - DNA, 1788 bp, Pseudomonas stutzeri B1SMN1; identical to SEQ ID NO: 72168

SEQ ID NO: 73479 - DNA, 1338 bp, Pseudomonas stutzeri B1SMN1
gtgctcaatcgaaatagcgtcgcttggcgtagcgaggaggaactcgctgcctgggccgagacctacgaggccgctctgcgcgacgaggggctgattgactacgatgacatggttgtcttcggccaacgtttgatcgccgagcacgactgggtactacctctggttcaggcaaaattccccgtgctcgcggtggatgagtaccaggatttaggtgtagcactgcatcgcatcgtcaaacgccttgccttcgacgggggtgtccgacttttcgctgtcggggatgcggatcagtcgatatatggatttacgggggctgatggcgcgttgctcatggaattggcggctcgcagagacattgagcctgtccagcttcaattaaattaccgttctggtgcagggatcgtgactgcgtcagagatggcgcttggagaagcccgaggctatcaagcgagcgatcctgcgcgacaaacgaccatcgaatttgtcctgcgcccgggtggtacggcggaccaggctgcgcacgccgtcgcgcagatcattccggcggccttagcctccaagccgggacgaacactgggcgatatcgcgatcctatacaaagactatcgcgcaggcgatatcgtggctaaagctgtggcaaccggcggtctcgattacatccgtgtggataccgcagcaccttaccgcaaggttgccctaacaagttgggtagaagattgtgcggcgtggtgcgcgggtggctggcgtgttggacgcccacaattgcgtggactactcgaccgctatcgcgcatttcatcgggcgagcttggacgattcacaggccaagcgcgaagagcaagagctaaccgccttgctatgggagctgcgcgctgaccagcaacctgcgcgagaatttgttgcttcgttgcgcaacggtgtagtggatcatctgctggcggctgaattggcgctcgctgatcagaaagagcaactggatcgcatgacggcagcgctcgccgaaggcggtgcactggcttcgctagacatcactagtttgggcggtcgggacggttcgcccgatcacctgaatctgctgacactgcattccgcaaagggctgtgagtacgacgtcgtcatcatggttggactcgacctcggaaatctgccgtggcgcaatgaaactccagagaagttgcgcgaaagtcgccggctcttctatgtgggactcacacgtgctcgcgacgaggtccacatgctgtattcgggcttcgttgatggccgctatggccctatgcgctttgggcgctcgccattccttgatgagctggaggcgcgaatgcgtgccgctggcatttga

SEQ ID NO: 73480 - DNA, 1002 bp, Pseudomonas syringae pv. actinidiae ICMP 19073
ttgaggtgtccggggtcattagaccagctcaaccctcagttgcagcttcgccttttgcggcatttgaaaaccgtggctgaggatcgcgggatacaggtgatcatcaccacccactcgaccgtaatctcagccgccgtttccctggatcaccttatccatatttccaatgatggaaggcctaccgcggtacccctgagactgtgcgggctcccccttcagagtcgccgtttcgtggatcgatggttggatgtaacgaagtcaaacctattgttctccaaaggcgcgctgttggtcgaaggaattgccgaagcaatcgtgttacccgaacttgctcgcatcgtcttgcgcccttatggggaggggaagaattgcctggacgattacggagtctcggtgatcaaccttggtggcatctactttaaccacttcatgcaattgttttgcgatgtcaccggagctcagccaggtgagaatgtccccatcagatgcgcagggctcacagacaacgacccaccgaaatctgtcgagactgttacaggcgaagacggcaaggagaaagccgtcccattccttccccatgatggtgactgccctgtaggcgacaatccggcgctggagcttcaagggccgatcggccagtcgcagtactcaaggttgttcgcaggcaagtacaaaacatttgaatacgacatcgcgatggaagggaacaacctcaggtgtatgtccacgactgcggccagtctctggccggtacccgatggtgatgtggtaaagggcttaaaggcggctgcaaaccttgattttgcgggcatgaagtcggacgagcgggcgcattatgctggcgatatgcttgaccggatcgagaaaaaagagatcggcaagggactgtatgcccaggcatttgcagatacgctggctgaccttaaggaaggttttgtggtgccagagtacattcggctggccatcctctgggcctgcgggttagaggatcaagctcgatga

SEQ ID NO: 73481 - DNA, 1752 bp, Pseudomonas syringae pv. actinidiae ICMP 19073
atgaaattcaccgacgagcaactggcctatatcgccgcaccgcttgatcggcattgttacctgaaggcctgcccgggtagtggcaagaccgaggtcgtcgccgcgatggtatctagtactgtccaaggatggtctcgtgccccctcagggattgctgttctgacgttctcaaacagcgcatccgatgagctgcgcagcagggtgcataaatacctaggccagccactgggcttacctcactgcatctcgacgtttgacagttttgtgttcacaaggctggtcgctagcatcgcaagggagcttacggggtatccgggcaaagagggtgattaccgcatccgaatcctcgagaaggaagcagacatattccacacccggaggccaatctgcggtcgccacatctccgcttgcaagtacaactacgatctggagggtaaaaggttcaagttttcgaccggtgatcgagcgctggacaaccagctcaacaccgcagaagttagtcaggacacaaaggacgatcttgtatctaccaagaggggactctggcgtgcgggatatgcgacccatggagagatcgatatgctggctctgttggcgttcagggatcgtcgattcgatggatatttctcgagagtcgcccgtcgctttccggtggtttttgtagatgagtgccaagatctctctgctgagcaattgaagatcgtgcgcaagctcagcgaccttggcgtcagttttcattttgtcggcgacctgaatcagtcgatctatggctttcgcaagtcgaaccctgctaacgtcacgaagctgatcgaggatctgcaattcaagcggtacgaactaaccgctaactggcgcagcggccaagccatcgtcgacctctgtagcaatatcgtcggcactggcaatgtcttgggcaatccagaaatcccttccatcaaaccgaaaatactcgaatatgcacagtgcccatctgagttgttgcctaccatacgggccatgactggggcttatgagagagtagtactggttgcgcgagggcatgcgacactccaacggctgcgcaatgggaaaacccatgaaggcattgagctgcttgcggtggcctgcattggggccagctcaggaaacctgagtgacctcaaggagagcctgaggacatttgcgaagtggctggtagggagactccagatgcaagttaccaaggctgggccttattgcccaatttcgatgacctccaaattggattggcgcaagttcatccaccagagccttaagtttatggtcgcaagtggcgcaggcgacgccaatcaaacctggtcggcgtgggtacgttgcgcgaaactcgctcttagacagctgccagatgaagcctttgtgcccgttgagatacgggaggagctgcaggacttgagaaagcttcaccttgtggcccggcgtggccagggtgagaagccagtggcgatccgccttttgagccaagaggccggggaaaatgtgctagagacattgcgctacgagaccatccatcaagtcaaaggcgagacccacgatgtaactgtggttgtgtcgtcacgtcaggccggcaagcatggatctcactggtcggactggcttcgagaccgagaatctgaagccgcgcgattcgcctacgtcgcaagttcacgacctcgacacatgctcatttgggcggtaaaaaagctgaaacctcaagaaaagcccgtactggacggcttagggtttgagctgtcctga

SEQ ID NO: 73482 - DNA, 2403 bp, Pseudomonas syringae pv. actinidiae ICMP 19073
atgaagctacaggcatatcggctgcagaactatcgccgactgcgcgacgtcgtcattgagcttgacgatgagatttccatcttcgttggcgccaacaacagcggcaagacgtctgccgtacaaggcctgtactcgatgctccgtggcgaagcgaagaagttcgaactcttcgactttagcgcggcgttgtgggccgagatcgacgccatcggcaggacgcctccaggcgatgaggacgcgcccaagcagttgccgtccattcttttggatctctggttccgggtcggtgaagacgacctcgccactgcaatgtcgcttcttccgagcacggagtgggacggtaagtgcgtcgggatccgggtggcgttcgagcctcaggacgcccatgcactcgtccggaagttccacgaactgcatgaaaaggccaacaacgctgcgagcgcactggtggccagacgcagtgtaggcgcggaggcagatgcggaaaatgcggcggcggtggtagcggatcccggcgagtacaagccctggccggaaagtctgacgaagtacctcaccaaggaactgagcaaagaatatacgttccgctactacgtgctcgatgagcgcgcatttgtcggctatcagccaaaggaagctgattatgcgccgctgcccctaggcaaagagccgggtggcgcggcgattatcaagtctctggtgagggtggacttcctgcgcgcgcagcggcacctcgatgatccggatgctggcagctccgaccgcgccgagagcttgtcgcggcgtctgagccgtttctatcaccgcaatctggagaagcgtggcgacgaccatgcagcgctcaaagcgctcgatacctcggagaaagaagtgaacttccacctgaaggaagtcttcagcgacactctcaagcgtctcgccaaactcggctatccaggcgtcaacaaccccgagatcgtgattcgggcggccttggatccgaccaccgtcctggggcaggattccaaggttcactacgtggttcctggtgcgatcaccgcgcaactgcccgacagctacaatggtctggggttcaagaacctagtctatatggtggttgaactcctagacctgcacgagcagtggaaagccgaggaagacaagcgggcgccactgcatctggtcttcatcgaggagcctgaggcgcatctgcatgctcagatccagcaggtcttcattaggaatgttttgcgcctccttgaggatgccaacgatcacgcaacgtttttccacacgcagctcgttgtcaccacgcactccccgcacattctctatgagcgcgggttctctcccattaggtactttcgccgtgttagcgagcagttggaccataacaccgaggtaaggaatctttcgctctttaagacgtgcgcggccgacgctccagcgcgcgaattcttgcagcggtatctgaaactgacacactgcgatctcttcttttccgatgctgtcatcctggtggagggcaatgtcgagcgcctgctcttgccagccatgatcgagacggcggccaagcgcctgcgttcctccgccctaaccatccttgaggtcggtggcgcgttcgcgcatcggttccaggaattgattgccttcgttggacttactacgctggtcatcacggatctggacagcgtagcggtcaagacggatgccgagaatgccgccgagcaagacgcaggagccggtgccgtcgacggaaataacgaggaagacgacctgaagcccttcgagctcgaagacgacgacgaagcagcaccgggcggcaagaagaagtccaagaagcgtggcagcacctgccatgctcacgtggagggtgcgtacacgtccaaccaaacccttatcagttggatccctaagaaacggttggttgccgaactctgggaagtcacggcggagcaaaaaacgctgtcgcttgccgaggggaccagcgctgaggttcgggtggcctatcaaaccaaggttttggtgacggtgggtgccacgacctcgcagctctgcggccgcacgcttgaggaggccttcggtcttgagaactccgactggtgtcaggctgaggctaaccgctcggtcggactcaagctgaagcgcgcaccaaacagccctgaagaactggctgagaagttgcacgaaagggtgatcggcaagaacttcgacaagactcgctttgcgctggaggtcctcgcaagcgggccgctcaactgctggaaagtccccacttacatcgccgagggcttagcctggctcgaaaccaaagtggcccacgagattgaggcggacgcggctattgccaacgaggtcgcgacaattgagccgactgcagccggtgttgtcgccgttattgcaggcgcggggcagacgacatga

SEQ ID NO: 73483 - DNA, 1932 bp, Pseudomonas syringae pv. actinidiae ICMP 19073
atgagcagacgaattgatagcccagacaccgacgccgaccgcgagatccacgcgtgtattgccgagacccccccgcagccgttcgtggtccgcgccggcgcaggttccggcaagaccacctcccttatcaaagcgctggactgggtgatctcagagcacggcgccagcatgcgggcgaagaagcagaaggtcgcctgcatcacatatacggacctcgccgccaaagaaatcttggcggatgtcaacgacgacccgctggttcatgtctcgaccatccacagcttctactggtctattaccaagacgtttcaggcagacattaaggtttggctacagaacgacctccgcaggcggatcaccgaactggaagaagaattcaagaactacagctcgcgtgtccggcagactacacgcgacaggaacaaggctgaccaacagcgttatgcccgaagccttgagactattgctggcgtcaagactttcaactacggggtgggcagtgactacgcgaagggcgtcctcggccacgaggacatccttcagctcgccgatttcctgctgcaaaatcgcccgctgttccgacgggtcgtagcgctgaacttcccgtttgtgttcattgacgagagtcaggacacgttcccgagcgtggtgaagtccttcaaggaagtggaagcccagatgcggcgcaagttctgtctcggtttttttggcgacccgatgcaggcgattttcatgagagggtcgggggacatcccgcttgaggaccattggcgagctatcacgaaaccagagaattttcgctgtgcgaagcagatccttgacgttgccaacgccgtgcgcgcgcagggcgacggcatggagcaagtccgcgggctgcacgaaagggttgatggagaactcaagccggtggagggctcggcccggatgttcgtcctgccgaacacgctgaaccgaattgaggccctggcgagaatccgggcgtggagcgcggcgacgaacaacgacgagggttggacgaccccagacatcgcgctcaagattcttgtcatcgtgcaccgcatggccgcaaaccggctcggcttcggtggcatctactcggcgctgaacgataagacatcggagggcatgaagcaggggatgcaggatggcaccggctggcccgttcgaccgctcctaagttttgcgctaccgatcgttgctgccgtgaaagccggtaacgagttcgcggcgatgaacctgctccggaagttcagcccgcgtctggcgccagtggctcttaccggccgacgtgccgcggctgtattgcgagagctgcacgctgctatgtctagacttgtcgccatgttggacgaggcagggaccaccattggtgacatagcactccatctctgtgacacgggtcttttcgagttcgacgatcgctatgtgcgtgttctcggatttgtcagggatgttgcagacgctgcccaggagcccgaggctgctgatgcagttccggccgaaggactatcctcagatgcggcaatggccaagttcttcaagtgctctgcacaagagctttggccctatgagcgctatgtctcagaagggtctccctatgctacacagcacggtgtgaagggcgcgcagttcgaacgcgtcatggttgtgatggacgaggaagaaagcgactaccgaacgtacaactacgaacgtgtcttcgcgagcgctgaggcccgtgctgcagatcgtgcacgagcactaggcggtgatgaaaacacttggagccgaacgctgcgactgctttacgtctgctgcactcgcgcccagcgggggctagtactaacgttctttgtcgccgatccgacgaccaccttggaaaatgtcgtggcgagcgggatcttgccgcgaagcgcagtcttcacacaggaagttttagctggatggccatag

SEQ ID NO: 73484 - DNA, 1905 bp, Pseudomonas syringae pv. actinidiae ICMP 19101
atgtatctacgcgcgttggacgttagaggtttcaagtgctttggcgaacccttcactatagaatttcacgatgggctgaacgtgttggtgggcgaaaacggcgcgggcaagaccggtgtaatcagcgcggtgcgtcagctcttcaatgactcggagtcgggcaaacgaatcatcggtgagcacgatttctacaagggttttgaggcaggtgctttcgcctcggaggagctccagatccaggccacgttttccgacttggatgataaggatgccactgcctttgatgagtggtgcgggaactatgatgaagcgaagctcaccttcattgccaaaaaccaagagtcacgtggacgcttcaagtatcacacttatggtggtcacgaattcacccagcccttagatcctgaaacacttgacttgattcactgtgtttatctgccgccactccgcgacgcagagagcaagctccgagaggggcgccaatcacgtttggccagactgttgaaggccctatgtcggaaagagctggacgctgccagaaaggccggcactcaaactgcgctggagcagcgcgttggcgacttcaaccgcgagctttctcagagcgacgactttgccatcaaactggccaaccaacgcatcggtgaaagcctgaaggccgcgctcggaatgcatctgtcccaaagcacgttgatccaattctccgaggtgagcttctcccgtatcgttgaaggattgagactgctttatttccccgacctcacaaatgccgaccccacccagttccgatctctgggggagaacagcctggggtacaacaacctattgtacatcgcatccatcctagcggagctcgtccttgaggtagaggagggtcgtggtgaagagacctacctgcggctgctgctcatcgaggaaccggaggcgcacctacacccgcagctccaactacggttgctacgacacctcaaaacggaggcagaagctcgaggtatccaggtcatcatcacaacccactcaactgtgatttcggctgcggtgtctgtggagcacctgattcacctctccaatgaaggcatgccaacagccgttcctctgagaaaaacagggcttcctgagcagagccggcgttttgtagatcgctggctcgacgtcaccaagtcaaatcttcttttctcaaaaggcgcgatcctcgtcgaaggaattgccgaggcaatcgttgtccccgagctggctaggatcgtcttgcatgctcaagggaagggcagggactctttggacgattacggcgtgtccgtcatcaaccttggcggtatctatttcaagcatttcatgcagctgttctgcgatgtcacgggcgcccagcctggtggtaatgtgcctatcaggtgcgccggactcacggataatgaccctcccaaatctttctcgaccattgacgatggcgaaggcagggaaaaaccagttccattcctcccgcatgccgaagatcaccggctgggaaacaatccggcattggagcttcaggggccgatcaatcagtctcaattcgctcggttgttcgccggcaagtacaagaccttcgagtacgacattgcgctggagggcggcaacctcacgaccatgctgaatgtggcagcagatctctggcccgttcaggatggcaaggtggccgggaatttgagggaagatgcaaaacgggatttcgcatccatgtcctctgctgacaaagccccttttgctggcgctttgctcgccaggctcgactccgaagagattggcaaggggttgtacgcccaagcgctcgcggacgcgctcttggcgcgcccagctgatttcgtcgtgccggagtacatccgactggccatcctttgggcctgtggactggaagagggacaggcatga

SEQ ID NO: 73485 - DNA, 1803 bp, Pseudomonas syringae pv. actinidiae ICMP 19101
atgaacttcacccaggagcagttggattatctcgcctcaccgctcgacaggcacgtttacctcaaggcctgcccgggcagcggaaagacggaagtggttgccgcgatggtggccagaatcgtccaagaatggtctcgttcaccatcaggcatcgcagtgctgacgttctccaacagtgccacggacgaactcaggaacagggttcataggtacctgggggagccgatcggcaaacctcatctaatcgctacgttcgacagctttgtgctgaaccggctggtggcgagcattgccagtgagatgacgggatataccggcagggaaggtgactttcgcattcggattctggacaaagcagcgaacatctatcgcacgcgaaatagcatttgcgatcgttggatctctgcgtgcaaatacgactacgaccttggaacgaccaagttcgtattttccactggcgaacgcggcctcgataagcaactgaacgccgaaacccttaatcaggataccttcaaagatctcattgccactaagaagcggctgtggcgaggaggttttgccacctttggtgacatcgacatgcttgccctgaaggcattcaaggataggaaattcgacccctatttttcgcggatcgcgcgccggtttcctctggtcatcgtggacgaatgccaggatctctctgcagagcaactacgaatcgtggagcatctcgcacggttcggtatggcgttccatttcgtgggtgatctgaaccagtcaatctatggctttcgcaagtcgaacccagagaatgttaccgacctcatggtcaagctgaaattcgacccgtatgagctcaaggcgaactggcggagtggacaggtcatagtcgatctgtgtaccaacatccttggcggcgaacggatcaggggcaatgcagatattgcttccctgcaaccacggatactcgaatatgaagtgtgcccctctgagctgctgcctacaattcgcaccatgacacagggatacaccaaagtggtactggtggcccggggtcatacgaccctgcagcgtttgcgtaatggtgagaccttcgaaggcatcgaactattggcagtcgcgtgcatcagcgccaacacaggtaacctcaaggacatcaagcaaagcctgaggacgtttgcaaagtggctggccgacaaactcgagctgcaggtcaccaaggtcggcccctattgccccattgtcatggagtccaagcttctttggcggaagttcctccatgaaagcctgaaattcatggtcgccaatggtgcaggcaagtccgatcagacctggtctgcttgggtgcgcactgcaaagctggcgatccgacggctcccgaatcaacctttcgtacctgtggagttactggaggagctggatgtcctgaaagacttgaaccttgtggctcgcaaagggcagggtgataagccagtctccgtgcgagtgttgagccaagaggtactggaggggccaccagacacgttgcgctacgaaactattcaccaggtgaagggcgaaactcacgatgtcactgtggtggtttcgtcccaacagcccgggccgcaccagtctcattggcaagactggttgcgagatcgcggatcggaagccgcaaggttcgcttatgtggcgagttccaggccccagcatatgctgatttgggcggtaaaaaagctcaaagaagaggatcgacctgtactggcgcaattggggtttgaagtaccgccccctcccccgataaccgtccctaaacgagcacatttgcgttccactcgttaa

SEQ ID NO: 73486 - DNA, 1086 bp, Pseudomonas syringae pv. actinidiae ICMP 19101
atgctctatctctcgcttgtgttggcagctcactcgattaatcgtgacgtgagatcgggtaaaaacaccgccattgatcctgcgaagttgaaaccgccggcgttcaccatattggccatggaggagcccgagaatagcttgtcgcctcactacctcggccggatcgtgaacgccctgaaagggtcaatcggtgtagacgcgcaggcgctgatcgcgacacatgcgccttcgatgctacgccgggttgatcctgagaacatacgctacctccggctcggcccgaaccggtgctctctcgtcagcggcattgtcctgccagccaaggaagatgtagcccataaattcgttcgagaagctgtccaagcctttcctgaaatctatttctcgcgcttagtcgtgctgggcgaaggtgacagcgaagagattgtccttccgaggattctccaggccaaaggagccccggttgacgaatcggcggtgaccatcgcgccgctgggtggccgtcacgtgaatcacttctggcgtttgctttcccagctcggcacgccgtacatcaccctgcttgacctggatctcgcacggtaccaaggaggctggggccggctgaaatacgtcaatgaccagctgacagagtttgagagtcataaagcattgccctacgggttcccagcttgggacgacgctaatactcgtattagggaaaaaaatgttcccaccactgggtcttctgagacggttttcgatcatctagaggccagaggcatatttttttcggcaccgcttgatctggactttgcaatgctcactgccttcccaaaagcattcaatgccgttcctgtggcgcccacaccagaaagtcaaaaagcggtgcttggcaaaagccacgaaggcgccgatcaatacactccccaagagcaagcgtggttcgatgcctatcaccactatttcaagctcaacagcaaacccgcagctcacctcacggccctgtcgagcctctctgacgccgaacttcttgcaggcctgccaccgtcactggatcgactagccgatgcagtaatagcagcgttagaggagtcacccgagtga

SEQ ID NO: 73487 - DNA, 1683 bp, Pseudomonas syringae pv. actinidiae ICMP 19101
gtgattcaccctgaccgttggacgcattcacccgggctcacactggaagcgaatgcatggcacgccatcaaggacaccgagcactcgctcgtccttcttgcggggcctggtgctggtaaaactgagatattggctcagcgtgcagactttctcctgcgcacaggtagttgccggtatcccaagcgaatcctggcgatttccttcaaatccgacgcgagccgcaatctcaaagaacgtgtaagcctgagatgttgctgggaacaggccacccgtttcgacagctttacgttccactctttcgccaatcgaatcgtcagtcgctttcgcgttttattgaccggccctgacgccctcaaacccgactactcgattggcaaagaggctatccctggcgagcagatcaccttcatgcaactgcttcccatcgcgctcaaaattctaaggacgagcaagattgcccggaacactatccgccagacctatgcgcacgtatttctcgacgaattccaggactgcacttctgatcagtaccagctgatcaaactcctgtttgaaggcactccagctcttatgactgccgtcggtgacaccaagcagaccatcatgggatgggctggcgccctgcatggcatattcaagctttacgccgacgacttcgccgcccggccattacggctctaccgaaatttccgatccaagccgcgcctgctccgtatgcagaacagcgttatcagagacatcgacccttcagcccttatgcccgacgaaatgatcgggggagacgatggtgtaatccgggcagggaatttctcctcgagcgccgctgaagccttttccctggcgaaccttattcagaaatggatcgaggtcgaagacttgcgaccagccgaaatcgccgttcttttccgcggcgagatcgatttatatggcgaagaactgatggagcagctgacgcttaggaacataccatttcgcaatgagaacacccttcaggacttgctcaaggagcctgctgccaggctaataatcgactacttgacctgcctctatacgcgaggctccaacaaagcatggtcacggctgatggatcttttcgcgccgttcgatgacgagggtaacagcgaccggactcacaaatcgttcgagctttgctacaaacagcatcagaagaaggtgaaggcagcagcaaagacaacgaccccctacgccgattggtgggagcttgccaaggcgttcttcgacaccttagggcatgccgtcatgacaaccctttcttcagactacgaaactaagcgacgtctgaaggagatcattcgcgatacgcgtgaccacatctccaccctcctgcagacagaacccgatctgccaagggctcttgcccggttctcagacgacaacgctgttcgcttcctatccatgcataaaagcaaaggtctggagtttcattcggtgatcatatctggggttgagcagcaaacgtttcgcggcaaaattggggaggagcgacaggtgttcttcgtcgcagtctctcgagcgatggagcgccttatcatcaccactgcgaatcagaggcaacggcctgtgagaatatcggcgggcaagagatgggatgttgcgagacagccgcatgtagcctttgtcacttacgtcactgagcatttgtcgcctaaacagccgcagtga

SEQ ID NO: 73488 - DNA, 1086 bp, Pseudomonas syringae pv. actinidiae ICMP 19079; identical to SEQ ID NO: 73486

SEQ ID NO: 73489 - DNA, 1683 bp, Pseudomonas syringae pv. actinidiae ICMP 19079; identical to SEQ ID NO: 73487

SEQ ID NO: 73490 - DNA, 1905 bp, Pseudomonas syringae pv. actinidiae ICMP 19079; identical to SEQ ID NO: 73484

SEQ ID NO: 73491 - DNA, 1803 bp, Pseudomonas syringae pv. actinidiae ICMP 19079; identical to SEQ ID NO: 73485

SEQ ID NO: 73492 - DNA, 1086 bp, Pseudomonas syringae pv. actinidiae ICMP 19097; identical to SEQ ID NO: 73486

SEQ ID NO: 73493 - DNA, 1683 bp, Pseudomonas syringae pv. actinidiae ICMP 19097; identical to SEQ ID NO: 73487

SEQ ID NO: 73494 - DNA, 1905 bp, Pseudomonas syringae pv. actinidiae ICMP 19097; identical to SEQ ID NO: 73484

SEQ ID NO: 73495 - DNA, 1803 bp, Pseudomonas syringae pv. actinidiae ICMP 19097; identical to SEQ ID NO: 73485

SEQ ID NO: 73496 - DNA, 1905 bp, Pseudomonas syringae pv. actinidiae ICMP 18886; identical to SEQ ID NO: 73484

SEQ ID NO: 73497 - DNA, 1803 bp, Pseudomonas syringae pv. actinidiae ICMP 18886; identical to SEQ ID NO: 73485

SEQ ID NO: 73498 - DNA, 1086 bp, Pseudomonas syringae pv. actinidiae ICMP 18886; identical to SEQ ID NO: 73486

SEQ ID NO: 73499 - DNA, 1683 bp, Pseudomonas syringae pv. actinidiae ICMP 18886; identical to SEQ ID NO: 73487

SEQ ID NO: 73500 - DNA, 1905 bp, Pseudomonas syringae pv. actinidiae ICMP 18801; identical to SEQ ID NO: 73484

SEQ ID NO: 73501 - DNA, 1803 bp, Pseudomonas syringae pv. actinidiae ICMP 18801; identical to SEQ ID NO: 73485

SEQ ID NO: 73502 - DNA, 1086 bp, Pseudomonas syringae pv. actinidiae ICMP 18801; identical to SEQ ID NO: 73486

SEQ ID NO: 73503 - DNA, 1683 bp, Pseudomonas syringae pv. actinidiae ICMP 18801; identical to SEQ ID NO: 73487

SEQ ID NO: 73504 - DNA, 2316 bp, Klebsiella pneumoniae UHKPC179; identical to SEQ ID NO: 73440

SEQ ID NO: 73505 - DNA, 1878 bp, Klebsiella pneumoniae UHKPC179; identical to SEQ ID NO: 73441

SEQ ID NO: 73506 - DNA, 2160 bp, Corynebacterium glutamicum Z188; identical to SEQ ID NO: 73318

SEQ ID NO: 73507 - DNA, 1914 bp, Corynebacterium glutamicum Z188; identical to SEQ ID NO: 72451

SEQ ID NO: 73508 - DNA, 2190 bp, Staphylococcus aureus Bmb9393; identical to SEQ ID NO: 71904

SEQ ID NO: 73509 - DNA, 1794 bp, Staphylococcus aureus Bmb9393; identical to SEQ ID NO: 71697

SEQ ID NO: 73510 - DNA, 1797 bp, Sphingobium chinhatense IP26
ttgaagatattctcggtagtgatcgaaaattttcgcggcatccagtcggcaaaactggtgctgcctgatcacgccgtactgatcggcgacaacaataccggcaaatcgtcagtattcgaggcgatcgatctcgccttggggccggaccggctgagccggcgaccacccgtggatgagcatgatttctatcaggggcgctatcttcccagcccaaaccccgatgctcccgagggcgcggagccaggccccgcgccgaaaatcacggtcgaggtgacgatcaccaatctgtcgccggagcaggaggcacgatttggagccaacgtcgagtggctgaatactactaccggagacttctatcaggaggccgacccggccggggtcgatgctgccgagatcaaggccgcgctgcgtgtcacattcgtcggccaatacgatcctgatgaggatgacttcgtcggcaacagctatttcacgcgcagcctttcagaggatgagacacctgcatcgttctcgaagaaggacaagcagcactgcggatttcttttcctgcggtcgttgaggacaggatctcgggcgctcagcttggaacacggcagcctgctggacatcatcctccggctgaaggaaatccggccgcagatgtgggaagggacgatcggaacgcttgcagccatcgatgtagcgagcgacccggccattggcatttcgggcgtgctcgagagcatcgacaagtcgctgaagaaatacgtcccacgcgaatggggggtgaagccgcacctgaaggtgtcgaacctgacgcgcgagcatttgcgcaaggtcatcaccgcgttcatcgccacgggtgcaggcgaccatgccgctcccttctttcggcagggaacggggacgatcaacatgctggtgctcgcgatgctgtcacagatcgccgaggacaagcagaatgtcatttttgcgatggaggaagccgaaacggcaattccgccatatgcgcagaagcggattgtccatgagctgcgcaaactgtcggcgcagtcgctcttcacgtcgcactcgccgtatgtgctcgaagagttcagcctcgacgaaaccgtcatcctttcgcgatcggacaacggccaactgagccaatccaaaatcgagttgccggagagcattaagcacaagcgttatcggcaggatttccggacccgtttttgcgaggggctactttcgcgccgtgtcctcatcgccgaaggcgctacggaggcgacctccttcccggtcgtcgcgcggcgactggccgagcttagtccggctacctatgcgtctctggaagccttgggcgtctgcgtgatcgacgccggaagcgagacccagatcgccgaccttggggccctatacaagagcctcgggaagcggacctttgcattgtgcgacaagcagacagatgccgccaaggctgccattgaggcccaggtggaacgcctgttcatgcacgacgagaagggcattgaggatctgatcctcaacaacaccacgcaggctgcattggagcgattttccgatcaactcgattggccgcagcatctgctgaaccagtatccgaatccaaaagcacaagcggctgccgcgcttggagcttatttcaaatggtcaaaaggtaattggggaatagccgagttcttagcccagtgctccgaagtcgaaatccctcagtggctgcgcgatgcctgcaccaccttgaaggcagcgtgtgacccgccacctcaaccggccgaggccgatggcgaagatctttttgctgacatcttgggatag

SEQ ID NO: 73511 - DNA, 1827 bp, Sphingobium chinhatense IP26
gtggtcgacctaaccgaaacgcagaaggcaattctccagtccattgggcatcagctcgtcaccggcggtcccggttcggggaaaaccaccgtttccatcctcaaggcagcgaagatcgcgcgcgaggaattgaagcccggtcagcgtatccttttcctcagcttcgcgcgggccaccgtttcccgcgtccttgaggcgatcgacgaagaaagcgcgatcacgcgggaggagaggcgacggatcgaggtcgatacctaccattcgttcttctggcgcatcctcaaaacgcatggctatctcgtcggcttcccacggcggatgacgatcctcacgcctccgaatgaggcgattgcattgtcggcggttcgaagcggctacaaagcggccaggaatctgtcggatgaggaaaaggccgagaagcgcgtgaaggaggtggcggagcgtgtccggttggcgaccgaagaagggaaggtctgcttcgacctgtttgcagaccgcgtggcaaccctgcttcacggctcagataaggttcgagcgctcatctctacgatgtatccgtacattatcctggatgagtttcaggacaccagcgccgatcaatggcgggtggtccaggccctcggtgccaacagcacgttgatcgctcttgccgacccggagcagcgcatcttcgatttcatcggcgccgatccggaaaggctgaaccacttcacggcagccttcgcgccgacggttcacgatctcgccggtgacaaccatcggagtaaggggactgagattgctctattcggcaacgacatccttacggggaaattttgccagaacgactacaaggggatcgattgcgcgctgttcgagtcgaatcccaaccaagcttatgcctcattggtcggtcaggtgctgcaagcccggaagcggttgatcgaaactggccggagcgattggtcattggcgattctcgtgccgaccaagaaaatgacccggatggtgtcggatattctgcgcgagccattcggcaatgtcccgcccatttcccatatggccgccgtcgatatggaaggcccgatcctggctgcggagatcatcgccttcctgctccaacagcgcgggcatgacggatgtttcgacgaatttgtcgagttgatgtgcagctatttccacggtcgaggtggtgcaacgccgaccaagagagacatggacgaggctgcgcggttccggaaggcgctgtccaagtggaacgaatgtctagcgaaaggacgaccgacgcctggtaacagcgtcttgcagggaacctatgccgtgcatcaggcaattgctgcgctgacgttcacgggcgatccgggcgcagattgggtcgcggtgcgcggcgtgctggatgctggggcctgtgagcgactgaaggatgttgcaaaggaggtccgtaacgtgcgtctgcttgagcgcggtacacagctccgtcaggggttggctcaggactggcgtgacgtcagcggctatagcaacgctcttgcgatcacccgccagtcgtttgttcaggagcatttcgcaacagctcacaagcctgaatccggcatcgtggtgatgaacatgcacaaggcgaagggaaagcaattcgacgaggttgtcatctttgaaggatggccaaaacgcttcaaaggcgagatcgtggctaatcctgatcggatcgtctccggcaatgtccacgatggggcgatgacgcaggcgcgtcagaattttcgggtcagcgtcacgcgcgcaagggcgcgcacaacgatcatgacaccaagggatgacgtctgtgttttgctcaggcctggaccggcatga

SEQ ID NO: 73512 - DNA, 1878 bp, Geobacillus sp. WSUCF1
ttgatgtatatatctaaattagtaatagaaggatatcgttgttttaatgaaaaaaccgaaatacctttaaatgaaggacttacagttatcttgggtgaaaacggaagcggcaagtcggctattattgatgcaatacgattaatcttaaatgaagacgagtttggtaatgttaaaattactgaaaaagagttttggcactcaattggtaatactaagaatgagataaggtctaattttacgattgacctaatcttctcgggtctcaacgaaaaggaacaattagcttatttaccttggttaaacccgaacgatttatgttcggcatctttacatttaaaagtgcaaaataagactaattctagaaatcaatataagagggaattatggggaggtaattcctcaagtagtatattcgagtgggatacatataattcaattcaatgcacatatttaccgccattgcgtgacgcagaacaacgccttagagctgttagaggatcacgtttagctcgcttaataactaaaatggagtcaaaaaataacgcaagagagcgtttagaagatatagttaaacaaaataacaaagaattattaaaagatgagctgatcgtaaaagcaaaggataatattaaaaatcgactaatagaatctttgggagaacaattggctcaagatattagcgtttctttttcggaaactcgattcgagagaatcattgaaaatttaaaactgttattctatccgcttcttgataatgaagtgagtgtagaagagtttcgggagttatcagaaaatagtcttggatataacaacttaatttatttagcaactgtattagcggaattagagcaaacagaagaaaatgagttatctactcgcattcttctgatagaggaacccgaggcacatttacatccacaactacagacaaaattacttgaatatatagaaaaacaagctcgaataagtggtgttcaagttattgtcactacccattcaccaataatagcttcttctgttgacttaaataatattttagttgttaaaagaacagattttaataacagtcctacgattgttccattaaagaatgtaggattaactccaaaacagaaatttttcttgcaacgttggatggatattactaaatcaactttattgtttgctagaggtgtgattcttgttgaagggatagcggaaggactagttattccagagttggctaaaagagtattacataaatatttgaattcaaagaaaaaaatatccgattactctttagaagaatatagtgtttccgtaataaatatgggtggtatttatttcgagtcattctttcaactatttatgaatgcagaagaacaaggaaaaggtataccaattagatgtgcaggtataacagattgtgatcctaaagaaagtgacactccttatgttggaaatgagtgcgaatgtaataatccggcattaaaactacagatgatactgaaagataacaaatattgccgcttatacagtaattctaaaacttttgaatatgacttggctctatgcggaaacaactttttggtaatggttgataccttccttgaaattttagaaacagatggatctatcagagaagactttgaaaaatataaaaaggaatttatcagaaaaactgatagtgaaaaagctaaaatagcaaaatgcttattagatagaatagataaccctaaattatgcggtaagggtttatttgctcaacacttagcttataaacttgccaatgaggaaatagaatttacagttcctaattatatcgagaaagctattctttgggcttgcaatctaaatgaaaggagtgaaagtaatgtaccaacaaattctggaaattaa

SEQ ID NO: 73513 - DNA, 1866 bp, Geobacillus sp. WSUCF1
atgaaaggagtgaaagtaatgtaccaacaaattctggaaattaaacccataaataaattagatttaatttattcggtgttaaataacgaagatataaaacgtctttccccagagcaagctacttttattttacatccaattaatcgggattgttttttaagcgcttgcccgggcagtggaaaaacgcattcggttggcatcaaaatagcatatgaaattcaaaattggatttccaagataagtggtatagctgttctctcatttacgaaaaatgctgcggaagaaatcaaaaatcgtgctaatcgctttttgggaaatttgaatgtaagtcatcctcatttcgttggtacgattgatagttggctccattcctatattttccacccttttggttctgtagtaactaggtataagggagctgaaggggatgtttcacataaattaatacaggatggtaatcatggtacatggttaaaaaattttagtaccaataaaatttctatactagattacactattgatatgaatgaaaatcctacagtttgtgatgaaaagaaaaaaatcgaaaatgatcccttaactattagtactctattaaacaaaaagaaacagtttgcagaaaaaggttttgtaacctatgcagacatagaatattggtgttacaagcttttgcaacaaagaggggatattcttgatttaattgctaaaagatttccctatatttttattgatgagtgtcaggatttatctgaaattcagcttggtattttaagtttattaaaacaggcaggggtaactattcatttaatcggtgatttagatcaagcaatttacggatttagaaaggtctatccggaaaaagtgattgagaaaatagatgaatggaaaatggaacgtttacaattaaccattaatcacagaagtgtccagcaaatttgtaatgttgttgctaaactaggtggaaagcaacaaattataggaacccggtcaagtcttaatcaatcttgtttactttgggtttatgataaaaaaaatgatctatatcaacttcaagaagcatttatcaacttattagacaaaaggaatttaaatgtcaaagatgcgattattattgctagaggatcctcgacaattaggcaaattaaaggttacccaaaggatacaaaactagacaaagctaaaaatcatattgtatacaaaattgcatccgctattactcactggagttcagctaattttaaagacaaaaatgtcgcattagaattatttagtcaagccattatcgacttagcgtatgccggaaaaggtaaatcaggaattattacaacccctttttcttacaacccaatagattggcgtataaaacttggaacttatctcgagaagattgctagtaaaagtgattttatagttaaagaaacttctaaacaaatatggaaaaattgggttaaagatattcttaaaagtgaatttaagaatatttgggatgaacttaaagatgttgaatactcatttgagaaaattgtcagaagattaagatctcctgaaggattgtcagatattcctatgtctaaaaaatttttaatgggtgaaaaaaagatcgaaattaaagtaaaagtagatacgatacataaagtaaaaggagaaacttacagggccgctcttgtagtttcttcaccaactaaaaaatctgatggtggacatttcacacaatggttacagaaaggtacagaagcaagccgctttgcttatgtagcatgttcaagaccacaagatttattagttttagctattccagagtacagcgaagagatattaaacttaggattttatttagatgacatgaaggaatatatctctgtgtaa

SEQ ID NO: 73514 - DNA, 2100 bp, Acinetobacter haemolyticus MTCC 9819; identical to SEQ ID NO: 73278

SEQ ID NO: 73515 - DNA, 1734 bp, Acinetobacter haemolyticus MTCC 9819; identical to SEQ ID NO: 73279

SEQ ID NO: 73516 - DNA, 1800 bp, Acinetobacter junii MTCC 11364; identical to SEQ ID NO: 73266

SEQ ID NO: 73517 - DNA, 1989 bp, Acinetobacter junii MTCC 11364; identical to SEQ ID NO: 73267

SEQ ID NO: 73518 - DNA, 1920 bp, Vibrio parahaemolyticus O1:K33 str. CDC_K4557
gtgaagcttgataaattacgactctcctgttttcaaagttatgggtcaacctctactgaaatctctcttgacgatttaactttcctaatcggtccaaatggctcaggaaaaacagccgctcttcaagcgctttgtcgaatgttcgcgtttgatccatctctacgtcggataagaaaatctgattttcatgttccacacaacgaatcagagcaacctgaagaaagaactctttggattgaggctgattttcttttccctgaattacatgaagagggagataacactactgtttcaccacactttggtcacatgcgattggtagatggagaagatactccacgggtaaggtttcgactagaagcgtctatgggtattgatggtgatatagatgagtcactaatatatgtattagaggtagacgacaaccagcagcctaaaagtacggctaaagtttcacgcacagaccgaagtcagattcaaatacactaccttccagctagacgtgaccccgctgaacatattacctttggtgcgaatgctttgttagggcgaatgctaagggctgttaactgggagactgagcgagaagcagtgaagggacatacagaccaaatcagcgcaagtctcgcagctaacttatcagttaatgccttgagtacaagcattcgagattcgtggtctcgtttacataaaggacagttttttacacagccccaaattacttttgtcgcaagtgaaatcgaatcattgcttcgccatctttctatttctttttctccaggacacgatgaagctaatgtcgatttttctagattaagtgacggtcaaaagtcgatgctgtatttgtctttggttctttcatcccaggctattggccgctcggtactacaaggtgatgaatcttttgatccagataagcttagacctcctgtgtttacgttaattgccgtggaagaaccagaaaatagcctatctcctcactatttaggaagaatagtaagctctcttacagaaatggtcggtcagggggatgcgcaagccctaatagcaactcacgcaccatcaatgctgagacgtatcgagccaaaacaaatacgctatcttcgtttgaacccagacagagaaacaactattgcgagtatcgagttgcctgatgaggaacactcaggtgatgctcataagtttgtcactcaggcagtaaaatcttttcctgaaatatatttttcacgtttggttatacttggggaaggggatagtgaagaaatcgtaattcctagattactagaatctaaaggggtgcctgttgacgcatttgggattactgtggctccacttggagggcgacatgtaaaccatttctggaggcttcttgaagggctaaacattcctcatattacacttttagacctcgatgtaggaaggtaccaaggtggctggggacgcatcaaaacaaccaatgatcagttaaaactacataaacctgctcttcagttaactgatggatacgaaagcatcccaacatggaatgatcctcagcataaaattagagcatttcctcattatctaatggaattggaaaagcgtagagtgtttttctcttatccaatggacttggatttcgcaatgctcagcgcttttcctaccgcatttaatatagaagcagatgatcaagttgaaccagaactcccaaatatcaaagcggtactaggtaaatcttgtactgaagcttcagagtatagtgatgatgagcagaagttgtttattacgtatcacaagttattcaaagttgggagtaagccagcggagcatattacagctctctctagattatctgatgaacaactcctagcacatattcctccgtcattgggacggctagtagatgctgcaaaagaaatattgttggagcttcctgaatga

SEQ ID NO: 73519 - DNA, 1647 bp, Vibrio parahaemolyticus O1:K33 str. CDC_K4557
atgattagagtcgagagttggcaaccagctgatggattagtattggagcctaacgcttatagagcagctaaagagcgtgaatacagcttagctttaaccgctggtccaggcgctggcaaaacagaaatgctcgctcagcgagctgactttttacttcgtacaggctcatgtcgctaccccaaacgtatacttgctatttcatttaaggtagatgcaagtagtaatctaaaagaacggatcaagcgtagatgtggtgctgagctttcatcacgttttgacagctatacattccatgcttttgcaaagcgaataattgaccgttttcgtccaatattaactggggatgaagccttagagcctggtttcacaatcggtcccaaaatccttcacaagcaaattgattttacagatctagttccgcttgcaataaagatattaaaagaatcccctgttgctagaaacgcattgaggcaaacctatacagatgtttttttagatgagtttcaggattgtacaaactatcagtatgagcttattaaggtagcctttcaaagcacagacattcgccttactgctgtaggcgatacaaagcaaaaaattatgggctgggctggtgctcttgacggtatttttgaggcatttaaagaagacttccaagctgttccactcaatatgtaccgaaactttcgttcacagcccaaacttcttcgattgcaaaatgaaatcgtcaaaattcttgatcccgcatcagtgatgcctgaagagcaaatcgcgggagaagaaggccatatacaagttcacccttttcagaactgccaagaagaagccgattatctttcagagcaaatccaaaggtggatagatgaagaaagtgttcctccttctgagatagctgtgttaatcaagaaccaacctgaattatatgcaatgaggcttatggttgctctacgtgatagaggcataccatataggaatgaacagcagttgcaggacataactgttgagccagccgcacgcctaattgtagacttcctattaagcacttttggcaagcaggaaccttcagcatgggttcgcttaatggaaaagttagttcccttcactgatgatgacgatgaaaagggtgaactggtccaaaactggcaacgtttcattctagaagagaaaaaggcgattaatcaaaatcctatagttcctgaaaaccccaaaaggtgggattgcttgaagcgtttcattgagaaagtagggttccaagaattaatgtctctgtcacatgattatgaaactgagtcacgtttacgtgaggttctcaatgatacttgttcacagatagatcaattgatgtctactggactcgatctccaagcgtccctgaagcgttttgaggatgatcaagcagttagaatacttacagttcataaaagcaagggactagagtttgattctgtcgttctactaggcgttgaaactgaaagctattggggaaacccagatgaaaacttatgtgcattttttgtaggagtttcaagagcgaaacgaaggttgttgctaacacatgtcggctttcgctctaggcctgctggtcactatggaagatgggatacccaaaggcatagacaagaaaggtttttagggtgtctgatataa

SEQ ID NO: 73520 - DNA, 2061 bp, Eggerthella sp. CAG:1427
atgtacatttcccatataaaagtaaaaggattccgcaattttaaagattcggacatcgaatttaatgatggcctcaatgtcctaataggtcataacaatgctggaaaaacaaacttactgaaggcattacaattggtaatagagccacattatagatacaggagactaaatgctaatgatttcaatagggatatttctcttgaaaatctgaaaagccagtcaccatcagttacaatatcagtaacattcaaaaacagtaacattgagtataatgagcaagaagaggatttgagagtggttgctaactggtttactgatatggagaatggctatgctgcgatgttgacttatcggttttatttgccagcagaaaaagaagatgattataaagcagctatggcagatgtggaggatatcaagaatgggtggagtattcttgagaatgattttctccgctattatgtatataaattgcttgcgggcccattggatgcacctattcaacctgaaatggacaagttggaacgatttgacttccaatttttaggtgctatgagaaacgtagaagatgatatgttttatgggcgaagtaccatgctgaaggatgtgctaaatttctttatagattatggaataaagaccaaaggggacaagacgaaagaagagaaggaatcagaattaaaggatgtaaggaatgacttcggtaatgaagcgactgctcttatgacttcattattggaaagattgtcggaagggaaagatgtcatgcttgattatgcacatgaaacaggagcatctttcaataatgcattgcctgattttaagagtacattgacagagcaggatttattctcagcactgaaacttattatcaagtatggcgaagacattgaaatttcagccacacataatggcttgggatataacaacctaatatatatgtctctcttgcttgccaaaatgcaggctgatgctgatggcaactatatgggagataatgccaaagtatatccgatacttgctattgaagagcctgaagcacacttgcatccagccatgcaatacaagtttcttaaatttcttgacaagaatctaaaagtagatcataaagtgcgccagattttcatcacaactcactcctcgcagattactgccgcagtaaaattggataatataatatgtttgcataagggagaggatggtgtcacaaatgtttgctacccaggtaaggtatttacagattctgatgaagacaaaaaatcaaagaactatgtacaaagattcttggatgcaacaaagtcggacatgctttttgctcgtaaagttattttggtagaaggtattgcagaaaatttattgatgagcacacttgctcgctatgacggtaaatcactggaagatcagcatgtggcagtagtaaatattaatggtcgatattttaatcattttgtaaagttgttcaatatagagtcttcaccaaacgcaatacctaaaaaggtggcatgtattacagacagagaccctgtaagaaagaagaaagaggcaaattgtaaatttacagtttgttacccatttgatttgtataaagataatgagcattacgaatattctgtgaacgcagaagaggaggaaaatgcatttagggatcattcatctatcaggtatttttcacaagatgcaaataaaggtaaaacatttgaatacgaactcgctctgtgtaatccagatcttgaattgctgattacggaatctatgtcgaatcaatccgagataaaaaacatgatgggtggcgattatgcacaagcaaaggtcaaagtgaaaaataataagaaatgggatgatgtcaagacctctattgacaatactgattgggaagaggatgaaaagagacgtcatcttatagctgctcgctacctttcatcattggataaaggcgaaaacgctttagaactttgtctcgctttagaagaaaactttgaactagaagcaggcaatgaacataagaagattttcaatgttccaccttatattcacaatgcattagaatggttattgagataa

SEQ ID NO: 73521 - DNA, 1659 bp, Eggerthella sp. CAG:1427
atggttattgagataagttctgattcacggattgatatcaatcaccactttagagtttcagcaggtccaggagctggtaaaactcactggctttccttgcatgtgtcccatgtactgaaagactcagaaagtcttgggaagatgggtaaggtcgcctgcctttcctataccaatgtaggagcagacacgttgatgggcagaatgtatgaggatagaagccgtgttctttcttgtacaatccacagtttcctttatgcctatatagttaagccttatctgcattttatcgcaacagacgaaggatttaatatagaactattaaatggcgaagatgacagaatattatctgactataatacttttgaagaaataaggaaggccgttaagcagtactatgctgaacaagatgctactttcacagcaattagggcagcaaagtggaagctgcaagaagatggcagtctaaaatgttatgcgaatccacctaagaaatgctgtaagaagggttatgctttgaatgaaaatgcatatgtcgtttataaaaaattggcatggaaaaaaggatatatgcactatgacgatgttctctatttcagctacaagctcatacagaaatacccatttatcagcagaactttggcaatacagttcccttatgttttcattgatgaattccaggacaccaacccaattcaggcaaaaattatcaaatcgttaggcgagaatggagctattgtaggcgttattggtgactatgctcagtctatctatggatttttgggggcggacccaaatcaatttgcctcgtttaccttagatggtttactggactataccattctggataatagaagaagtagtaatgaaatcattgatttacttaatgtaattaggacagagttccaacaacaccccataagaaacgagcatggcatgaagcccttgctgcttgttggtgagttgttggcttgctatgaagaagcaaagagaatagcggctaatgaagtacatgcattatcatatagaaatatagaggcgaacatcttgaaacaatgtgtggatgcccacgttcaaaacagtaacttattaaatcaaatcaaagatagtaatgcaaatagaaaagagtttgtaactatatggataaaagccattgaacatgcaagaaacaagcaattcggagcagcttttaaaatgctcgaaaacattggagttatggatattgctgcttacacttctgtcaaagaagcacttgatgattatgaaaaatattctaatggaacattaaaagatttctttgattatctatgcgaacgctggaaaataactaaaattaaaaaagatactagtatttatagtttttactcttctcatacatacagagaattatctcaatgtgttggattattggaagattcaagcgctcaaagaacagtacataaagcaaagggggacgaatttgaaaatgtacttgtcgttttcacagaagaaaaagcgttaaacatgattattaaccctaatcttaaagacaacgaatctgacagagtttactatgtagcaatgagtagagctcgggaaagattatttctaaccgcgccatcgatttcacaacaaatggaaaatactcttagaagattgcccatagatataaaaaagatatga

SEQ ID NO: 73522 - DNA, 1782 bp, Eggerthella sp. CAG:1427
atgtatttaagtcgtttacatattagtaagtttagggtgttcgatgatatcaccctatatttcaagaatggcataaatattcttattggagaaaacaattcaggaaaaaccgcaattatagatgctttacgtatatgcctcggatgcggtaaaccagacaattatatttacgtacaagaatgcgatttacatgtcaatccggaaaatccttcagaaatcaacgcagtcatacagtttgacttgatatttgaatttgggcaagcatctattgaaagagaatgtttctatgatttcatatcacaagataaagacaatcctgataagcaaacaatacagttgcatctgaaattcatccaagaaaataatggaaagaaaaaatatttcaaacgaataatatggggtggagataatgaaggacagcaagtaccttacgaatctttgcaagaaatcttttatacctatttaagtccactacgagatgcagtaagttgtctgcgaccttattcctatgacaataaaacatcgcaattattcaaccaacttacgaaatatgacaaaggcgacgaaagcatacctctgaatgaagaaaagaaaaaatcactagcaaaaaatttataccaaatcttcgaggatgacgcttacgattggaaacatattttaattacgggaaagagtaaagttaatgcgcatcttgaaggtactggaataactctaaaacatcctgatatagaaatgcgctatgtcggacgagagttctcggatgttgtacggggcatcgaattaaaatgtccgatttataaaacaattgaagccgggcaagaacagaaatatttcactctatctcaaaatggattaggtgagaacaatcttatttttacatctgttgtcttaggcgatcttatcaacagatgtgaagaccatgagttggaaatctacaacgctttactcgtggaagagcccgaagcacacttgcatccacaatatcagaatactttctttgaatatttgaatgaactacaaaacaaaggacttcagatatttgtaacatcgcactcgccgacaattacggctaaatcggatgtcgataatatttccgttttgcaacgtaaacaaagtattatacagtcattttcatttgatgaattatcggaagatgattatccgaaagaaagtaaacggcatttgcgaaaattcttggacacgacaaaagcccaattgtttttcgctaacggagtgttgttggtagaaggtgtcgcagaagcgattattataccgattcttgcaaagaaattcttgaccgaaaaaattgacttgtgtaaaagtggaatcgaattagttaatatcggaggtgtcgcattcaatcattttgggttattattcaacaatgatgatgagagaaaacgactattgtcgaaatgtgcgattattacagacagcgatcccgaagacgatggggatatatctgacagagcacaaaaagcaaaggatttagagaaacataacctgaaagtatgtttggctccacacactcttgagtatgatttattcgaacaatctgagcgcaacaagactataatgcgagaggtatatcgaaacatgcacactcaaacagatgatttaagaggtgattttagtgtcgctactttaatggacaaactcaaatctaataaggataaagcagaatttgcgttgcaactttatgaccgattagagaaagaagaagcattcgatgtgcctgattatatcaaggatgctattttgttcgtagtacccacagaataa

SEQ ID NO: 73523 - DNA, 1689 bp, Eggerthella sp. CAG:1427
gtgaaagcctgtccgggaagtggaaagactttttctgtggctgcgcgtatggcaaaacttttacgagagaataatctatcgagacaccaaggaattgcagccatatcttttactaacaccgcatgtgaggttatacaaaaagaacttaaagagacatttggttgtacaaatataggttatccttcatttatcgggacaattgatagttttataaatacttacatatttctgccttatgcccatttagtcatggaatgcgattgtcgtccagaaatcgtaggaaccgaatttaataaatggtatgattatgatgcttcaaaacggaactatgataggacaaaaatcattgatcctaattatttcgtagataaagtatctttcaaccaatatggagagcctattccacttgtcacagcacaagagtttaatttttcttggagcaaaatgaaaaagaaaaatggacaatatagaaaagatgttacggatattattgaggctaaacacattcattttgcacaaggaaaagcaaatcaagctgatgcaacatattttgcgtttagaatattaaataaatatcccttgataacacaaaatattgttcgtcgatttccaattctgataatcgatgaagctcaagatacaacagagttgcagatggccataattgataatttatctcaatttggagcagagtctattatgttaattggagatcctgaccaagctatttttgaatggaatacggccaatcctcatttatttatggaaaaatataatagtccggattggcattcattggatctgtcggaaaatagacgcagctccgaaaaaatatgtcaattggctaattatttctctggaaatacaatgagttcgatagccagcgataaagattgtgctaagaatccatgtcttaaaggtcatctcagcacgtcggaatcagtcaatcaaatagctgataactttatagaaacatgcaagaagataggattaaacgaatctgaatatgcggttgtatttcggggacaaagttttggtgagacatacttcggattagcaaatactgataatccaacaagacagaatagcccttggataaacggacactacggtgttcgagatattgtatatggaaagtatttgattgatcagggaaaatacaatgatgggctgtctcttattgaaaaaggttactataaaataacaaagcgagtacggtatgttcccgcaagtactatacgaagggaaatagcggaagtagggtttagaagacatagagcagaaatgtttgattttattcaaaaattaccctcaacgaatgacactctgtctaattggattacggaacttcaacaaaagggcataaatttaactattgatttgggaaaggcgaatgtccgtattgaatcgctttttagaacatccaatcgagaattacgacaggaacgcccttatttacgaacaattcattcagtaaagggcatgacattagaagctgttttagtatttctctctaaaaaggctgctcatacaaattatacgactattttgaatgatcctggatactgtattgacaataatgaagagctccgtattgtgtatgtggcctgtacacgacctaaaaagttgttatggatagccgttccatcagacgatattgattgttggagaaataaattatctctctaa

SEQ ID NO: 73524 - DNA, 1713 bp, Eubacterium sp. CAG:603
atgaagttgataagattaattattgaaaactatcgaaattttgaagcacttgatttggaaataagtaatatgaatgttgtgtttggtgttaatgatattggcaaaactaatttgttgtcagctatcaggatgttattagaccctcaatgtagaaggaacggatttgttgattctgattatcatttaaaggatacttcaaagaaaattagaatagttttaggcattaacgtgtcagatgaagaggatgaggatacaaagaaaatttttgccaaggcaaaagttattggaacgggaaaagatacattgtatatttcgttggaaactcagtacaatgcagaaaatctattttcagaaattcatatgtcatggggagatgacttggatgatttggagccgatgatattgacacagcaatttagatgtgatgttgataatatttttaatgtcatttatattgactcttctatacaattggatgcagtttttaaaaggtatgcaagaacattatttcaaaatcctaaaagtatagaggagtctgaaaaaacagatttacgagcatgtatagataatttaaattcgactatatcgggtattaaattaatagatgaatttcaaaataatttgagcaaagaatatgagcattacagagaagagggacttgagataaagataaaatctgaagttgaaatggataatatatattcaaaattaattccttatatttcctatgaagatggtaagacctatcctacggcaggagatggaagaaaaaagatagttgaatattccattttaggaatggaaagtcgcgaaagtgagaagaagaaaataaacatctttttggttgaagaattagaaaatcacttgcacagatctttgcagatttcattatcgtttcagctttttgaagataggctgtttaggcatatgtttattacaacgcattcttctttaatagttagcaggatggataatgttacattggtcaaattatataacccagaaaaggctgatggaaaatctgttgagtacatagttcctaaagagtataaaaagaataaagctaagcttaatacggaactaagtgaagcaatatttgctgaaaaggtgttattagtcgaaggtccatctgaaaaaattctgtttgagagagtattgacagatcttgcacctaagtatgaatgtaaagggagatatatcttacaagttgatggtgttgcatttaaaacttattatgaaattttaaataagttagggataaaatgcttgattaagaccgacaatgatttgaaatactatgaaacagacggaaagattgagtttgctggaattaatagaggtgcggagattgctggtataagtaagaagaataagagagcattgaatactattatttctaagactcaatttgattcagaaagaaaacagtatcaattgcactatttcaacgagttttcacgaaccattgaagaattgaaggacaaggggattttcttgtctcaaatcgatttagaaaatgatttatatgaagtgattccaagtacgatggaacggtacgtttcatcaaccggtgggagattagatgccgttgattatttgcaaaaagcaaagcagaatagaatggtggctttgtgtgagaaaataacaaaaacagattctcgagcgatatttgaggatgacaaatttttgtgtattaaggagttggttcaatga

SEQ ID NO: 73525 - DNA, 1557 bp, Eubacterium sp. CAG:603
atgagtgaaataagggatagtaaaattcgagaatcaatacttacgacagatggtaatattgttattgcagctgatgctggaactggaaagacatatatgacagttgaaagaataaagcatgatgtaatgaaggttgataattatcagacttatgctgctataacatttactaataaagctgccaaagaacttatggataggttaggagaaatacagcaaggatttgtcgggacaaatgataaatttatactcaatgaagtgattataccattttcgaaagatgtatatccacaggttaagggaaaaattattaaaacggattattctgcagcagaaaagtgcgacaaagggaatgatttgttagcgcgatttgtagaagatggtataattggaacatatactaattcgcatcataattttgcatttaagttagcattgcatatattaaagaaatcgcacgcagcgaaaagatatttgagtaatagatattttagaatatatgttgatgagtatcaggattctgataaagatatgcataatttttttatgtatcttaatgaggaattgtgtattcccttctttatagtgggagatcttaaacaatctatatatgagtggcgcggaggttatccggatggatttaagaacttgttacaaagtcaaaaatatacagattttaaattattgcataattttagatctaatcaacaaatccaaaactacgcttcgatttttatcgatgatataagagagaattatcataaatgtgttttaaatggagaagtaaaaggatgcatttatagtggagatagtgtgcttatacaatatatcgaaaaatggttaatgcaaaaaggaaattgtgcttttttagtctatagtaatagagaggcaaaagaatgggctgaaaaattagctgggttgcagtttgtgtatataccaagagcacctatagatgagccggagttggataatgaacaagtgtgggtagcaagatgtgttgctaattatttttataagaaaaggtatagtgagtattctttttatgatgaaataccaaatcaagatgcatacgatattttttttataaaaaatacattacaaactctgaaaaaagaatactataaaaatgggtggaccaatttggcaacggaatgtgttgagaaactttatcaatatatattagtagcttatgatgaagacaagatgaagtgtgaaatacaaaagttgaaggaaacaattgaagatactcagtatgaaaagagctttaatatagagttgtatgacagaatagtaacgacaattcattcttcaaaaggattgcaatataatcaggttataattaattctgataattttatttataataatgaacttagtaactcagaagttcattatgttgcaataacaaggccagaggaacgcttgttagtgctctttaagcaaggtggaaggaaagcggaaatgtattatagggctataagtgaaagagcaagacaaatagaggttgagggaattcaacaaagtgctaaggatataatacagatagaaaatatttaa

SEQ ID NO: 73526 - DNA, 1716 bp, Firmicutes bacterium CAG:822
atgataattaagaagttgaaaattaataattttagaaatctaaaaaagttagaaattaataatggtaataacattaaatacatacttggaaataatggcattggaaaaagtaatacattagaagcaattaattatttttttacaaaatcaagttttaatgaagatgatttcaatgatgtgaattcaccaatagaaattgaagttagtttgtttttaaatgacattgaattgggatattttgatgatatgttcgatgttggggattctaatattataagcataagagctatacaagaatctcctaatgatagaatagaatactatcatgttgatactgcgactgctataagctatcagaaaattagaaatttaccttgtgtttactacaatacaataaatgcgcctgatgaattaaatttcatgaagaccaagaatagtggtaaattcttaaataatttaatagaaaattatataagtgaaaataaaataaatgtggatgaacttgttaatccagaaaaaattgataatatttcgaaacatttgaatcaaatattaaaattgattaattttattaataacaataatctgtctgtaaattttgaacataatataatcgatttattacctagattaatagaattaaaagacgaagatgaaatgtctgtaaacaagatgggaagtggtgttagatttagttcatatatatattttgagttattaaataagataatgcaaacagttgacaataattcagatagcataataactacttctgataacaaaagatatataagtatttttgtgttgcttgatgaacctgaaatacatcttcatccatatatgcaacgtagcgtaataaatgatattagaaatattataaataataatgatctgaaatttctagaacttataaagcaagtttttggcttagatggtatttttgggcaactatttatagttacacattctccaaatattgtatcaacaaattttcatgaaatagttcgtttagacttttataaaggtgatgttagagcatatacagatttcgactgtgattttgatgataaagatgaaaaacattttgttcttcaaaatgatagaattaaagaagccttttttgctaaatcttgtattttagttgaaggtccaacagaacgagtagttttacctatttttgccaataatatgggaataaatttagatgattataatattggtataattcaagccgacggagcagattcgattccttctttagtaaaaatactcaatcattatggaataaatgcaaatgctgtaatggataaagataaatacaatccttcatataaaaatgttgtatctaccaaatatactttttttgaagaagaatatattatgaatctattatcgcataatcgaactcatattttatataatattttaaatgatattgggcaaagaaaggatttgattattcaaggatctcaaatatctaaagttcaaaaaaggattagactatcagacgttgatgaaaaagattataaattaatagatgcattaaaaatgactaaggacaatcaaaatcaaaaaattcttgtgcttacaacatggttatatggcaataaaaatacaaactttagtatatgtcttgctaataatacaattaaagatgatattccggatgtatattataatataattaaggtggcggtattaaatgccagaaagtag

SEQ ID NO: 73527 - DNA, 1761 bp, Firmicutes bacterium CAG:822
atgccagaaagtagtattatagataaaataactcaaatacataacggagataatgatcaaataaatataattctttctaatgagaaaaaaataattgttgaagctgcagctggcagtggaaaaactaaagttttaattagttttgttgcttacaaaattgcagcaaaacaattatcgtcaaccaaaaagatattggctttgacttttagtgtgaatgcagcttataaaattaagaaagatgttattgaacaaattccaagtattctcggtaataaaatgttaaatgaaaaaaatatatctaagagggttatggtgtcaaattatcatggcctatgtcgaagaattttaaatttgtatagtggcaaaatattaaaatttcaaaaaagaattgaagaatttaatattgtagatgatagtgaaatactaaaaaaagtcatactaacagatgaagaaaaagaattaattaatgattttgatcaagttattaaagaaggtaatatagacaaatttaattctctatattcacagtataataatcttattttagataaagtatctatttcgggatatttgacttacaattcaattattactcttgtgttaaaaatatttgatgaaaataaagtaataaataatcaatataaatcattgtttgaatatattgttattgatgagtgtcaagatacaaatgtccttggatatgaattgttaaaaaaacttattgatagtaacactaaactattattttttggagattcattacaacgaatatatggttttataggtgctattcccaatattatgaatttattaaagaatgactataatatgcgattggttagattaaatcataattatagatttgaagataatcagaatctactgctattagatagaaatattaggtataattcgtacaatccagaattgataactgatttatcacatccaaacattatatgttcaaatacatatgaatcagaatacacatggataataaataaagtaaaagaaaatattgaaaataactctaattctactattttggttaaatctttcaatggaaatgataatacaaaaagattgttggaaaaactacaagaggaaaatataccattttttaatgcattatttacagacgaaggcgaggaatatatcgattttcacagaactgcatataatgttttttatagagagatatatgagaaaaggaaaatagctaaaaaggtgttagaaaaatgttttgttgaaatatctgacaagtacaaagatagtaataatcaagtatatttgtcactattaattcttttaagaaaatttattgattccatttctgaaatatcaagtgcttataaatttgacgatttattatttttcattatggatgttttattgaataatggtttgaaacaatatatgaataaaattgatgaaaaagttatcgttgcaacaattcatgctttcaaaggattggaatcagatgttgtattcttggttgatttagaaagaaatatttttccaagttattatacatgtaaaaactgcagtagtgttgattgcagcaattatgatggaatagaaagttcatttattgatgaattgagtgtttattatgttgcaataactcgagctaggaaagaattatttatatcttttagtaaaaatcaacttacgaaatttggaataaaaccatgcaagggtagttgccttattaatttgcctggtatagggtatgataattatttaattataagtgaataa

SEQ ID NO: 73528 - DNA, 1989 bp, Clostridium sp. CAG:1013
gtgcaattatcaaagattaaaataaaaaactaccgattgcttattgatgctgaactggaagtcgatccaaaaacaacattgattgtaggacgcaacaacactgccaaaacctcgtgcttcgagtgcatcggtaaagtattggatggaactccgttttcttttaatgattatccgttgtcgaaaaggaacaatctatatgctaatatcgcttcattcatggcaaaggaaattgcttttgaagatctatgtgaacggctggaaccaatatctatagagttccttgtagattattccctggatgacccggaggataacttaggcgcattgtctccgtttatcatcgatgtagatgtggataccactacagcgttgattcgtgccgaatacaaattgaaagcagacgagaaaggtatttggaaaattttagagccaaaatattatgaaaatgggagcttttctcctgctgatgatgtccataatgctattataagcaattttcacaagctttttgaaatgatgatttatgcaataaatcccaaaaaaccagatgaaaagcagagtaaaaagcagaaagagctggccgaattatttccgtttcacattatccaggcagagcgccgccttggtgaagacggaacccaagacaattctttgtcttcgcttatctctgatttctttgacatgagtgaagatgaattagatccaagtgttgctgaaaaagttaaggaacttcgagcaattgttgaaaacgccaataaaaacgtccaacaacagagtgatagcatcctaagcagtctcgtcagtaacgcagtagggttcggttatcccaatggagaagaactacagttaggggttacaacccaactaagcattgatgatcagataaagaatcaaacccaactttcttatactgctggaacaagtaaagagcgactccccagtacctataatggcttgggatataaaaacctgatcaaaatggaatttcttcttgcagcattcgccaaaaaggtagaaaaatgtggggacgcctgtataccgttactttttatcgaagaaccagagtctcatatgcatccgcagatgcaacacgcctttgcagagtacttagaagcgtttcttgcaaaaattacttctgtagggattcaaactttgttaacgtcgcattctgctcatattgcgaacacgatggttttctctaaaattcgatatgcgcaaaaaacaaaggctggtgttatttataagaacctaaatacgtttgctcaggagaatccttctaacactgatttcatccgaaagtatcttactctaaccaagtgtgatttattttttgcagataaagcaatctttgttgaaggggcgtcagaacgtttgttgttgcccgatatgatccataaatgcgctaaagcgggggactttgattctcgggaatataaactacctgctcagtattatgccttggttgaaatcggcggtgcgtatgcctataaatttattccgttcgctgagtttttgggtatcccatgccttattcttactgatttggactctgtgtctggtcaaaaaggtgcgaacgggagaatatattataagtctgttccggtttcatgtggtgaaacaacatctaatgaaactctaaaatggtgggtccggaagaacaaagggctttcagcggatgataatactcaaatcactctaactgatattacatcgatgtctcctgctgataaaactcgatgcaaatgtcacattgaattccaaacaacagagaacgggttgtgcggacattctttggaagaagcaattcgaaatgtcaaccgtgcacattatgaattgggggatactcctactgaagacgatcttgagttttcagggaagagtaaaacagattttgctcttaatctcatttgtgaatgtgaggattatgctattccagcctatatcaaagatgggctggtgtggcttaatgaccaacgggtgcttgagtaa

SEQ ID NO: 73529 - DNA, 1746 bp, Clostridium sp. CAG:1013
gtgagtgaagaatacaaaaggacaaactacgaccttgcaaaagctgaagccgataaagtagacgaacaaatcatttcagcacttcagaatgggattagctttcgtgtggaggctggtgcaggctcaggcaagacatattcgctgaacaaagccattgaatggattcaggcaaataagtggacggagtatcgccgaaagaaacaaactgtagtttgcatcacatatacaaatgctgcggtggatgtgattgctgaacgactatcaaaagattcatttattcttccatcgacaatccactcctttgcatggaacgctatcaaacagtatcaaagctttctcattgatattgtcacaagcgatcctgacttcttgccagatgaaggtgattttttcaaggtcaaagaagttacatataccttggggcatcgttacaaggaaaatggaattcaatatttataccacgatgacgttctaaagctcttttgtcggcttttagataatgcaaaattccggcgtgtattcgcagacaagtatcctttgattttaattgatgagtatcaagattcctataaaccgatcattgatcgctttattaacttctttattgcagagaaaaaaggccctcagttcggtttttttggtgatgcctggcaaaccatttatcaagccaacaaggcttgtggtctaattgaaaatgagaacctcgcaattatcaagaaaggctcaaatttcagatctgcaccacggattgttcggcttttaaatgatttgcggcctgacttaccccaaacatctgcaatagatgattttgacggagaagtgattgtaatcacctgtgacgattacactggccctcgccggacagaacgcaatctaaaaggcgaattacctgcggaagaattaaagaatcgtctaagtaatgtcacagagaagatcaagcgtgaatcatccgaagaggatgatctaaaagttctaatgataacgcataaggtcctcgctacgcagcaagggtacgaacaacttttagaaattttagctgacgggctgagagataaagaagatctgttccttctgttttttatggatactgttgagccaatctataaagcacttaaagattcaaatatgcagttgctttttgatacactcggaattaagcgctttcccattaagaaaaaatccgaaaaagtcaagtggaaagagctacagcagcagttggaagatgctcgcaccaaaagagcaattgatgtatttgagttaatcaagcggaccaaattgattcctattcccccaaaattggatggatggtatcatctatatcagaaagcgccagacacagtgtatgtttccaatacttcaattcagtcatttttagaattggactacctgcaatttaccgcagcaatcgattttttgtttcctgatgctatgttttccaccgaacatggcgttaaaggcgaagaatatgacaatgttgtctttgttatcagtaaaggttggaatctgtatcagtttgaaacctatgcaccgatgataacaggacattctaatgttcccgaaggaaagcaagcttcttatgaaaggaacagaaatctattttatgtgtgttgctcaagacccaaaaagagattgtttttctttgtgtcggttccagtagatgcagtgttcagagcttttcttactaaactggttggagctgataatatctatacctatagccaatatcttgaaacagatttgaaataa

SEQ ID NO: 73530 - DNA, 2088 bp, Firmicutes bacterium CAG:129
atgaagctatctaaactgaaattgtggaattataggtgctttggctcagaagagcaggtcatcttaattgatcaactaacgacatttattggaaataacagtgcggggaaaactgctgcactgtcagcccttaattgtatgttttctgaaaacagtaatgatcgtattctacacagaagtgattttcatctgcccaaagatatacttccagatgaaatggaacagcaaagtctttatatagaagcagtatttgaatttgaagaattgcagtcaggaagcaatggtggagaatatgctatacctatcttttttcaacactttgttgttgataatccaggtaggctgccgtatctacggatccgtcttgaggccacatgggaaaaaagcaatactattgacggctcgattgatagcaagataagttatattacttgtccggagtttgctgaaattgaagagggcaatcgaacaaatgcgtctcgacgggatctggacaagattcgagtgatttatgtcccagcagtcagagatccttctaagcagctgaaaaatgcatctggtacgatgatgtatcagatcatgagcagcatcaactggagtgaggagacaaaaggaaacgttaaagccaaaattaaggaattaaatgaacaatttgaagaagaaaaaggcgtttccatgtttggcacgtcgctgggaaagcagtggaaaacctatgattctgatgagcgatattcgacagccagcttaagattcaacagcgctgatattgaaacatctatcagaaaaacagaggttgtttttgaaccgacagaaacgggaaaagagtatacgatagaccagatgggagatggtctgcgatctttgttttatatatctttggttgacagcatattggatgttgaaggtcaaatggtgagagaaatagagatagatccagaacatacctctttcaatagaaaaccacccattttgacgattgtagccattgaagagcctgaaaatcacatcgctccacatctgctggggaaattggtggggaatttgaaagatattgcaggcaaaaacaatgcgcaagcaattatgacatcccattctcctgcgattgttaagcggattgatccagagaatctcagatactttagattagacagggagttgctggcatcaaaagtaagatgcattactctgccggatgaagaacgtatgcaggatcaatataaatatatcaaggaagcggtgagagcctatcctgaactgtactttgcaaagcttgttattttaggagaaggagatagtgaagaaattatcctgccgaagtattgggaagccatacatgggaacacagatgttagtggaatatcgatagttccacttggaggtcggcatgtcaaccacttctggagattgctgaatgacttggaaatcccatatattacattgctcgatttggatcgggaacgagatggtggtggttggggacgtatccaatatgtgcttaagcagctcattgcaaatggatacgacagaaatgtactactcaacaccactgatagcgggattctaactgatgccgagttcgaaggaatggcgggctggaatgtatctgctataacagcaatgcagacttggatagcatggcttgaaaaatataatgttttcttttccgcaccgttggatatcgattttatgatgctggaacagatgggagatacgtataaggcaactttggatacgagagaaggaccttgtattgatattgcccagagtggaaagaaagaacgtattacaaaaattgaaaatgatggtgaaatacactcggagtatgaaactcgaatcttaaaagacataaaaaacacactaaaagaagaaggcggtgatggacatacctactcgcccgaacagcaaaaactcatggtatggtacacatatttcttcttgaacagaggaaaaccgtctacacatattgcagcactatctcaattaagtgacgaggagttaaaagaaaatgtaccgccggttttgcaacgtttaattgaaactgctgatcacattctaaaaggtgataagaatgaaaattgtgcatcctga

SEQ ID NO: 73531 - DNA, 1869 bp, Firmicutes bacterium CAG:129
atgaaaattgtgcatcctgataaatggttgccttgcgacgggatctcgttagaggaagctgcggatacagccgttcgctgcagtgacagacatgtactggttgttgcggggccaggcgcaggaaaaacggaattgttggcgcaaaaagcagcatttctatttcagacaaatcagtgcagagagcctcaaaagatacttgctatcagtttcaagacggatgctgcacagaatttgaaagaacgcgtggaaaagcgatgtggcacagatataaaaggtagatttgtatcaatgacatacgatgcatttgccaaaaatattcttgaccactttctatatgcactgcctgatgaacttcgcccggccaccgattatctggtgaatgatcccgatataattgatgcagcgtttcattgtgcgggattcaaaaaccctaatggcttcacgcagtctaggctgaaaactgaatatgatgatattctgtcacgaattagtcttcctttaacaggagatggattagggcataaagtgtggccactattgttaaagggattcaacggaaataaagcgactttgacatttaagatgatcatgatgcttgccatgtatattattgaaacgaacccgtatattaagcaagccttacagatgacgtattcatttgtgttccttgatgaatttcaggacacaacggcaattcagtatgcgtttgtaaaggagtgtttttggaattctggtaccaaggtaacatctgtgggagataacaagcagagaatcatggtatgggccggggcagtaaaaacgatatttaatgacttttatagagaactgaatccgaaatgtatacgcttgataatgaatcatcgttctgcacccagattagttgcattgcaaaaggcaatgtatgaatctttaaaagaaaaggcaacagaagtatgtgcttctggcaactgggccgaggatgatgggaacattgcactttttattgcagacaatgaacaactggaggctgctgctgtatcgaaggatatactattgaaaatctcaaatggtgtagaaccacacgatatttgtattctctgcaagcaaaagccgcaggactacgcttcggcgattattgaggagttggagaaacacggtgtacgggcgcgcattgaaactggctatcaggatcttatcaaagaaccaatagtagatttgtttatcaaattcatgatatgcgctgacagcagaaaacacccaaatgaatggacttttatagaagagttactggttgagctttggggaattagcgggatgcgggaaaatgatacttttgatgaaatgcagaggaaactgtctgctgtagtgaacgttgttaagaagaatattcagcaaaagcttgatacagagcaatggcacagtactttgaatagtattattgatttttttggcattggaaatataaaggcgaaattcccggcgtataaacaaggtacttactttatgaatgtaatcaaccaatttgaaagtctcttttttgaggaatatgtagccgcacacggagtatggaacttagcgattgaaaactttcgcggagatcattccgttcctatcatgacaattcataaaagtaagggattagaatacaatgctgtatattttattggattagaggattccgctttttggaattttagaaatcaaccagatgaggatagatgtacattttttgtggcgctatcacgtgcaaaggcgtctgttacatttacattttgcaaaaaacgaactggcatgaagtgccctatgcaaagacacaacgcgattaacgaattttttgatttattacaaaggcctggaattgcagaggtaaagcgtttccaaaaccgctaa

SEQ ID NO: 73532 - DNA, 1959 bp, Clostridium bartlettii CAG:1329
atgtatttatctgaaattacaattgaaggatatagagtatttaaggagaaaacaactataaattttaataggggattaaatttattggtaggagagaatggttgtggtaaaagtacaattattgatgctataaggatattgcttaatgaggatgaatattcaagaaatgggattaatgatgaagatttttattcatcaaaagattataaagaacaagcagaaaagatatctataaagggtaagtttgaagatttatctgaggataaaaaaatagaatatttaacttggttagataataattatgatgctattttaaatttagatattatcaataaaagggataaaagggatcatttcaaaaagaatatttggggaggagaatctagtaatagcatttttgaatgggaaccgttaaatgatatacaatgtgtatatttaccagcattaagggatgcagaaaagaagcttagagctagtagaggctctagactagcgagattactactaaatttatcacaagaagaattaaaagctaaaagaaaagatggaaatttaatggatttagaggaggatgtaaagacatttaatgaacagttagctagtaagagtcaaattgcaaaagctgatgaactaattaatagaaatattaaaaatgcattaggaaatatatttgggcagaatacaaaaattcaatttaatgatttttcttatgaaaaaatagttgaagggttaaaattagtttttttcccagaaatatcacaaagtaaagatataacatatcgaaatttagctgaaaatagtctgggttataataacttaatttatttggccactatattagctgaatttgaaggattaaaagaaaattatacatctcctagaattttgttaatagaagaattagaagctcacttacatccacaattacaaataaagttgcttaagtatttagaagaacaagcaaatgaaagtgatattcaagttattataactactcattcaacaactatagcagcagctactccaataaaaaatataattagtattaatattttaaaggataatagcataaaaataacatctttaaacaaatgtggactagatgatgatagcgaaaagtttataaatagatggttagatgtaacaaaatcaacattactattttcaaaaggtgtgattttagtagagggaatagcagaggctatgttaattcctaaaatggcagagatatatctagatagtttaattaaaaaaggatctaaagaaaaaataatacctaaaactttggaggaagcaggtgtttcggtcattaatatgaatggaatatattttaattattttatgcagttatataatggctacaaacctataataccagagagagaagaaggagagtcaaaaaaagattataaggagagaaaaaataaaattataaaaaaagaaatttataatgaagaagaaattgaaagtacagattacattccaatacgttgtgttgcattaacagataatgaccctgaaaaagatgacaaacctcaacaaggggaaggtttagaagggaaaaactataacctatatcttattaaacaattagaaaatatgacgaataattgtaaagtttttaaaaatgaaaaaacatttgaatatgacattgctttagaaaaggataatataaaacctatgatagagataatacttgataaattagatacaaatggagatacaagaaaaaaaatgaatggttatttagaaaaaatagaacaagaccaagaagatatagaaactaatgaaatagcaggagatattttacatgagattgataagtcatatataggaaagggattatttgcacaattattattagaaaaaatagaagagagtggtaaatgtgagattccatcatatataaaaaatgcaattaaatttgttttagacttaaaggatgatgacaatgattaa

SEQ ID NO: 73533 - DNA, 1941 bp, Clostridium bartlettii CAG:1329
atgattaaaattagaaaacagatatgtgaagctatatgtaaaaaaagcacttgttcacaggatataaatgagtgtgatggaagaatggcacatagatgtaaaaatataaatgcaagtttcattaataatttaaatgataatcaattagaatatattgtatcaagtattgaagataatatatttttaaaagcatgtccagggagtggtaaaacagaagttttagggattaaaagtgcatatgaaattattaattcaagggaatcttataaaggattagctataattacatttacaaattctgcagaagatgaaataaagaaaagagttgaaatgtatttaggagaaacattaagatatccaaactatataggaacttttacaagttggatacatggatatatagctaacccatttttaagtaagatttcgaaatatgaaggcaataatgaaaatgataaaagtattaaaataatagaaaataaagagataccaaattttcttagatgtttttcaagtaattatagttacaaggagttgggaaacctaaatccttgtgaatattattatgatataaaggaaaaaaaaattatatattgtggtaataaattgaaaaatagtaaaaagagtcaagaaattttagaaaaattattagatgataatgaaaagagattggatgacttaaaaaaattaaaatgtaaattctttaaaaaaggattttatttatatgaagatattgaatttcttgtgtatatattactactgaaaaatagggatatagctaagtttatagctaaccgatttccaattattttaatagatgaatgtcaggatttatcttatatacaattaaagataattggattacttaataaacaaggttgtaaaattcatttaattggggatttaaatcaatctatctataagtttagaaatatagatccacaggatacattaaactttataaataaattagattttaaacaaatgaatttgaatcagaattatagaagttgtcaagaaatcgtagatatatcacaggttataataaatgaggatgatgatgtacaggcaatttcaaaaaaggtagttgagaaaccattattagctatattgtatgaaaaggataaagaaatagatgtatataataaatttaaagatttgataagagataatggtttagatttaaataaaagtaggataattgttagaaacaatacactaaaatataaactattaggtctgaaaaaacaagagggcaataataatagattagaaactttggctagagctatgtatatgtggaagaatgttaataatataagtgaatttagaatgacttttaatttatttgcaaaatcagtgcaatctatatatttttctggaattgagcataagggagaaaaatttttctataagccgtgtgaattagatatggacgaatggaaagggttagttaataaaataaaacaaaggcttttattgtatgataatttattagatttttcactgacatgggaaaagtggaaaaaagaattaaaaaaaattatagacgatgatataaatagtatttcagaattggagaatagagaatatgatttaggaagaataagatcaggaaataaaaataaaacactagaggaaatattatcagataaggaatctaatattatagattgtaaaatagaaactatacatagctgtaaaggaatgagtttagattcagtattatttatgtcttcatataaaaagtctaataatcaagattcagggacattttggagggaatggtttgatttagaatatataggtgagaagaatagactcgcatatgttgctttttcgagggcaagacatttacttgtattggggatacctaaatcaagtaaatttactgataaagacaaagagactttaattaattttggatttaaagttatttaa

SEQ ID NO: 73534 - DNA, 1998 bp, Clostridium bartlettii CAG:1329
atgaaaagtccgtatatttcaaaagttattatagaaaattataggaactttaaaaactgtgaatttaatttatcacataaaggggtaataattggtgaaaataacgtaggtaaaactaactttataaaagcacttcaacttatattagacccatcaatatctgaggaaaataggtgtttaaatgaagatgatttttttgatggattagaaaatccagtagagaataatttagaaataaaaattcaaatatttataagtaattatcaagaaatcggaaatataatggcacaactagatgatgcaacagtaaatgatgatgatggggaaaaaaggcttaaaattacatataaatattatccaatgtatgataacaaaggaaacaaggaatatggatatataatatataaaggcgaggatgaagaaaataaatttacttatgaggatagaaggtatttaaatgtaaaagtcattaaggctatacgagatgtagaaagcgaaataaacaattctagaaaatctcctttgagtaaacttataaaaaattattgtatagaaaagaatgagttggatattatagctaaaaaactggcagagaatggatcggatatactacaattagatgaaattgtagacttatcaaataatataaataattctttttctagcatattaggacttgataatgattttgaagtatctttaaaaactatgaatattgatcctaataaaattcttaattcaatgaaaattatggtatcaaaaagagatgcaaatgatgtaagtttaggattaaataacctattatatatttcactaatgcttctactaatcaaagataaaaccataccatcttatattaagtttgaaaactatgagaagttaattaaatataaagatagtgatattatagataaatgctatacaaaaaatcataatggaaattattttttgaatgaagacttagataacgataataaaactaaattatataaatttatggatgaaaatgaaccaagcgataatggaataacaatattagtcattgaagaaccagaagcacatttacatccaacatatcaaagactaatttataaagatgtaataaaaaataatgatagttcagtgattttaactactcattcaacacatattacatcaatagccgatataaaatcaattgtacatttacataaaaaaagtaatggagaaaccaaaataaatacaactgctaatttaaatttagaagaatttgaattgattgatttagaaaggtacatagatataaaaagaggagaaatatatttaggaagaggtgtaatattagtagaaggaatagcagaagagtatttgatacctaaatttgcagaaaaaatggaaaaatctttagatgagaaaggtattattacttgtaatataaattgtactaattttaaaccatatattaaattattaatgaggctagatataccatttgtagtaattactgatggggatttttatattgagaaaaataatgataaaggggaaaagaaaaaggaatttcatataatgcatgatgtatatagggattgtgaatcatatggatatctgggtttagaaaatatagaaaatttagttaaagaattagctattactacagataatattcctgaagatataaatcaaaaatatgaactatttaacgaattaggattttttataggaaaaaacactttagaagttgatatgatgaatgaagcttacccaaataatgatgcaactaatgtattttgtgagatattcaatagacttactaatggaggtgaaaagcaaaaagaaaattttaagaaagaaatactaaacagagagtattggacgtgtcttaagaagattgagggcaacggaataggaaaaggaagatttgcacaagctattacacctaggatactagaaaatcatataccacaatatattaaagatgctatagagtatatatttaagaaggtagaaaattattaa

SEQ ID NO: 73535 - DNA, 1851 bp, Clostridium bartlettii CAG:1329
atgagttattataaagaaaaaatagaacaaataaaaaaagatgagtatcaatataatgcatataatacagaagatagtacaattgtaattgctggacctggtagtggaaaaactactgtactaacactaaaaattatgaaattattaaatgaaataattaaaaagcctagaggattagcatgtatgacatttagcaaagagtcagctagagaatttaaggagaggcttactaaattaggatataaaaatagaaaaaatgtatttttaggtactgtacattcattttgtgttaaagaggttcttggtagatatgctcacttatataaaaaatataatataccactaccaataaaaataatttcaactcaagataaaaaaagattattcaatcaagtagtctcagatttgaaattagatggactttgtataagtaccttagatatggataaagagagaacacttaatatatcaggtatgagtactgtaaacgttgaatcatatgatgttgcgctaaaagttgctcaagaatatgagaacagattaattaaccttggatatcttgattatgaattaatagtaaaattttctactatattaatccaaaatgaagaatatgttagaaaaagtttaagtaaaagatttccttggattctcatagatgaatatcaagatttaggtaggccattacatgaaatgattttatcactttttacaactactaatataaaaatatttgctgttggtgatccagatcaatcaatatatgggtttacaggagctattccagattatttaaatgaactttattctagagaggatattactttgatagaattaaaaaataattatagaagtaatcaagatataatagatgcatctcaaatatttctaaagaaaaatagaggatacaaagctgtggcgagaagagatgaacaagctgaatttacatttatagtatgtgaagaagatttagaagaacagtataactactgtgtagaaaatattatacctaaatatagagaattagatataaaattagatgagattgtaattatagtaaagaacaataaagatgttaaggctatggcacataaatgccaatgtaaggatataccttattatatagcaaagaatgaatatgatagaagtgacacaataaggtggatagaaagctgtgccaagtgggtattagataatacattagtatcatttgattcaatttttagtttttgggaaaatattgtgaataaacattataaaaataaaataaatataaaaaatcgtatttttgagaaaagaagtttacaaagaatattaagaagtagttatatatattcagatgatttaaaaatttggatggaatttctaattaaaagtttggatattaatactttattaaaagattctagtatttatcctgatgagctgaataatattaaaaagtttattaaagtattaaaagaaagtggatattgtgataagggtatagaattcttctcaaatgtaggtaggcccgaaaatcaggtaacaataactactagacatagctctaaaggcctagaatttgaggtagtaattttactgggaatggaagaaggtaatttcccagactataggtctacaactcaaagacaaattgaagaagaggaaaggatatgttttgtatgtattagtagagcaaaaaagtcttgtgtattaatacgatcccaatataataatatacaaaaaagaaatgggggaatatggaaaaaaactatgcaggaatctcgattttggaccaaattatataatagatatgggtgtagtgaaaattcagaaatggtaaccgaacataatattaacaaaaagtaa

SEQ ID NO: 73536 - DNA, 1737 bp, Firmicutes bacterium CAG:884
atgaaattatcccgagtaaaaattaaaaattataggaatttttttgatgaagatatttctttaaataatgaaacaattattattggcccaaatgatgttggaaagactaatctattgatggcgataagaattttgctagataagagtttatcatatttagatttagagccagaagaaagagattttaatattttttcagatgaagaggaaattacaattattttagaattttcagaaattagtgaaaactctgaaagttttatttatgctagtctaggtcaagatattgaagatagtaaaatgtatttaatgtataaaggatataagaattcagaagaaaaatttaaattctttatgagtgcaaaggaagataaagaaagttttcatgaaattcctggaagaaataaatatattaatttaataaactgtgtatatcttgatagtactagacaattaaaaagttttttaaaaaaatcaaaagctaacattattaattcgtataagcaaaaaagaaattcaaaagaaattgacgatgacaacaatttgatattagaaattggcaaacaagttaattatttaaatcaaaaagtggaaaatgtaagttatattagtaaatctacagaatttataaaatcagaattaagtgaaatgtcttctcataatgataatcttgatattaaattttcttcttacaatgatacaaatgaaataatggataatgttgaattaataacacaggttgatggtaaaaatgttaatattggtggtgatggaagaagtaatcagatatatatgtcaatgtggataaaagaaaaaaatgaaaaatatgatgattcaaaacaatttgttatttttattttagaagagcctgaatcacatttacattttccacttcagtcaatgacgattagacaacttttaaaaaaaataaatagtcaattaattgttaccagtcactcacctcaagttgttttagaatttaatccattttctatagttaaactttcatatactaaggataaaaaaactatagtatccaacaatggctgttctaaagagttagaagatgatgtaattaaatttggatatagatacaatttaatcactggctctatgttcttttcatcaggagtttttttagtagaaggtgtttctgaacttttgatatataaatatatttctagcaaacttgatattaatttagaaaaatataatataatgatagttccagtagatggaataggatttaagccttatgcaaaattattagatagattatcaatcccttatgcagtaagaactgataatgatattgtaattaattcaaaaaacaaaaaaatttattattcagggattaacagattaattgatttgcataatgaaaaaataatgaagaatgattggatttctaaagaagaattctctaatttaaatactgaaaaattaagtagcgaatctttaaaattgtatcaaaaatataaaaaagattttatggatgagggattatttatttctgaaaaagatttggaaaatgatctgtctaacattgactttttatcagattatattaagcaaaattataatggcaaagatgagtttgttaaatatctacaaaacagcaaagcaaaaaacatgtatgattttattgatgaaattaagaatataaatatcacacgagataatattggcgatttttataaaccaatagattggttgattgggaaagttaatgaataa

SEQ ID NO: 73537 - DNA, 1581 bp, Firmicutes bacterium CAG:884
atgaataattttactttgactaaggaacagcttgatataattaatgctgaaggaaatattgttgttattgcagtacctggaagtggaaaaacaactacaattacatataaaataaaaaaaattctctctgaattagatgaatatcaaggagtgatagcaatatcctatacaaacaaagcaagtaatgaattaaagggtagagtcatgaatatatcagctgatttacataattctttttttgggactatttatagtttttatttatcagaaataattattccatttgcaaaatatttatataattattataaggaagttgaagttgtttctcgtaatgattttgattgcattgaatttgaaaaattgaaagaagaagaaaaaattgaatatttggctaaatattttaaggatggtttaattattttagaagagattccttttttggcaaattatgtatttgacaattcaatttcttgtagaaaatatataaaggcaaaatacgcatacatttttgtagatgaatatcaagattgtgagtgtttgcaacatacaattttcaaaaaaattgtaggattagggataataggagtagccgttggagatcctgatcaatcaatatttaactatagtggtagtagtccgaaatttttgcttgaattatcagaattatcagattttaactcatttgggttgactattaaccatagatctcatccttcaataattaattatgcatatcaatttttatttcctcaaaaaaaatatgaaatatgtgatgataaaagagtttataaatggaatataactggcgacgaaaaaatattagctaataggattgataatctaattcctagactattatcaaaatttaatattaataataaaaatgaaatagccattttatgtcgtaataatagtacggctaacttgttatttaactatatgaaaactccaacaatttatttttgcgaaactcctatagataaaagtagtaaatcttacgaaatattttttagagacctattaatttatatttctggctcccaaaaattatatcccgaaaacattttggataatcaagcaattgttattaataaaaggaaatatcaaaattatgttaatacaattattaatttcaaaattgatttttttaatacagaagtattgccaattgatgaaatgttaaatttaacaaaaaatatttttggtggagatattgatttatcaaatataatcgatactttaaataatgataattatttagttacatataagcctatggatcttgaaaaagtccatattatgacaatacataaatcaaaaggtttagaatttgatgctgtttttatactagatttacatgaatatatcttacccaaaattgactttaaaaatggtggctatatagatataaatgaagataaatgtgttcattatgtttcattaacaagagcaagaaaagcagtaataatggcagttaatagtataaggcacaattcaaaaggtgaagcaaaaaagggaatagaatcagaatttgttgacaacttgaaaagacctgatttaataatgtacagaaaataa

SEQ ID NO: 73538 - DNA, 2199 bp, Bacteroides sp. CAG:530
atgaaaatacaatctgttcatattaagaattaccgaaaattgaaaaattgtcatatagattttgacgagaagaaaacagttttagttggtgcaaataatagtggcaagacttccgctattagtgctattgtttggttccttaaaaacacagataaatttagtttgaaagagtttactgcaacaaattgggcagcaattaatgagattggcgagaaatggctcgaacatgattatgtagatgaagcattattggattctcatcaatgggataacattgtgccatcaatggacatttggataaatgtcgaagatggagaacaatatcgagtaaatcacttgataccatcgcttagttcttgggatggtaaaaaggttggtgtacgtggacaatatgaacccaaagatgtaaaaaaactatacacagtttacaaggatgccaaaatacaggcaaaaactttagagagtactgaagaatgggagaaagctggctctcctgatttatatccaaaaaatttatgcgattttttaggcaaaggtctaaatcttagagagtattttgatgtgaaatactacatcatagatccttctcttgatcctgatgacgaagacgaagtgcaaccaacgccagacaatgagataggcaacaatccacttgacggactaatcaaagtagatacaatactggcatcaagagatttttcagatccggaaggacaaacagacagtgatatagatacgttgtctaaacagtttcaacagtactataagagcagtgggcaagaagatgaagagttgacttgtgaggggttgaagatccttggaggtatcgtaactgctaacaaaacatatgatgaaaaattaaaaaagacttttgaggttcctgttggagaattgaagaacatcaattaccctggattccagaatccagagataagaatacgaagtaagattcagattgaggaatccataaaacatgactcagcagttcaatttgcaattcaaggtatggaggaattagtacttccagagaagtacaatgggcttggttatagaaatcttatctctatttatttgaagctaattgactttagggaaaaatggctaaaggaattaagtgaaagaaagagtattgagcctattcatatagtgtttatagaggaaccagaagcgcatttacatgcccaagcacaacaagtatttgtaaagaaagcttttgacgccttgtgtaacaataaactaattgaagaaaatccttggctaagcacgcaacttgtgttaagtacgcattcaaatcatgttgtcaacgaacttgatttgaactgtatgcgctacttcaagcgagtaatagatattgacgaaaagatacctatttcaaaagtcgtgaacttatctagtacattcggaacagacgatgagacaaagcaatttgtaacaagatatatacgtttaactcactgcgatatattcttctcagatgctgttatttttgttgaaggccctgcggaaaagatacttgttcccagctttctcgcaaaagccggattagattcttattatatttctgttatagaggtaaatggtcgtcatgcacatagtttccgcaaacttattgaaaagattggaattgcaaccttgattgtgacggatatagatgcgactgacgcaaaaatagaagacggaaaagaaaaacatcagtccgtaattacagccaaaggaaatgattataagacaggtaatccctctattaaaagttggctttcaggaaaagaacgaatagacgatttgttagcactggatgaaaaagaaaagcttgtaaataatgtaaggatagcattccaaacaccggtaaacgtcaagtgggataagactaaagataactttaccgaaatatgtccttatacatttgaagatgcattaatatttaccaatcttgaattatttcgacaggaagggttgaagaaaatgggtactattactacaatatcaaatctgttgaaacatagtaattctgctaatgaattacaaaataagatatttaaaaagttggaaagcaagagtggttttaagaaggccgactttgctatttctctgctttataaagacgactttgtcgatttggttgtcccagtatatattcaggaagggcttgaatggatgaagtcatatttggattctaatggaaacagaaatggagaataa

SEQ ID NO: 73539 - DNA, 348 bp, Bacteroides sp. CAG:530
atggagaataatatagactttcaagtagatgagacactagaaaagtgcattctttcaacaccgcgtaaaagtttctttctttttgccggagctggctcaggaaagacttactctttggttcttcttttgaaaaaaacacataatagtattggtaaaaaactcttgttgcaaggaaaaaatgtagctgttattacctttacgaatgctgccacagatgaaataatcaaccgattggattatagtcctatttttcacatttcaacaattcatagttttgtttgggatgttataaagcattatcaggcagatataaaaaattgtattgtttttatattgaagaagatttaa

SEQ ID NO: 73540 - DNA, 2631 bp, Clostridium sp. CAG:964
atgaaagataaatataaggtatgcagtttatttgccggcatcggcggcattgacttggcttttcaacaagcgggatttgaaattgtatgggcaaatgaattggacagcgatgcctgtaaaacatacagatacaattttcaaaatacggtattgaccgaaggagatataagaaaaatcaatgcagacgatataccggatttttatattcttaccgcaggctttccttgtcaatcgttttcggtatgcggtaacagaaaaggtttcgccgacgaaagaggtaatcttttctttgaaataatgagaatagtagatgctaaaaagcccaaaattatttttcttgaaaatgtcgctaatcttacggaacacgacaatggcaaaacctttaaccgcatacataatgagctttccgatagggattattatatacgatatctcattgcggatgcatgcaattacggaataccgcaacacagaacgagaacatatatcgttgcttttaaagattttgatatgtgtaacaaattccaatttccgaaagagcaaccgcttaaaaagcatatatttgatattatcgaccgaagtgtgaaagcagacaaaaatttttatcttaatgagaattccgtacagtatcaaaagatgaaaaacgctataacagacgaaaatcaaatatacaggttttcggattacggtattcaaaagagtaaagacgaaatatcttttacgcttaaagcaaatatgggaacatggtacaaccgtgtcccgattataaaagacaactttggaatcagaacgattacaccgcaagaatgtcttgccttgcagggatttcctaaatcgtttgattttcccgatattccgataaaaagtatgtataaacaatgtgggaacacagtggttgtgccggttgtaaaaaaatattgcaaaacaaatgagagaagtaggtatatacaaatgaaattcgaaaaaatcacaataaagaactttagaaattttgaaaatgttaatattgatttatcaaacaaaaatatattttttggattaaatgatgtcggaaaaaccaattttttgtatgctcttagatatgtttttgacaaagatattcgtaaacaaaatcttactgaatctgactttcataataaacagtatgacaaacctatagaaattattatcacgatagatattagcgatattcacaatagcgattgtcaaaaactcagagcgcaattaaaaggtgctttgttgagtaaacataataaagtttatattaagctctttgccgaatataataaaactgaaatgattgcgcttccgatattgtcgtggggtggtgaaatggaccatctttacgaaatgaagcaaagaggatatctttatgagatagattatgtgtttaataccatttatattgattcctatgtagatttgaatactctttttaaaaagaacgtaagtcaaattattaggaatgaaaaagaagaagaccgtgacacgcttgaaaaaatccaaaatactgtcaatgaactaaatgagcacatttcagaattatccggtatcaaagaatttgaaggtagacttactcctgaatataaaaaattccacgatgaaggaatatcggtatcaatcaaatccgagatagcaataaaaggcttatactctaatgttattccgtatataaaacaggacgatgatgataatttgtatccaacagctggtgaaggacgaaaaaaattattagcttattcaatatatgacattttgtcagatgatacttcagaaagtaaaatcaatattttcttgattgaagaaccggaaaatcatcttcataaatcaatgcaaatagcattatcacaaatactttttaatgatcaaaagtacacttatctgttcgttacaacacattctccgtttgttctttatgaaatggacaatgttaatttagtgcgaatatataatcaaaagaaaacgaacagtaaaagcgtattttataaagtaccggatgattttgaaaagaacagaaaaatgttaaatcgctgtttgtcagaagcaatttttgcgaataaagtgttattggtagagggaccttctgaatatatcctattcaacaaagtgctttctgtaattcacccattttatgagtcggacggcatatatattttaccggtagacggtgttggatttgaaaaatatatttcaatattgggtagacttgaaatttttaacgcaataaaaactgataatgatttaaggtcagttaaaaataaaaacacatttagcgtcttaggattttcaagatgcaataatattgtgggcaaaaatattttacccacagaacagattaacgaaaacaatgttactgcaaaaagaaagttatataatacaaatataaaaatcttagatgatattagaaataattgccacatctttttgtcgaaagtagacctggaaaacgatttggatgaggctattcacgatagattatcaacacttctatgtgtcgatgaaccagttgaatatttacaaaaattaaagcattacaatatggtagagttagttggaaaattaaccgatgaagattgtgttgcaatttataaccattataattttgcttgcttaaaggaggtttctgaatga

SEQ ID NO: 73541 - DNA, 1503 bp, Clostridium sp. CAG:964
atgaaattatctcctattcaagaagaaatagtaaatacacccggtaatttgatagtccaagcaagtgcgggaactggaaaaacacatacaatggtaaacaaaattgccaaagaaattaaaaaaattcataatcatcaagttattgcagcaatcacttttacaataaaggccgcacaagaaataaaggataggttgtcagttgatgtaacacgacattttatcggcacaaataatagttttgctattgatgaagttatcaaaccgtttatgaaagatgtatttggtgccgatttcgatttagatatgagtacagactactcggctaaagttgattctttccaagacggtattgaaaaaataaagaatgaaggcattttatcttcttataaaaacaataaagaaaatttcatatttgatttggcacaagtaattgtagaaaaatcattagcctgcagattatatcttcaagcaaaatatataaaaatttacatcgacgaatatcaagattgcgacaaatcaatgcataagttttttatgtatctatgtgatgaattaaaaattgaaactttcattgtcggagatgaaaagcaatctatttacatttggcgaggagcttatccggaagcttttaagtcaattgttggaaaacccaatttcaaaaaaatatttatgggggataattttcgttcttgccaacaaatacaaaattattcgaatttgttatgcaaagagactcgacacttatataaaccgatatccgatctgaataatattatttggctaactcctaatgaagaaaattgggcatcagaggtactgtcttacataaagccagactttaaaacagccctcttgaggtttagcaatgaaaatgcaaaattgggagccagtcaattaagtgcagacggtgtggaatttatatacattcctcaaacaccaatcgcagatataactaccgaaacagcgtggctctattctgcaattgctaaattccttttaattgaaacttattctgtatatgatttgatttcagaaataccggttgaaggaaatgaaagtcgcaaaaatgtttctacaataaaaaaactacttaaaaatattgaaaacacaaaatgtgataagcggtcatttgaaggatgcgttattaagctggctgaatatattgggtatgatacacgtacagatcacattcagaaattgtataaaactatttctgatatcagttatagagtagcatttgagccggataagtatcaacatatttcaattacatttcattcctcaaaaggattagagtttgaacaggtaattgtatttgcagaagattataaattatccgatatggcaagcgtttacaaccattatgttgctgtcacaagaggaaaaacaaaattaattattgtgaattcaagtaactataatgctgtatgtttcaaaaagaatttggaaagcatattgtctgaaagtcatttaaaaataagtgacgttgtaaccacaaggtaa

SEQ ID NO: 73542 - DNA, 1989 bp, Firmicutes bacterium CAG:94
atgcaattatcgaaaatcaaaatcagaaattatagattgcttcttgatgccgaattggaggtcgattcaaaaacaaccttaattgtgggacgcaacaacactgccaagacttcctgcttcgagtgcatcggtaaagtgttgaatggaactccgttttctttcaatgattacccgttatcaaaaagagaaaatctgtatgctaatattacttcgttcatggcaaatgaaattacttttgaaaatctctgtgaacggctggaaccaatatctatagaatttcttgtagactattccttggatgatccagaggatcacttgggtgcgttgtctccgtttatcattgatgtagatatggataccactacagcattgattcgtgctgaatacaaattgaaagctgacgagaaaagtatttggaaaatcttagaggcaaactattatgaagacggatgtttttctcctgccgatgatgtctataaggctattataagcaatttccacaagcttttcgaaatgacgatttatgcgataaatcctaaaaattcagaagaaaagcagattaaaaagcaccaagagttagctgaactatttccatttcacattatccaggcggagcgccgccttggtgaagatggaacacaagacaattctctatcttcccttatctccgatttcttcgatatgaacgaagatgaattggatccgagggttgctgaaaaagtcaaggaacttcgatccatcgttgagaatgctaacaaaaatgtccagcaacaaagtgacgacatcttaagcgcacttgttagcaacgcagttgggtttggttaccctaatggagaagaattacagttaggagttacaacccaactaagcattgatgaccagataaaaaatcaaacgcaactttcttatactgctggatcaagtaaagagagactccccagcacctataacggtttgggatataaaaatctcatcaaaatggaatttcttctggcagcattcgccaaaaaggtggagaaatgtggggatgcctgtataccgttgctttttatcgaagaaccagagtctcatatgcatccgcagatgcagcacgcctttgcggagtacttagaagcgtttcttgcgagaattacttctgtaagaattcaaacctttttaacctcgcactctgctcacattgcaaacacaatggttttctctaaaattcgctacgcacaaaaaacaaaggctggtgtcatttataagaatctaaatgcatttgctcaggagaatccttctaatactgatttcatcagaaagtatcttactctaaccaagtgcgatttattttttgcagataaagcaatctttgttgaaggagcgtcagaacgtctgttgttgcccgacatgattgataaatgcgctaaggcgggggcctttgattctcagaaatataaactacctgaccaatattatgctttgattgaaatcggcggtgcgtatgcttataaatttattccatttgctgagtttttgggtatcccatgccttattcttactgatttggattctgtgtctggtcaaagaggtgcgaacgggagaatatattacaattctgttccggtttcacgcggtgaaacgacatctaatgaaactctaaaatggtgggtacggaaaaataaaggaattgcagagggagatgatactaaaattgctctaactgatattacatcgatgtctcctgctgataaaaccagacgcaaatgtcatattgagttccggacaactgaggatggattgtgcggacattctttggaagaagcaatccggaatgtcaaccgtacacattacggattgggggctagtcctactgaagacgatcttgagtttacagggaagagtaaaacagattttgcgcttaaactcatttgcgaatgtgaagattatgctattccaacctacattaaagatgggttggtttggcttaatgaccagcgggtgcttgagtaa

SEQ ID NO: 73543 - DNA, 1743 bp, Firmicutes bacterium CAG:94
gtgagtgaagaacataaaaggataaactacgatctggcaaaagctgaagccgataaagtagatgaacaaatcattgcagcacttcagaacgggaacagctttcgtgtggaagctggcgcaggctccggtaagacatattcgctgaacaaagcaattgaatggattcaaacaaacaagtgggcagagtatagtcgaaaaaaacagactgtagtttgtatcacatatactaatgctgcagtagatgtgattgctgaacgtctatcaaatgattcatttattcttccctctacaatccactcctttgcatggagtgcaataaaacagtatcaaagctttctcattgatattgtcacaagcgatcctgacttcttgccagacgaaggagattttttcaaggtctcagaagttacatataccttggggcatcgctacaaggaaaatgggattcaatatctataccacgatgatgttctaaagctcttttgtcagcttttagataatgcaaaattccggcgtgtatttgcagataaatatcctttgattttaattgatgagtatcaagattcctataagccgatcattgatcgctttgttgacttctttattgcaaagaaaaagggtcctcaatttggcttttttggcgatgcatggcaaaccatttatcaatctaacaaagcttgtggtctcattgaaaacgaaaacctcaagatcataaagaaaagctccaatttcagatctgccccccgtattgtccagcttctaaataatttgcgtccagatttacctcaaacatccgcaatagatgattttgacggtgaagtggttgtaatcacctgcgatgattatattggacctcgccgaacagaacgtaatctcaaaggtgaattacccgcagaagaattaaagactcgtctaagtaatgtcacaaaaaagatcatctgcgaatcctccaaagaggataatctaaaggttctaatgataacacataaagtccttgctacccaacaagggtacgaaaaacttttagacattttagctgatgggttgagagacaaagaagatccattcctaatgttctttatggatactgttgagccaatctataaagcacttaaggattcaaatatgcagttgctttttgatacacttggcatcaaacgctttcctattacaaaaaaatctgaaaaaagcaagtggaaggagctacagcagcagttggaagatgctcgtgccaaaagagcaattgacgtatttgagctaattaagcaaaccaaattgattcctatccccccaaaactggatgagtggtatcacctatatcagaaagcaccggaaacaatatatgcttccaacacttcaattcaagcgttcttagaattggactatttacaatttacggcagcaatcgattttttgtttcctgatgctatgttttctactgaacacggcgttaaaggcgaagaatatgacaatgttgtctttgttatcagcaaaggctggaatctatatcagtttgaaacctatgcaccgatgataaccggccattctcctgtcccgaaaggcaaggaggcgtcatttgagcgaaaccgaaatcttttttatgtgtgttgctcaagaccgaaaaaaagattatttcttttcgttaccataccagtagaatctgtattcaaaactttcttaatagacctcatcggtgaagacaacatttatacctactcacagtttttgaaaacaacaccttag

SEQ ID NO: 73544 - DNA, 1761 bp, Cryptobacterium sp. CAG:338
atgagaattgctcgggtccaggtgaataactatcgaaacctaaagtctgttgacattaagctcggcgctctcgtcacccttgtcggagagaacaacagcgggaagtcaaacttccttcgcgccatgactctaccgttcatggccgacgaggggtctgtcggtaagaggctttcttggttcgacatcaacagcgatgttaaagaccactactattccttcattcaggagcattccaacgagattgctgatggcagcatgggcctcgagtcctttcgtgcagtcattccatctgttaccgtaaccgtcgacctccagtatgacccgattgatgcctacgacgccaaagacctactggttgccgacggcgacgaccttattcctcgcattcgatatagatggttcgtggcgaacccccagtcgctgctcgaacttgtgaagtcccttgttatggatgtaacggatatccagagcattaagatgagcctcttgccaatgagcgagtataagtatgagatagtctcgcccgatgcaagcggtgaccgccatttgccctatgacgtcttagcacgattcaggtacttttccctgcctgccgagcgcgacaactttgccgcatctgctggcaggcttgggtctaagcctctcgttcatctcctgcaggagaatgtgaatccagctggacagaagcgcatagagcagggctacggggaatttcttgagacaatacgcgacgctgcgaaactggacgaagttatcaactggcaggactactcagacgatccaagagcaaaagacttctttgactccgtaagcgtcctgccaaatatgccgcttatgagcagcatcttctccagtatccgtctcgggtacaacgacgagagcctttcgctccaggggcttggctaccgcaaccttatccttatggcggtaatgctgaatgcctatctcgaaacttcggacggcatatctcttcgcattgtagctgtcgaggagcccgaggcgcatctctgtgtgaacaacaccctcctgatggcgagctttttcaaggtgttcggcgagaagaatagcagaacccagctgatttatacgacgcacgacgccgaattcgtgaacaaggtcggcttggataaggtagtcattctccacaacggtgcagcagtcagccttgtcgaggcgcttcagcccgaggacatggactatctcgccaacaatccgaacaccgacattttcaagctccttttttcgcacaggcttatccttgtagaggggatcaccgaggagctgcttatcaaatcctaccttcagtcaaagcacgagctgaacgatatcaaggtgctctctttccataagggttaccgagatataattcgtatctggaaagacattaactacggaaatggaaacaaacttgcagtcattcgtgactacgacaatcaggataacgccaagcgagagcatgagaagttgagagacaggcaagtatgcgtaaccacaacggatggctacactctcgagactgacttcgttgccgaagagtcgaattaccggcttctcgtagagcgctacggtaccgaatatggctggatgaacatgagcgaagacgagcttcaggaggactggcggaacaagaagaccgacgtcatgctaaggatctgccacgatttggtgaacggtgagctctctggcctcacgatgcctgcgcatattaaagaggcattggattttctcaattcaccaattgtggaagacgtggcggagtag

SEQ ID NO: 73545 - DNA, 1362 bp, Cryptobacterium sp. CAG:338
atgaggatagaggttgccggagcgggttctggtaagacttcgagcatggcgtctcgcgtactttccgaggagattcctgacggtagggtgctcttttgtgttgcgttcaccaatgctgcggtgcttcatatcgaatctaagctcgttcaaatgaacggatccgtgccttccggagtaagagtcagtacgattcactccttcctcaacaccgagattgttcagtcctactatcatcttttgttcggaaagcgctacgacagcatctccaccatcaagctttccggagactacaaggcacagaatgcgagaatcggtgagcttgaacgctgcggattgcttcaccaggcaaagattcccgagagagccaagtgggtggtcgataaaaaatctaatgaaaatgcccgagtaaaggctatgcgtgggaagattcttgctgtgtttcaatcctactgccatatgattgtggtcgatgaggcccaagacatagacaaggagatgacgagcgtcctatgcgctctcgatcgcttgggcgtgccgattgagctctatggcgatccaaaacaggacgtgcggggtcgaaaatgttttcgtcagctcatcgctgcatttcccgattgtgtcacgtacagaagtgattgtcataggtgcccagagcgtcacctccgactatcgaatcgccttgcccccgttgacgagcgtcaagtggctgacgagaaaaactccgtgggaagtgtcaggttattctttgagtcggatatcgctgcgaacacggaaaagttcatcagagacgaggactttgggcttgtctatatcagcaagaaaaacgatcgtttcgatactcacggcgatgtagcgggggataaatggtttgagtctcttcgctatgaactcgaaaccggaatccgcgagaagtgcggtgatgaagctactgatctcgaaatcaaacgtgctgcatactacattgccacaaaagttgtctcactattgaatagcgggcgcagcgtaaaggaactgactaacatttgcgtggaatcaggaactatagactacgaaaagcgacggtatattcggattgctactgcgttgacatacatggcctcctctcgctccaaaggggttagcgttaagtcgattgaagctgtcaaggggcttgaagatggtaggtgtctattgattctcaccacggatcttgccccttatctgacgggagataaggtggatgacaatagaaccaagcacttgctatatgttgccctcactcgctctcgcgacgatctttcgattttagtgacaagggaagttgaggaacgatactcaagggatcaattgagacgtgctgttggtatttcctccgataactag

SEQ ID NO: 73546 - DNA, 1860 bp, Firmicutes bacterium CAG:582
atgataaaagctgttgaaataactggagttgaaaatatatataaaaacaaatatgataatgatttaaaatacttatactcattaaataaagtaaatatatttatcggtgaaaataatagtggcaaaagtagattattaagatatttaataacttcagataaagtagtaaatatatctggacctttttctgatgaagaaacaaaatcttttaagaaaagtaaatctaattttttagtttctataaataaatataacaacatttcagaaaaaaagattatattgccacaaaatgtaatagagttggatgacgctaatttttattgtgaagcaagcgattatataaatagccttaaaattaatagtagcaatattttgaatccaaatgttaaagaacaatataaaagtataaaactatatttagatgaaatgcataactatattgtaaaagaaaaaaattttcatattaatgaaacattaaaaagtttagatataatttatattccaattttaaggggaatagagttgtttaataattattatgaactgacacatgaaaaagaattggacacaattcaaatgactgcttctcaaagaaatgctatagaagaatataaacttaactctaagcacgtatatttaaataaagttagtaaggcttataacataaatactaaaattatatttacagctgaagatttgtttgacgatattaaagacaagcttcttggtgaagaaaaagatagaaaatttgtaaaagatttcgaaaattttatatctaaagaattttataatgatgaaggatttacaattattccacaattaaagaaaggatatttgaatataaaaatcggcaatggtgaagaaagagcattacatgaactaggagacggtataaaacagttgattacaattttttataaaatgtacgataaaaaaaacaatagcactatattttttatagaagaaccagaattaaatcttcatcctggataccaaagattatttattaatattttacaaaactgtaaagaatttaaagatcaacaattctttattactacacactcaaaccacataattgattgctgtttagactatactaatacatctatatacaaatttataaattctaacaaaaaaaataatagtttcaaagttgtaaatacaagctcaaaagatatagaagtgttagaattacttggtgtaaaaaacacttccgtttttatctcaaattgtactatttgggtagaaggcataagcgataaaattttaataagtaaatatttagaagtatacttaaaaggaaaaagtacagttcaatataaggaggatattaattacgcttttatagaatatggcggaaacaatataactcattgggcttttatagataataaagacattagtactatcaatgcttcgggaataagcaatagatgttatataattttagataatgataatgattctccgactaaggtaaaaagaaaaagaaatctaaaaaaagcatttaaagataaatattatgagcttaaagtaagagaaattgaaaacacaataagtagaaaggtgttagaaaaaacattatttccaaatggaaatattaagtattcgaaactatacgaaggacaagcatatgccactaaagaagtgtatatgggttcttttattgataagcattatgaattgtcaagaaaatatggatcaaagtcgacaggaactataataaataaactagaattttcaaaaaaaatagccgaaaatataaaaaacaccgatgatttaacaataccaattaaaaatatgtgcgaaaaattatataaattcattgaagaatcgaattatagaaaagaaaaatga

SEQ ID NO: 73547 - DNA, 1371 bp, Firmicutes bacterium CAG:582
atggaagtatttgggattaatttagacgatgctcaagtgggtgcaattaaggatgatgctaaaactgttatagtatcagctggtgctggttctggtaaaactcaaacaattttaggtaaagtaaaatatttaattgaggagaagaacgtaaaagagaatgaaattttatgtatatctttaaccaatgaaaccgttaataatttaaaagttaaactagataaaatgaattataaagtagatgtaatgacttttcataaattaggtttatctttaatggatgagaagatgaacattgtaaatgataattatttaaactttataattgatgaatatatgctttcgtatataagaaataataaactaagaaataaaacatttaaaagaatattttttacagaaagcaatatggatagtgtcatgaagacacaagattatttggaattaaagaaagtgatgataacattcattaaatatattaaaagtaatgatttagatattagaaaaataaaaattaaacatattggttatataaatcgagaaatattaagaatgatatttgaaatatatataatatatacagaagaattaagttcaagcggtaaaatagattttgatgatatgataaaaaattcatcttgtaaaaaagtttatgttaattataaatatataattattgatgaatttcaggatacaagtgtattaaggctaaatctaattagaaatataatgaaatataacgatataaaactatttttagttggcgatgattggcaaagtatttatgctttttctggatgtaccttagatatttttgttaacataagtaagtatttagataatgttagttatcatcagttgaaatatacttaccgaaactctcaggaactaattactgcaagtggtaagtttgttatgaaaaataagtatcaacttataaaggatataatatcatatatccatgaagataaaccaattgttattttatataattgtcaaattaatgatattttaaaatatataaaaggtgatgttatgattatcggaagatgtaataaagacatagaaaacattcaatgggaaaacaaatatacaattcataaatctaaaggacttgaagcagataatgtaatacttgttaactcagataatattccctttaaacacaaaagtcatgtgcttcttgattattttttaaaaactaatgaaggaattaaatatccagaagaacgaagacttttttatgttgcacttacaagaactaagaaaaaaatttatattatggttaataatcgtgaaagcatttttattcgtgagttaagaaaaaattataaagaatttattacaataaaaaagaatggtaaaccattctaa

SEQ ID NO: 73548 - DNA, 2007 bp, Bacteroides cellulosilyticus CAG:158
atgtgtaactttgacaaaaaaatgaaaatcatgcacatatccaagattaagatacatgggtttagatgcttcaattcagagggtgcatctattgaaattgatagaagattaaatgcttttattggtttaaatagtagtggtaaaacagccgcattggaggctctaagaaaactatttggaattacaaatgcggaaagaaatataagcaaacaggattttcatgttgcttgtgaagaaggtgatgaggttcgagaacgttctttatcaatagaggccagattagactttgacgaatctgaaacggacgctattcctcatttcttttcatctatggttgtcgatgcggaaggagaaaatccctacataagagtattattggaaagtatatggacaaaaaacgatcttgcagaagaaggagatatcgacaccaaactgtattttatcaatgtgcctgaatctgaagatagtactgatgaatctaaacacgcttttcccaaacatctaagaggactaattcaggcattttatgttccggctatacgaagaccatcggaacaaatgcgttatatttccggctctatcttatatcgtgttttaagttccatgaaattcagcgatgagttcaaagagaattacttgacaaaaataacagaactcaatagtttatttcaaagtattgatgaattctctacgattgaatctactttatcagacatttggtctgaatttcataaagatgaacgctataaggatgtttctttatcttttggaaccagtgaaattgaatcaatattacaaaaattagaaatatcatttagtccaacagaaatagatagaccatatcaaatagacgaattaggagaaggttataggtctttattttattttacccttgtctgtactcttttaaagatagaggaagagattgatgatgaagaacgggttaagccattacttacaattcttgcaatagaagaacctgaaaaccatattgcccctcaattacttgggcgtgtaattaaagtcttaacttctatatccaaacaagataaagcgcaagtattcttatcttcacacactcccgcaataatcaaaaggcttgatccagagtctatttttcattttcggataaatgaggattatgcaactgaaataaataaaatctatctcccgaagggggatgaagatgcatataaatatgtaaaagaagcagtaaagaactatcctgagatttatttcgccagattagtagtgattggagagggagacagtgagcatcttatatttaatcggctaatggaggtgtatgataaagattttgatgacaatataatatcttttgctccattaggtcacaggtttgtcaatcatatttggaaattgctatcgtctatacatgttccttatattactttgcttgatttagatgtaggaagagaaggtggcggttggggacgtgttaaatatgcattacaacaacttatcaatatcggaaaaagtaaaaagaaactattagaagttgatggaggagaggtcttatctgatgaggcatttgaaaaaatgcatacttgggggcatactgataacaaacttgacagtttaatgggatgggtgacttttttgaaaaaatataacattttttattcttccccattagaccttgattttttgatgcttgaacattatccggaaatttataaaaaggcaatcccgaaaaacggaggcccaagaatacctgaaaaagataaagaaccggacaaatttgcagcaaaagtaacgaacgcagtggcagccaccttgaaatcggaagatgcaaaaggagaaacctatactgaagaacaaaaagaactgatgatttggtataattatcattttcttggtagaggcaagccggtaacccacatgaatgcattgtcattaatggatgatgaaaagataaaagaaaagacacctcctgttttaatggaaatttttgacaagatagataaaatacttttcaaaaaatga

SEQ ID NO: 73549 - DNA, 1818 bp, Bacteroides cellulosilyticus CAG:158; identical to SEQ ID NO: 72681

SEQ ID NO: 73550 - DNA, 1824 bp, Prevotella sp. CAG:1124
atggttataaaacaaattcaagttaggaactttcgtttactgaagaactttataatagaccttcagccagaattatctcttgttgtcgggaagaataatgtaggaaaaacatcattacttatagtcttagataaattcctaaatagtggaaaagaacgtacaaagaagtttcaatacaatgattttaatctagactttcaaaaagaaatagaagatttgcttgaacaacctttattagaaaaagacaattacgaaataaaggcaattagtcttcgtattattgctgagttttttgatgaagatagtcttgacaacatcggcaataaaatattaacgaatttagatgatgataataacttctttgctattggatttgattatcaacttgactttgatagttatacacgtcttatagaagactatcatgaagcaaaagtaaaatttgaagaatcttcaaagaaaacagattctcaaatactattcgacaaacgtgaatttatggaatcaaatcatcaccgtttctttaaaacaattcgaaaatctgttcatgtcgagaaagtatccatgtcactcgaagaaaatcgctacatcaaattggatggacttcaaggttttaaattggatgacgtcataaattttgagtatattagtgcacggcgcagcgtagataacaaagaagttgaccatactctttctggacagacttccgaattgtataaggcacaagaggacagtgatgaaaatatggaagccagagagacttttattacggctctaaaagatacagataaaacattaacagacatttatagtaacatttttgatggaatcataaagaaagtaagtatgttcggtggaatgcatcagcaagaaactatcataaaagttatttctacacttcagcatcgtgaattattaaatggcaacacgacagttgtctatgaacatgacaatcgtaagctgcctgaaaacttcaatggtcttggttatatgaatctcatttctatgatatttgaaataagtttgatcatagaacggatgaaacgtgcacaaagtcgcaggcctgcagacattaatctgttgtttatcgaagaaccagaagcacatacacaccctcaaatgcaatatgttttcattaagaacataaagaatttgcttaaagacggaattgcgaggaaagatggagcaaatgcatcgttgcaaactatcgtttcaactcattcttctcacattgtagcagacagtgatttcgatgatataaagtatttaaaacgtcttaaagatgaaaattcagtaatttcaaagaatctacaagacttaaaaaaactatatattaacgaagacgaggaaggaaacgaaaatgaagataagatggctgcctatcgttttttaaaacagtatcttacactaatgaatagtgaattgttttttgctgataaagctatttttgttgagggggatacagaacgcattttgttgccattaatgatgcaaaaagttgatcagaataataagccggattatgcaaagagtgaattggctcttttgtcacaaaacatatcagtattgcccataggtgcacattcgcatatttttgaaaagttttttaatttcatcggtcttgataaattactagtgctgacagacattgatatttgttcttccgaaagtcatcataaaaaatgtgcctatgaagaaggaaagaaacttgttacttctaatgcagcattgaagcactattttaataaaagtgacattgcatattatatgaatataacaaccgaacaaaagtatttaaatggaatgacgcagaaaagaaaatga

SEQ ID NO: 73551 - DNA, 1923 bp, Prevotella sp. CAG:1124
atgggtgaggagttaatgcaaatcatgcagcacattcacaacgggcatcactttcttttaagcggtggtgcaggtagtggcaagacatatactttggtgcaggtaataaaagagattataaaagaaaatcccacatctttgattgcctgtattacttacacaaatgcagcagttcgtgagatagagagtcgtgtgaatcatgaaaatctcagagtttctactattcatgatttcctatgggaatgtatcggtagttttcaaaaggaattacgagattcattaatagaactcatcaacgaaagagagataagcattaatgctaatgtaaatcttcccattaattcggatttctttattaaagaaggagaatttttacatatacaatataaagaatatttgcgggtaagtgatggtatcatttcacatgacgaagtattaagggttgccaattatatgtttactcattataaaaaattacgcaaaatcgtgaagggaacttacccgtttatattgatcgatgagtaccaagataccagcccattagtaataaaaatattactagaaacttttgatgaagacgatagccgctcatgtcatatcggcttctttggagatgttatgcaagcgatttatgatgatggtattggtgatattaatacctataagtatcctaacggtaaagtgtacgaagtaaaaaaagaacaaaatcgtcgttctccgcaaaccgttattgatcttgctaacaagattcgacttgatgatttagtacaacgtccttcaaaggataagacagctcctaatatgatgaaagatgggcaagtaaaaattggtagagcaatttttatatattcacgaacagagtcaacaactatatatgatatacgtaagtatttacatgataatgaaagctggaattttgatgactcacaaacgacaaaagaactaaatttaacacacaggcttattgcaggaaaagcaggttttaatactctaatggaaattcatgctggtgattgcatcttgaaatatcgtaataaagtggataattttataaaacacaatttagtaaacactgacgataaaacttttggagaaattctcacgtttctaaataacacatttacagatgaacgaagtagaaaaagcttttctcaaacatctgcaatggaaaatttcattaaaaataatcaggctttgtatgataaagttttaaattatccatacaacaagtttgttaaaatgtatgtttcaagtgatcaattaattgatgataagaaacaagaagaagatgagacaagtaaaacaggatctaggcgctcggaattaatcagacatttaatgaaaatcgaacgttgcatttatttgtattcgtcaggaagggttgaagatttcttgaagtcaaccgaaaaaaagattgaaactattacggataaacgctctctgcatgaagcaatagatctattatctaatgtggaagacaagaacataggcgaaattattgatttggcagataaactcgacattgtcaaaaaagatgatacattagaaagatatgcagaacgatgcccttatgtttatgaacgtgtattgacagtaccatataaagaggttcaacatctatataaatatttggaaggaatgactccattttcaacacaacataagacaaaaggtacagagtttgataatgttctagtcatattagacaatggtaaatggaataactacaattttgaaaaattatttacatcatcaaaattgcaggattcagttgtacaacgtacacggaaaattttctatgtatgttgtactcgatcgaaagaaaatttggcagtttactaccataaaccatcagatgaagttctgacaaaagccaaagaatggtttggaacagactgtgtcatcaaaattgacaaaagttaa

SEQ ID NO: 73552 - DNA, 2163 bp, Bacteroides clarus CAG:160
atggtaattaggcaaatacaagttaagaactttcgtttgttgaaagagttcacgatggaaatggagaatgagctttctcttgtcatagggaaaaacaatgtcgggaagacctcgttacttgtgatacttgacaaattcttgaatcaaggagaccgcaaaggatttcaatacaatgacttcaatttggattttcgttgccaattgaaagatttgatagaaaaggaggtagttgatgatacaaaatataaagagattggtattcagttaaggcttttaattgagtacgatgaccatgatgatttggaatatattagtccaatccttatggacttggatgctgacaataatttcttgggattgggctttgattacatcctcacttatgacatgtatgtcaatttgaagaatgcctaccagaagtttgttgaacacgaaaagagtaaagaagagaaatcacgtgagaatggaggagaatatacagcaaaaactcttgatgattttttgaattcaaaacaatcaaactattttgcaactattcgtaaatctattttgataaacaaaacagatggaacctttatagaggaacaatatattaatttgaaagatgctactaactttaggttatgtgatgtcatcaatttccaatatatcaatgctaaaagaaatgttgataacaaggatgtagataaaactttgtcgtctcagacttccgaattatataaaattcaagaagcggcagatgaacaacaggatgccattgaaaagtttcaagatagtttaaaagatactgataaggtcctatcttctatttatgacaatatgttttcagatatagttaataaagtcagaagattcggaggcatgtcaaaaaacgaaacggtcattaaggttgtatcatctttacaacatcgagagatgttgaaaggaaatactacagtggtttatcaacaggaagacaaagaacttccagaaaactataatggacttgggtatatgaaccttatttcgatgatttttgatattgatttgataataaagagaatgcaaagaaataaggaacgaaagcctgcggatatcaatctattgtttatagaggagccggaagcacatacacatccacaaatgcaatatgtatttattaagaatatcaaaaatcttttgcttcaaggaatacaacacaaaaatggcataaagcgaaagctacaatacatcataagttctcattcttctcatatcgtatctgattgtgatttcgatgatattaagtatttgacacaccctatttgcgatggaagtgttgaaagaaatgcagtcatagcaaaaaacttaaaagtgcttcaaaatgaatacgacgatgaccataaacactattttgcctttctaaaacaatatctgacgctgaataggagtgaattgttctttgcggataaggcgatctttattgaaggcgatacggaaagaatactacttcctgctatgatgaaaaaaatagaccaagaatgtgagttggaaggtaatgaagaatttctcatgtcgcagaacatttctattgtcgaagttggagcatattctcatatatttgagaaattcttgagatttattggattgcgaaaatgtctagttataacagatattgactgttgcaagcctgtgacaaaaagagacaagaacggaaaagaaaggaaatatattgaaaaaacgaaatatgatgcaacggatgactcgctagttacttctaatgcgtctatcaaatactttttgaataacactcaaaaagtcaaggatattcttgcaatgcaccccgccattctatcatggaactttgagaataaaaagtgggaaacagatgaaaaaggatatttaagacttgcattccaatatggtaagaaaacatatcaaccacgtagttttgaagatgccttctttagtgaaaacgaaaagttcattactgaaaataccttttcttcactacaatcaaatagcttagagcaatttaaaagcgataaagatgcttatgaattagcaaacaatggcgtgagtggaaagtcatcccttgctattgaaatattgctcaacagtaaaaaggaaggtacttgcgatttttcaaattggaagattcctacatatataaaagaaggactattatggctaaggaaaaattaa

SEQ ID NO: 73553 - DNA, 1974 bp, Bacteroides clarus CAG:160
atggctaaggaaaaattaaaagatgaattacaaaatataactgagcaaataactaaaggtcatcatttcttattaagtggtggtgcaggtagtggtaagacttatacacttgtgcaagttgtcaagtggattattgaacattatccatcatcgcaagtggcctgtattacatatacaaatgcggccgttaaagaaatagttgaacgggtgaatcatgataatctcgtagtttctacaatacatgacttcctttgggataatattaaaaattatcaaaaagaattatccaaaaccgttattagactactgaatatgccaaattccggattgcatatttctggtctaaatgaagtcccggtggattatttttgtaatagagataaacctgtcaccataagttaccaagagcataccaatcttaaggaaggaattttgtctcatgatgaagtgatagttgttgcctatgaaatgtttaaaggatacaagaaactatgtgatattttaaagagtcgctatccttttattttgattgatgaatatcaggatacatttcctatggtagttgagattatgctcgattttttgaagcggtccgacaaaaagagtatcatcggtttctttggagatgctatgcagtgtatttatgataaaggtgttggcgatttgaataaatataagtatgatggtacgaatggagatgtgtatgaagttcagaagcgtcagaacagacgaaatccttcatcagttattgatttggctaataaaattcgcacagatgggttggtacaaaaaccttctaatgatgataaggcgccaaatatggaaaacggtcatgttaagagtggtgagattttgtttgtattttcacagcaagaaggaaatatgttgccaaatgtgaaattatatcttactcaacaaaaaggttggaatttccatgatgcaaaagtaaccaaagagctgaatttgactcataacctcattgctgaaaaagccggttttgcaactttaattgaaatatataatggagatccaattcttgcgtatgtgaaaaacaaagttaagccatgtgtggaagctcattttacagaggatgaaatggaggggaaaacattggctgacattttgaatgatctgcaagccaaaggaattgaatcaaataaatacaaaccgactaaaactcaaaaaagttttatcacaagccatactctcttatacgaaagggcaaagaagtataaatttgagagtttaatacatacttatgtagataagtcacaattggttgatgacaagaaacagagtgaagatgaagagagcaagacggggtcgaaacgttctcccttagtaaaacatctttgcaagatagaacaagctattaggctgtttaaagaaggtaatgtctctgaatttctcaaagtaacaggatatacgcaaagtcgttattctggtgacgatagaaaaataaagagtaaagcagacaagataaaattaaatgagtctattaataagctacagaatgcggataataagactataagggatatgatagaactagcagacaaagagaatatttgtttgattgatgacaaggtcgataattataaagagcgttacccttatatttacgacagaatgatggaggtttcatatagcgaatttgtaaacttgtatgattatcttgaaggacaaacaccattctccactcagcataaaacaaaaggggcagaatttgataatgttcttgttattcttgataatggaaggtggaacaactacaattttgaaaaattgttcactgcttctattgatgaactccaggaatctgtagtgcaacgtactaggaaaattttctatgtgtgttgtactagaacaaaggagaaattggctgtctattatcataagccaactgctgcagttttagctaaagcacgagaattgtttggaatccctaatgtgatggaaatccccaagtattaa

SEQ ID NO: 73554 - DNA, 1923 bp, Eubacterium sp. CAG:115
atgctcatttctgaattaaaaatctataactttcgccgattcaaatccatagatggtgcgcctggcttaaaagtttcttttcacaaaggattgaatgcgctaattggagaaaatgattctggaaaaactgctgtaattgatgcgctaaagctagttttattaactcaaagcaatgagtatattagacctgtagatgaagatttctatcagtctattgatggaaccatttgtactgagtttaagattgactgtacaatttcagagtttactcagaatgaagcaaaaaattttattgaatatttaacatttaaaaaggatggagataatgtagaatatacattaaaccttcattatcgtgcatggaaagagggatataaaatttatcaggaattgagagttggcgatgtagaagatggtatttcaattgatggaaaagcaagagatttactaaaagcagtctatttgaaaccactccgcgacgccgaacgtgaaatgagttctggtcgcagctctagaatttcgcaaattcttcttagtcatcctgttttcaaagataaaaaagaacataaagttgttagcattttccaggacgcaaaccagaagatagaagattactttactaatgatgttgacggaaagcgcattcttaaaacaattcgtgataatttaaaatcatttaatgacaatggacaagctagcaatgctgaatttaagacatccgatattcagctgaaagcgatacttgagtcactgtcattaaacgctccagagatcaatccggggttgggagaatctaaccttctctttattgcagcagagttattacttcttaaagatgataccgatggtggtttgaagctggctctagttgaggaattggaagcacacctgcatccacaggctcagcttagattaataagctatctccaaaatgaatatagtgagaatgatgtccaggttattatttctacacacagtccaattcttgcctcaaaaataaacctaaagaatttgattttgatgaaagatggcaacggatatgatttggcagaagaaaaaactggacttcaaaaaggagattatctttttcttcaacgttttctggattcaacaaaagctaatcttttttttgctaaagggattattatggttgaaggtgatgccgaaaatatactaatacctgttattgctgatattctaggttatcctttggaaaagtacggaatatcaattgtgaatgtcggaagtaccgcatttttacgatatagcagaattatggtaaggaatgatgaaactacaattaatattccggtttcagtgattactgattgtgatatacaaccatatgatgttgacccacatacgaaggagaaaactttcaatgagaaaatagctgaatcggcgcaggcagaaacttgcaaaaatgccaaatacacttgcggttctgttcatggatttacatcacctaggtggacattagagtattgcattgctatgagttgtctttcagatgattttcacaaggcggttcactatggaatgaaaattcagaatgcacaagaaaacgtctcgctgaatgatgaaaaaattgataaagctaatcgagaggttgagacggaagcaaagcaatggaatagtttggataaggccaatatagcatttaacatatacaaccttatgctcactaaagatggaaagagtagcctaaaagctattgttgctcaatgcttggcatcaattatgcgttggaatatatcaatgatacccaatgacattacacaagaaaaaatgtttgatttagatttatatgggttgacaatagatgaacagaaaaaagcagtcctaaaatcaaagcttgaaagcgatgactttttacgctacatagtgaatgctatcaagtatgcagcgggggaaaatgtataa

SEQ ID NO: 73555 - DNA, 1926 bp, Eubacterium sp. CAG:115
atggtggaatggcaaattactgatcaagatattgaatcaacagaaaaactccttttaccaaatggagctcacttttcagacgatgcaataaaagttattcgctgttggtattcaactgatgttgcagcttgtccagggagtggaaagacaactgtacttcttgcaaagttgaaattgttggctgatagaatgccttttgctgatggtgcaggaatttgtgtgttatcccatacaaatgtcgctgttaatgaaataaaaaaacgtctttcaagctatgaggataaacttttaagctatcccaattatgttggaacgattcagtcatttgttgataaatttgtgacgataccctacttgaaatatatttatgggagaaacattcagacggttgacactctaatttattcgcaacatatgatgagcaaaatgaaaacaaataaagataaataccgtgctctggattatgtgataaaaaacaatttacaaacgagtaaacaatttacttcgcctattgacttcattaaggcgctgtatattcgagaagatgattctctttgcgttggaaatcagaaaaaagcattggctggtgcgcaaaaagattctactaatcagtttaaagaattgcgcgatgaccttattaaagatgaaggactaataaggtatcaagatgcttatttatatgcaaatgaagctataagtaaattgccagagaagtatacagctcttttttcatcacgatttaaatatgtatttattgatgagtatcaagattgcgatgaaaatcagcgccaagccttagatatgatatttgactcaaaaaaatgcactgtaataagaattggcgactcggaccaggctatatataactcctctgaagataaaacatcagattgggtaccacagcacgatttcttatcaattacgacatcatgtagatatagccaagaaatagccgatgttattggaaaacttaagaaagatgaaaatggtattctgacacttgttggttatactgggataaagcctacattgcttgtttttgaacctgataaaattgacagggtaattgatggatttattaatgcattggattcttgcggattaaatgatgaaaatggtatatataaagctattggtgccgtcagatcagaaaacaccacgggtcttaaaataggaagctactggtctggttttgattcctctgtcataaaacagagtgattataactattgggcatatgtagacaatattgttacaagtttgttagaggggaaattatataaggcagaaaaaatagttcgtaaactgttgtgtcaaatattccgttatatgaaaattagcaactcaaaatcaggaaaagaatttactgtcgcaacaattaagaaaatgcttgaagatgagtatagggaattatatcgtcaatggatttatgaattgtcaatatttcaaaatgttaatagggcatctatcaattgttttatgcgacaaaaaattaatgaattacttataaaaatcgctccgcaattaaataatatagttaatcaattgcccgattatttctttaatgacgcttctaaaaatcagctagaaagtcaaacagagaaaagggaaaaaaacgtatatattgatttaagcaaagggcgaagaataatttttgatacaattcacggagttaagggagaaacacacgatgcaactctttatcttgaaactgacagaaaaaaggcttcggatataaatagaattctaccgtgctatggcgttggtaaaccaggatgctctcctttgtatgattatagccgtaaattagcctatgttggcatgagtagaccaaagaaattattgtgtgttgcaatacaagctaagacatatgaagctagtaaaggtgtatttgataacagctggaacgttgtgcatttaacataa

SEQ ID NO: 73556 - DNA, 1992 bp, Ruminococcus obeum CAG:39
atgtatttaaaaaaacttcttataaaaaatttcagaatttttgatgaaactggtatagaactcgtttttaataagggagtaaatgcaattattggtgagaataattctggaaaatcttccgtaatagatgcgattaggcttgtttattcgactgtaacatataggaaagatatatttttttcaaagtcggattttcatgttggtgaagatggagcagtggcagactacgctcaatttgatgtgtatttggaagatgttcctcgtagaatgacagaaatttggaatccacagagtgagagcggtatgggaggtgattttcatattaagtttgaaaaatatatctctcctagtggagttgaaaaagttcggtcagtttattggggatttgggacagatggaaatctattatcttcagatacatttgaggcaaccgatgtggtattcttgggtgcattacgggattcggaaagtgagatgaagccttcaagaaacagcaaactggcacaattacttagaaatttggtcccgggagaggatgtcagggcggaattagttcaaattttgaatgatgctaataataacctattggaaaaagaacagttaaaaaagacgagaaatacaataaatcaaaatcttgcaagaattgaacaggagtttttaaatcagcagattgatattggcttagtagaaccgaggttcgattcaatcgcatcttccctgcgtgcatgggttaaacctaagtggatattaataaataaggcagatcctgtttatgaaaaagcatatacatattttcaaagtcacatggacttgaagaaaatacaagaggatgcaaagggcatatattttgaaatttctattttggacagtgaaactgagtttgacaaggaattagccgatagaattagtgaagttgcgaataaatcttttgaactatatcagaatggcttaggatataataatctgttatttatgtcagcagtacttggtgatatggcgattgagaagggcggagtttatcaaaatcttctgttagttgaggaaccagaggctcatctacatccacaactacaggaattggtacataattttttatcagatgcgaataaaaacgatggtaatattcagattatttatacatcgcattctcctacattggcctccaaaatagatatagaaaatattaatctgttatatgagtatggtcataagaaatattgtttacctttctcacaaacgaacttaacagaggaaaataaaaaatatttacagagatacttggatgtcacaaagtctcagatgttttttgcacgaggaattttatttgtagaaggaatcagcgaagcaattttacttccggcaatggcgaaggcattggacagatcttttgaaaagtatgcggtagaattggtcaatgtagatagtgttgcatttacaccatttgtcaatctcttatcatctgataaagttaagacctgtttttcaaaagtgtccattattacggatgatgacagatgtgctaaaaagaatgaaaaagactatattgacaaaaattatgattatgatgatatcagtagtgaagttgtcacaaacctacaaaatggacaaccttcggatagatgtaatgatttgacaacattatgttctggtgcggggataaacatatttacagcaattaaaacgttagagtatgcattatgctgtagtgaagataatgtttatcatatgatagaagcgttgaaaacatgttatacggatctgggaccgaagttagaaacaaaggttggattattgtctcaattaagcgaaaaagcagcatgcgtatggttgtttataagagccagagataaatgtaaaggagcagttgcgcaatacataagtcaagttatcagtgatcagcatgaactaaggaaaaaaggagaacaaattgagaaggaattcattattccagattatttaaaaaatgcaatttatagtgtgacggagcaatag

SEQ ID NO: 73557 - DNA, 1764 bp, Ruminococcus obeum CAG:39
atggtagagaagatgactgaagaacaaaaagaatttttggatgcagagggtaaggtggttataaaggcttgcccagggagtgggaagacgtatactgttgcacataaattattgtcgtatgtggataattggaaggattaccacagtggtgttgcagtattatcatttacgaatgtagcaagtaatgaaatatatgaaaaagcacaatcaattcatggtggtttaggtaaacttggatatccccattttattggaacagtggatagttttattgatgaatatattgtgctacggtatggccatcttcatactgttggtaaagtgcgtccaagaattgcactggctgataattggaagataccatacaaatattggaggtcagaatgtcacaggaatgggtgcgtagataatatagaacaattttattatgggattgataaaaatttttataaaggaaacgaacaggtaacttgtgacttaagaaaagcaaaagtgcttccatgccaacaatataagaggatgttgtcagacaaagggattgtttttcagaatgagacggcgttattcgcatatcagctattaaagaagtatccgaaagtggcagccgctatagcggaaagatttccgataattattattgatgaagttcaagatacatcgataaatcagatggccgtttttgacttgttaagtgaatcgggaatgagatcaatgtttttggtaggagatccagatcagtcgatatatgaatggagaaatgcaaatccagagtgtttgctccagaaattagaagatccaaattggaaaactatagagttgacggggaactttagaagttcgcagaatatctgtaatgttacttcatttttttctgccagtttgcgtgggaatggcagtaataatgcaataggtgattggaaggatgaaacggaaaaaccaattttattgctgacaaagaaaaattcagaggaagaaattattaattatttccttaataagtgtagcaagatgggaatagagatatctcccaagaacgttgcggttttaactaggggaagaatatattccgatacagacataacaggtttatggaaaagtaaagaaatagaattatttgctaaagctgcatatgagtggaagtttggttcaaggaaaaaggcatatcaagaagcatcaaaggcatcatataatatagttttcaatgaagatgtagatgattatgtgatgaaacagaaaattcgcgaatataccgatgaagatacttggaaagattatgtaatagatattttggtagatatgcctgatattgaaacggaaataggagaatgggtaaaaagcttttcgcctgttttttgctcagtatgtggtaaatatggttatggaatatcaacagataaagaattaaaggacatttttaagataaagcagagcgataaaaagacaccgaatttcaaacaaataccgttaaggaaatattttgagaaaaaaacagaagataagtatactcgctcctcaattcatggagtaaaaggggaatcctacgatgcagtgttaatttatgtcaaaagccgtacagggagtacaattacacccaaattacttatggaaggacctctcaatcaagaactaatgcgtttggcatacgtggcaatgacaagaccgaaaagattacttatgcttgctatgccggataccaagggaataaagaattgtggaagattttcagaagaattgtgggaatatgaggttttggaaagtagttaa

SEQ ID NO: 73558 - DNA, 1989 bp, Anaerotruncus sp. CAG:390
atgcaattatcaaaaataagaattagaaattacagattgcttattgatgccgagttggaagtcgatcccaagacaaccttaattgtgggtagaaacaacacagccaagacatcatgcttcgtgtgcattggtaatgtactggaaggggaaaatatatcttttaatgattatccactgttaaagcgggaagatttctatactaaaattgcactgtttatggagaaaaaactctcctatgaggacctttgcaaacaggtcgaagttatttccattgattttatagtggactactcattggatgacccggacgacaacttgggggctttgtcgccatttattatcgatgtcgatgtagatacgacaaccgctctgattcgtgcagagtatcgactaaaaaccgacgaaaaaacattgtgggcactattggaaagcagctattataaagacggcgcttttgctccgaatgaggaggctcatgatgtgcttgctgataattttggaaaattgttcggattgaccgtctatgctattaatccgaacaatttggaggataagcaagtaaaaagccaaaaagaactacatgatttgttcccattccacgctattcccgctgaacgtgttcttggcgaggatgatacgcagaatagttctcttggttcgttaatttctggtttctttgatatgagcgaaggagatttggatccggaagttgccgaagaaataaagcgattacgtacaatagtagaaaaagccaataaagatgttcaaaagcaaagtgatgaaattctgagttccgttgtgaacagttctattggctttggttatcccaacatagaggaattaaagcttggggttacaacgcagctcagcatcgatgatcagatcaagaatcaaaccaagctatcgtatatttccggcacagcaaacgaaagtttgccgagttctcacaatggccttggctataaaaatctgatcaaaatggagttcctccttgctgcatttgccagggatgttgaaaaacgtggtgttgcgtgtgttccactgctcttcattgaagaaccagaatcacatatgcatccgcaaatgcagaccgcttttgccacatatttggaaaagtttcttggcaagctctctaatgtccaaatccagacttttctaacctcgcattctgctcacatagcaaacaccatggagttcgcaaaggttcgctatgcgcaaaagtctaatgccggtgtgatttacaagaatttgaacacctttgctcaggccaattctgataatgtaaatttcatccggaagtatttaactttgaccaaatgtgatttgttttttgctgataaagcgatttttgttgaaggtgcttccgagcgtttgttgctgccggacatgattgagaagtgtgaagcgaccggagtgtttggttccggtaagtatcctttatctgcacagtattatacgttgattgagatcggtggagcctatgcacataaattcattccatttattgaatttttgggagtaccatgtctgattcttactgatttggattctgtagcagcccgaataagcaaaggcggaaaagtagtaaaaaagtccgtagtggttagccaaggggaaacaacatcaaacgaaaccataaaatggtggatccgcagaaataagggccttccagagaacgacacatcaaaaatcgacctcacagtaatcacctcgatgtctccggatgacaagaccaggggcaaatgccatattgagttccaaacggccgaaaacggattgtgtggacactcgttggaggaagcggttcgtaatgtcaaccgaaagcactacgatttaggcgacagcacaagcgaagaagatcttgaatttaagggcaaaagcaaaacggattttgctctcgatcttatttgtgaatgcgccgattattgcgttccggcgtacataaaatcgggattaacatggctaaataaccaacgagttcttgagtaa

SEQ ID NO: 73559 - DNA, 1746 bp, Anaerotruncus sp. CAG:390
atgggtggaaagcatacaggtgcaaactatgatcttgcaaaagctgaagctgacaaggttgatgcacagattattgaaacacttaagaccgggcacagttttcgtgtcgaagcaggtgcgggttctggcaaaacttactctttgaatcgagtaattgaatggatacagtcaaataaatggtctgattacagtcgaaaaaaacagaatgtggtctgtatcacctatacaaatgcagctgtagacgtgattgcagagcgacttgcaaaagattcgtttattctcccttccacaatccactcgtttgcttggaatgctatcaaacaatatcagagcgttttgattgatgctgttacaactaaccctgattttctaccggatgagggcgattttaataaggttacagaagttgcatatactttgggacatcgctacaaagaaaatggtattcagtacctttatcacgacgatgttctaaaactattctgcctacttttagataacgctaagtttcgccgtgtgtttgcggacaagtatcctttaattctaattgatgaatatcaggactcttataagcctattattgaccgatttgttgattattttattgcaaagggtattggcccgcaattcggttttttcggtgatgcttggcaaacaatctatcaatccaataaggcttgtggcgcaatagaacatgacaatatcgatgtaatcaagaaaagttcgaattttagatcctcaccgagaatagtacaacttctcaatgatattcgtccagacttaccccaaaaatcagcaatagatgactttgaaggagaagtgtttgttattacatgcgaggattatactggacctcgtcgtacagaccgtaatttcaagaacgaattacctccagaggaattgaaatcacgattaaacaaggttactgaaaaaataaaacaagaaacacctgcggatgaagaattaaaagttttaatgattacgcacaaggttcttgctacacaacaaggatacgagaaactcctggatattctgaatgacggattgagagacaaagaagacccgttcctattgttctttatggagaccgttgaaccgatctatcatgcgcttaacacctccgatatgcagttgctttttgatacacttggaattaagcgttatccaattaccaagaaggctgagaaaaataagtggaaagaactacagcgtcaacttgatgaggtacgcaagaaaagagccattgatgtttttgaaattatcaaccggactaaattgattcctataccacccaaattagatggttggtatcatttgtaccagaatacacctgaaacaatatatgcttctaatacttcaatagaagcgttcttgaatctggattacgcacagtttattgctgtgaaagacttcttacatccagaagcacagtattctacagagcacggagttaaaggagaagaatacgacaatgtgatttttgttatcagtaaaggatggaaccagtatcaatttgaaacctatgctccaatgataacaaaaaaagctgtcatcccaagtggaaaacaagcttcctttgagcgtaaccgcaatttattttatgtatgttgttcaaggccaaagaaaaggttgattttctttgtaacggttcctattgattccaccttcaaatcgtttttggttgaacttgttggagaacggaatatttttaccttcagccagtatatcgaaagaaaaattaattaa

SEQ ID NO: 73560 - DNA, 1893 bp, Clostridium sp. CAG:269
atgtatttatctgaattagaaattgagggatatagaggaattaaagaaagaacaaaaataaaatttaaaaaaggtataaatcttttagtaggagataatagaagtggaaaaagtacagtaattgacagtgtaagattattgctacaagaaaacgaatattcaagagaaggaatcaaagagaatgatttttatcattcaatagatgataaagaagttgctgataaaataaaaataagtggaagatttgatgaattatcggacgaaaaaaaggtagaatatattacgtggcttgacgaagagtttaaagctttattaaatatagagatacataataagctagatggaaggaataattataaaaagaatatttggggaggaaattcatttaatagtgcttttgagtgggatattctaaataatatacaatgtgtttatttaccagctttaagggatgcagagaaaagattgaaaaatacaagaggttcaagacttgcaagactgcttttaaatttgtcagaagaagaaagaaaagattgtaagaagaataataggcttacagagttagaaaatgacgttcaagaatttaacagctcgttatctaaaaatagtgatattgggaaggcaaggaaattgataaatgaaagtatgaataaatcattaggaaatatgttctctgaaaaaataaatattcaatttgaagagcaatcatattcaaaaattgttgaaaatttaaaagtaatgttttatcctgaaaatactgaagatgaaaacattatatatagagatttagtagaaaatagtttgggatataataacttaatttatatagcaactatattagcagaatttgaaggattaaaacaaaatttttcaactccaagaattttattaattgaagaaatagaagcacacttaaatcctcaaattcaaattaaactaataaaatatttagaaaaacaagcaaaagaaaatgacattcaagtaataataactactcattcgcctacaattgcatcatctatttcattaaataatataatatgttttaattatgttaacgggaaaataaagattacagatttaattgactgtaagttgaatgaaaaagaagtaaaatttcttgatagatggttggatgccacaaaatcaacattattattttcaaaaggagttttattagtagaagggttagcagaagctttacttattggaaaactagcaagtctatatttaaaaacaagaaaatacggagtaaattcattagaagaagccggtatatctgtgataaatatgaatgggatattttttaattattttttcaagctatatgatggatatgcacccaaagtattgactcaagaagaaaacgagactaaaaaagattttgaagatagacaaaagaaatttatagaaaaagaaaaatttgatgaggaagaatttataaaaacagattttattccaataaagtgtgtggctttaacagattttgatcctaatgctgaagaaaaaacaacaaatccgcaattatatagaaaaaaacaagtggaaaatatgacacttaattgtagagtctataataacaccaaaacctttgaatatgaaatggcattatttactcaaaacgccaaaattatgttggaaatattagatgattatatcagtacagaaggtcaaataaaacaagacatagagaaatatctagttgatataaatagagataatcaattagataataaaaaaagagctgaatttatattggataaaattgatacaaattggatgggaaagggattatttgctcaattattagaagagaaaattaaagaagataattttgaaatcccaaattatataaaagaagcagtagatttcttaataaagaaagagaaataa

SEQ ID NO: 73561 - DNA, 1902 bp, Clostridium sp. CAG:269
atggaaaaagaaataacaaaaaaatattgtagaaaaagtaaatattgcaattgtacaagtgaatgtaatagtctattaaagaaaagaacatttgaaaatgataaatgctatctaaaaaatttgaatctatcacaaattgaatatttattagaagaaagttacaaaaatgtatatttgaatgcatgcccaggaagtggtaaaacagaagtattggctataaaagtggcagaagaaattattgattggaacgaaaagtctaaaggtattgcaattttgacttttactaattcagctgaagatgagataaaacatagaattagcgaatttattgatataagtaatatatatccacattatattggaacatttacaagttggttacatggatatatagctaatccatttttatataaaaaaataaattatacaggaaatgctgatgaagataaaagtttaaaagttattgataacgataatgaagcaggatttttaaattctttcagtagccaatatggttataatgtattgggaaaaataaaagcaaatgaattttatttttcaaagaaatataataagtatatatattgtggaaaaattcatgatggaaaaagaatttttgatgaattgttatcaaaagatgaatggagatataaagatttatacagtataaagaaaaaattttatcaaaaaggattttgcttatatgaagatatagaaaatttagtttatgatactcttaacgaagataaaaaattattggacttaatatcaaaaagatttcctattatttttatagatgaatgccaggatttatcatatattcagttagaaattttacgattgctactgaaaagtggagttaaaattcatttaataggagatttaaatcaatcaatatatgaatttcgaattatagagttgtctgatattaaacagtttattaagagtaatagcttttatgaaatgaaacttaatgaaaattatagaagttgcaaggatatagttaatttatctaattatatagtaaaatatccagaagaaataatagcgcatggaaaatatattgataaaaaacctatgaagttaattacttatgacaaaaataatctgaataatgtaataaaacaatttataaatatatcaagagataataatatagaaaagaatagatgcaaaataatagtaagaaataattcgttaaaaagagaaatatatggaataacagaaaatactagtataaatactattgaagaattagcaaaatcattattatggtttaaacactatgaaaatatagcacagtttaattatgcaattttagcaatgggtaaatctattcaaatgacattttttaaagatgaagaatgtttaggcaagagtaattattatagacccaaatgtatagaacttagtgagtggaaaaaaataatttttgaagtaaagagaatattaatgaataaaaaagagatattatactttgatattacatggaaactgtggaaagaaaaaattaaaaatataataaatggggaaataatacaattatttgaaggaagaaaagctgaattaggtaatattagaaaaggtaaaactaacgtcaaaataaaagatacattaaagaatgaatttggtatgaaaaatgaaatttctgttgagactatacacaattgtaagggtatgagtatagattcagtattgttacttacgcctaaatctgcaaattcggatttttattggaagaagtggatagataatacaacaattgaagaagaaaacagatttgcatatgtagcaatatctcgagccaagtatttattgtttttagcaataccaaatgataaaaattatacagatgaagataaggaaaaatttaaagatttaggatttgaaataatagaatag

SEQ ID NO: 73562 - DNA, 930 bp, Clostridium sp. CAG:813
atgcatccgcaaatgcagagagtattgattaaatacctaaaacattattttgataatcaaaaaattcaaggattaataacaacacattcaaacgaaataataaaagttagcgaaataaaaaaagtaagagttattcgtataggtgtgacttcattattgaataacatttttgatttaaataaattcattaaaactttacccgataaagatgagattcaattttattccttattattcagaataaattattcggatcttatttttgccaataaaattatcatgtatgaaggtgatactgaaaaaatgttcttagaaagaatcttgaatcttgaaaaatacataaatttaaatgaacagtatatttcattcgttcaggtaggtggtgcatactcgcataaatataaaccattattggattttttaggaataaaaacattaatttttacagatattgattataaaaaatcttttacaacaattgataaaatactagattcggaaattacaaacgagggtctgaaattatattataacgaatctaaaggagcattgaaagttaaaaatttatatgaatggcaacaagacaatcctaatatcagaatcttttatcaaactcaaaaagatggttatggaagaactttagaagaagctattttgaataaatgcttatctatcaatattgtagatgttaaaagtagaagatattggaaagtaatgaaaaaaagaaaaaagttaaaatactctattcctcaacacgatacaacaaataatgatgaagtaagtgataatttatcgtgtcgtgatattgcaaaagcaacaagtgacaataaaacagattttatgtattcaattgttttgcaaaatgatgataaagtggctaaatttattccaaattatattgaggaggggttagattggctaatgcagtaa

SEQ ID NO: 73563 - DNA, 1950 bp, Clostridium sp. CAG:813
ttggctaatgcagtaaacaacaatatgtttttagtaaatgctcctgctggaagcggaaaaacaacttttataaaggataaaattaatgaaattgttaacaatgataaaaattgcaaaatactatgtattacatatacaaatagagcaactgacgaattaatatcaaaaataaattcaaaaaatgtaaaaatatctacaattcactcttttgtatccgaatttttaaatatctatttttcgaataaaaatattatagaactgtattttgaaatatacaaagatgatattctcaatagaattaataatatatcaaatgatgaaaaaattgagatagcaaatcagaaatatagggaagaacatgatggaaatttaagttttgaatatttaaaaaataatactgaaacaatttcatataatgaattaccttttaattctttatattatggaggattatcacatgatgcactacttttatttgcagaaatattgatggataaatatccaataatcaaaaaacgactaacagcgttgtacaaatatatttttattgatgaatatcaagatacatccgctaatattttaaggtttttttacaattccgtaaaagattcatcgacaatgttatttttatgtggtgataaaatgcaacaaatatataaaagttatgatggttcttttgaagattacttatcattatttaatagtgaaacttattccttgaaaatgaattatcgttcttctaaaaatattgttaagatattaaataatatctataatgattctttgtttactcaaaaatgtccagatgaaatagacgatagtaacgttccacaaatatatattacaaatgacataggtacagtgttaaatgatatagaagttcaatatcccgaaatattaaagctatatatttataacaaagaacgatttgaaaatataggagcaaaaaatttatatgaaaaaatatccaatatggaaaaatattcatttggtagaaaatattcacctgttgatgttttgttaaaaaatgatcttgataatcccgatcctttatttaaactcctttttgaaatacataattttttaaaaatatataaattaaaacaatacggtttacttattcaaaaaatcaataataaaaaacaaaagatatataataaagatttattaaaaatcaacaaacacgaagacaagaaacatttccgtaatttgatagaagagatctatcgtaaatataatgaaaatactacgattatagattttttgaaattcttaaatgataaaaaatttgttctaaatcaaataatagagaattatttagaagatactgatgaaaatgaatactttgatgttttaaaccaaaatttggaagaatttagaaatatttgtcaatatttggaaaaccccaagatatcaacacaacatggtgtaaaaggtgaaggacataacgaggtcgtttttattgcagaagattcaggaaatccttcggttaaaatgtataaattttttgaattaatttctaaaaataacatttgctatagtgaatttgaaaaattttactatgattatgttaaagatataaaaaaatttgaaagttcaatgcaaataaatttttcagaagtcaaaaagaatgaatatgaaaaatataagaatagttttgaagaactaataaaaaatttgcaacttaagtacgacggtaatatatattacaattttttctttctaaatgctttaaacttgtataattcaaaaccaaacgtaacaaattttaaagaattaattaagataaatactgtcttcggtacattaactgcttataaattattttatgttggatgttcacgagcaaaaaagatattaaaagtcatagttaattattctcaaataaataaatttcataatgaatttaaaacaaaaatgaataattttggttttcatgtagtagaataa

SEQ ID NO: 73564 - DNA, 2094 bp, Fusobacterium sp. CAG:439
gtgaaattaaataaaatagctattaaaaactatcgtcaattccataatactgacatctgtttcgataatataatttcaattttagcaggacctaataatagtggtaaaacatctttagttgagctttgccgaaacctttttgaacaaaacttttatagtataaattattcagatattaatgtacatagttattataaaaacaaattagaacttattgaaaaaattattgatatctatcagaagaacaattctaagaatattttttctgatgatttggaaaaaatattcttagaatatgttgtaaattcaattgaggtgcaaattcaaattgattataatgagcaggaagatattgtaaattttgcaaattatatgatggagcttgatattgcaaataatagtttttattttatatacaggtatgaatttaataaaaaaatttttataaaacaaatagtagaaaattttgaaaaattctcaaaagatatccttcattataatgaattaacatctctgtacaattcttcaacaaaagaggaagaaaaaaataaaattgaagaaaaacaacagtctgcaaaaaattgtataatagatagatattttaatgaaagttttgaaaataaattttatttctgcgataaagaatataaaaatgagattaaaatggacagctctgagtttaaaagcctatttcattttataagaataaatgcagatagaaatttatcggatgaaaagtcaaataataattatttaattagccaaaatcttttagacataatttcaaatgatgaaaattggcaaaatttaattaaaacagttccaaatgatatgctaagtttatttaaagcgacaaatattgagagtgaaataataaaaaaatcaacagactctttaaatccaataatggcagaactagagcacacaaaagattgtattattggattgccacatctcgaattgagcttaacagacgaaaatataattaaatttataaaaaattcaactatagcaaaatataaatatgataattatgtcttcgaagaacaagtacaaggtcttggtataagcaatttaatatatatgcatatacaactagaaaaattcaaaaatgaatttaataataaagtaataaatttttttgttatcgaagagccggaagcacacatgcatccacaaatgcagagggtgttaattaaatacttaaatgattattttggtaatcagaaaattcaagggttaataacaacacactcaaatgaaataataaaagttagtgaaatgcaaaaagtaagagttattcgttctagtgaaacactattatcaaataaaatttttgatttaaatcaattcataaataatttatcaaatgaagatgccgttcagttttattctctattatttagaataaattattctgaccttatttttgcaaacaaaattattatgtatgaaggtgatactgagaaaatgtttttggaaagaatcttgaatcttgatagttataaaaatttgagagaacaatacctttcctttgttcaagttggaggtgcatattcacataaatataaaccattattagactttttagaaataaagactttgatatttactgatattgattatgaaaaatcatgtataataatttcagatatattgaattctgaaacaacaaacaacggtttgaaatcgtattataacggctctaaagaggcattaaaagttaaagatttatacgaatggcagcagaataatcctaatatcaggctgttttatcaaacagaaagagatggttatggaagaacgttagaagaagctatattaaataaaaaattgggtattaatgttgaggatgtaaacgacaaaaactattggaaaacaaacaaagaaactaacaatttaatttttagcataccaaataagaatgcggaaggtcaaaatattgacaatgaaataacatcaagagatatagttagggcgacaagtgataacaagacggattttatgtattcaattattttgcaaaatgatgataaaatagtcgattttattccagactatattaaggagggattaaattggctaatgcaataa

SEQ ID NO: 73565 - DNA, 1953 bp, Fusobacterium sp. CAG:439
ttggctaatgcaataaacaataatatgtttttagtaaatgctcctgccggaagcggaaaaacgacttttataaaagataaaattaatgaaattgtcagcaatgacaaagattgcaaaatactgtgtattacatatacaaatagagcagctgatgaattaatatcaaaaattaattcaaaaaatgtaaaaatttcaactattcactcttttgtatccgaattttttaaaatttatttttctaacaaagatattatagaactttattttgaaacatataaaggggatattctcgatagaattaataatatatcaaatgatgaacgaaatgaaatagcaaatcagaaatataaagaagaacatgagggaaatttaagttttgaatatttaaaaaacaatactaaatcaatctcatataacgaattacccttcaattcattatattatggcggattatctcatgatgcactactttcttttgcggaaatattactggacaaatatcctataatcaaaaaaagattatcctcgttatataagtatatttttattgatgaatatcaagacacttcagctaatattttaagatttttctataatgctgtaaaagattcacaaacaacattatttttatgcggtgataaaatgcaacagatatataaaaactatgatggtacttttgaaaatgaattatctacatttaataattcagattttctactaagaacaaactatcgttcatcacaaagtattgttacagtattaaataatatatataatgatccttcttttgttcaagaggtttcaaatattcaaaaacaaggaaataaaccgcaaatttatattgccgaagatgttaattcaactttaaatgctatagaagatataactcccaaaatacttaagctttttatatacaataaagatcgctttgaaaaaataggtgctaaaaatttatatgaaaaagtttcagatatggaaaagtactcatttggtagcaagaatagtccggttgatgttttattaacaaatgatattgataatcctgacccattatttagacttctttttgaaataaatgattttttaaaaaaatataaattaaaacaatatggactgcttgttcaaaaaattaacaataaaaaatccaaaatatataacaaagagctattaaaaattaacaaacatgaagacaagaaaaattttcaaaatttaatagaaggtatttatagcaagtataatgaggatattttaattatagattttttaaaatttctaaatgacaagcaatttttattaaattctgtaactgaaaattatcttgaagattctgaagaaaatgaatacttaacagttttagaacaaagtattgaagagtttagaaaactttgtgaatatatagaaaacccaaaaatttcaacacaacatggcgtaaaaggtgaaggacatgatgaggttgtatttattgctgaagattcaacgagaaacccatatgtaagaatgtatgatttttttgaattactcgctaaaaatgaagttcgctataatgaatttgaaaaattttattatgaatatgtgaaagatattagaaattttgaatatttgaataatataaaactttctgaattaaaaaaggatacatacaatcaatatgtaaattcactaaatgagctcttgcaaagtctaaatcaaaaatataataacaatgtttattataattttttcttttcagatgcatatgcatcatatttatcgcgccccggagtaacaaaatttaataatgcagttaaaataaataatatttttgggactttaattgcatataaattattttatgtaggctgttctagagcaaaggaaatattaaaggtaattgttgaacgttctaagattgacagtttttataatgaatttaaaacaaaaatgcaacaattgggatttgatattatagaatag

SEQ ID NO: 73566 - DNA, 1584 bp, Listeria monocytogenes
atgaatcatattaaaagaatgcatatcaaaggattgaaaaaatttaaggacattgacattgagtttaacgagaagattaatattttagtgggtgaaaatgaaagcgggaaaagtactatactagaggctattaatatagtgttgaatcaacaatatagaagtatagataagtatatattaaaagatttgatgaatataaattctatgaaagactttcataaaaatccacaagtaaataatttgcctagtattacaatagaaatagaactagaattggataaccaagcgaatgtcgatactatttattttcgtggtataaatgataaagataagggacaatttgaaaagtttgggatcttatttgaatgtgaatttgataaggaattcgaagatgaattacgaagtgaaatcgaagatggtgtgattccgtttgaatactataaattaacttggagtacattccagggcagttcgtataacattatgaaaaagccattgcgtacgatttcgattgataactcaattgcagactcaaatagctcatttaattactttaataagtcgttgtttgataataaatactctagctcagataaaatgaaagcaagaaatagttttagaaatgaagtagatttaatttttaatgctttaaatttggaagggctagggaataatcgccagtttggtattaatagtaaaaagacaattttggataatgttcttacggtatatgaagaatcaatttctcttgaaaataaagggaaaggcatggaaaatctgataaagacagaaattgcattaaataaatcgaaaaataagttagatgttgtattgttggaggagccagaaaatcatctttgtcattctaatcttttgaaaatgttagatgaaattaaaaagaatactaatgaggcacaattgatattaactacacatagcaacatgattgcaagcagactggacttaagaaatattctttggattggttctgatgaagctatcagtttaaataaaattgatcaagaagatgctattttctttgaaaaagccgaccaaaacggaatcctgaacctccttttatcaaaaaaagtaattttggtagaagggccaactgaatatatgttattgccgattatgtatgaaaaaataattggaaagtctatggaggaagattttataactataatttcatgcaatggtatagcttataaaagatacttagcaattgcagagtctgctaagaaaaaagtggcggttataactgataatgatggtaaacagaacgtcatagattcaaaggaagaatacaataaagataaagttttacaaagaatatttactgatggtaatctatctaattggacatgggaaatctgtatgtatgagttgaataaaaattactttgaagaacatgttactgtgaataaaacttcaaagtatctatttaataaacaggactatggtaaagtaaaaggaaagatgttaaataataaggcagagatagcctattcaattctaaatgatattgatgatttaaaaattcctgaatatgtaaaaggagcttttacatggataaacgaataa

SEQ ID NO: 73567 - DNA, 2376 bp, Listeria monocytogenes
atggataagaattttggaagaacgattatcaattggttattttcctatagtgatgagaggagaatgatgggttataatattttatctcttaaaaaatctaaggatgaattactgaatgtagtttcaaatttagaaaaagagataagaaatttaaaggaaaatcaagtcaataatgaaagtgaacaaaaaaaattaagtatgcttgtgaacgaatatacaaatagatttggtactattagtaatacaaacaattttgcttcagatgttgtgaggatggaagatgaagatgctaatatttttcatcatttagtaagtttaaatggaggtaacgaatttaacaaagagcaagtaaatgctattcgatttgatatgagaacacatcttaggattatcgctggtgctggaagtggaaaaacgcaaacaatttgtgcaaaggcagcttatttagttttgaaagaaaaaattcaagaacgaaatatagtgatgtgcacattctctaaaaaagcaagccaagaaatgaaggaacgtgtcaacgagtttcttggtggcaatagtcgaatagaagtattgactttccatggatggtttcaaaaagagtacaatgtacttattaaaaaatatccgtatctagaaaagtatgggatagcgggagaggtacccggaaaaggctctggaaaagatagccatgataggattttaatgaatttaattaagcagtatcatttatataattttgataaatatgaagaaaaaccaattaatgaacgacttagttattggcgaaatatgggatataatgatgaggaaattgttgcttttatagcaagatattttgatgacaaagaaatattaaaggatcaactacttagtgaagttttttcagagatgttaaaagaattggaacgaattaagagaagagagaaagtcattaattttgatgatatgttaattaatttaaagtgtgtattggagaacgactcaaatgctctttctttaatacaaactcgatatcaatatatatttattgatgagtttcaggatatcaatcccttgcaaaaacagataattgaacttatttgtccaccagattacgagaagagtgttatcaattctactaaattaattattgtaggagacgatgatcaaagtatttatttcttccgtggtgctgaaccacgttacattaaagaatttgatagacaatacaggcaaacgtcaatagagttaatgactaactatcgttctattgctcctgtggtacatataggaaatactctgatatcaaacaatcaacatgatagaataaagaagtctatgatacctcacaaactaaatgaaggtgattgttacgcaaaagtatttcaaaatgaacagctagaagctaattggattgcaatgcggatattaagcttgtcttcagaagagaaaccattccaagatcaaattggtaaaccgaattatacggaaacaatcgtattataccctaataaaaatcaattaaaatctatgattattgctttacaggaaaaaggaattccctttgtcacaaaatcggatgatgatttacttggtatatttggtattaatttttttaaacgatcattcaatctattaatggatattattgatgcagaaacgatagaaataaaaaagcatttatacaagcaactcataaaaaatatttgtttatattattatataccatttgcaaaaagtacagattttgtctcagatgagactaattatacttcggaaaagttaactgattttatatgcaaagaaaagaaagttagtaaaaaagagatggcacttattaaatccatattccgagatattaatgaatttataaaaaccgaagaattgaatattaaagtttttgttaattggcttgtagaaactccgaaagtaaagaaacaattaattgatgaagagaaagattggttgcttaaagaggttagcaatgttaaaacgctaaaagagttaatacttaaatataaagcagcgagaaccttaaaagaagagatggctgacaaattaagagaatatgataataataactataatgcagtgtatctattaacaattcattcaagtaagggattgggatataaaaatgtttttgtaaaaggtatttataaaaactcactaccagactatcgttcagtggataaagaaagtattgaacttcagccgttaattgaacaagcatctccaccaacaacaatggaagaacaaagaagattaatgtatgtagcgctaacccgagcaaaagaaaatctttatgtaacttaccctagagaaataaatgataagcctacacttgtgtcaccatttataaaagaatctaatattatgtttagtgaagaaaaaatatag

SEQ ID NO: 73568 - DNA, 1926 bp, Alteromonas mediterranea UM7; identical to SEQ ID NO: 72966

SEQ ID NO: 73569 - DNA, 1677 bp, Alteromonas mediterranea UM7; identical to SEQ ID NO: 72967

SEQ ID NO: 73570 - DNA, 1926 bp, Alteromonas mediterranea UM4b; identical to SEQ ID NO: 72966

SEQ ID NO: 73571 - DNA, 1677 bp, Alteromonas mediterranea UM4b; identical to SEQ ID NO: 72967

SEQ ID NO: 73572 - DNA, 1671 bp, Acinetobacter baumannii 1605; identical to SEQ ID NO: 71826

SEQ ID NO: 73573 - DNA, 1782 bp, Acinetobacter baumannii 1605; identical to SEQ ID NO: 71827

SEQ ID NO: 73574 - DNA, 2088 bp, Streptococcus tigurinus 2425; identical to SEQ ID NO: 73098

SEQ ID NO: 73575 - DNA, 1818 bp, Streptococcus tigurinus 2425; identical to SEQ ID NO: 73099

SEQ ID NO: 73576 - DNA, 2088 bp, Streptococcus tigurinus 2426; identical to SEQ ID NO: 73098

SEQ ID NO: 73577 - DNA, 1818 bp, Streptococcus tigurinus 2426; identical to SEQ ID NO: 73099

SEQ ID NO: 73578 - DNA, 1848 bp, Ralstonia sp. AU12-08
atgcacctatcaaaactcgtcatcaagaacttccgcaagctgaagttcgcggagttgtcattccaagccggtctgaatgttttggtcggcggcaacaacgtcggtaaaacggcagtggttgacgccttgcgggcgctgctggccgggcatgacgacccctacccgcgcctcggcgaagaagatgtgcaccgcccccgtgatggcgcgccgtccggtgacatcgtgttcgaatacgtgttcagtgggctgagcctcgacgacgaagcggacttcctagccgcgctggtgccgggcgcggccggcagtctggaggcgcacattaaggttcgctactcagacgcagacaaagctggccgcctgcgcgccaagcgatggtgcggagagcacgaagacgtgggcttgacgtcggacatgatggaaaacttgcggggcgtgtacctgccaccgctacgcgatgcctcgcaaggcctgaagccgggccggaccagccagcttgcgcggctgctacaactgttggcagacgagaccggcattgacggcatcaacaaagcgctgcaggaactcgacagcaaactgaaggcgcaccttcccattgtcaacacgcatgaggccatcaacacccgacacaaaacgatgctaggcccgcaactcgcgcagctgctggaggtcggcctgagcgctagcgactttaagagcctgaagtcccggttgtcgctgctggtggatgccttcgagattgagcagaacgggctgggcttcaataacctgatctatatggcagtcgtgctgagcgagttgaccaagaaccccgactcttgctatcggggcctgatcgtcgaggagcccgaggcgcatctgcatccccaacttcaagccgtactgttgcaatacctacagtcgatccaggccgtcaaaggcgagaagcccgtccaactctttgtgactagccattcgccgaactttgctagcatcgctgacctgaacagcctggtatgcctggtcgacactggtaccgcggtcgagaccttcctcccgcgcagcgtcgtcttcgagaagggtaagcgcgagaagctggagcgctacctcgacgtcacgcgcgccgaactattctttgcccgccgcgtgatcttcgtcgagggcgcggctgagttgatgatggtcaacgcgctggccaagcgcatcggctgcgacctccgccagcatggtgtgagcctcatcagcgtcgaaggtttgaacttcgactcgttccttcccctctttggggacaaggcgctgaagattccagtggcgatccttaccgacgccgacccggtgccgtccgaggatggaccaccagctgtggcgggagcggtggccgtggaaggcacacaccagtcatcgccggccggcgcagccgctgacgaatcagtagacgaaggcgacgacgatgaccctgagccggtgtatccagcgcccggcgatgtcatcaccgtgtcggccaacaccgccaaaatgaagggccgtgaggacacgcacgtcaaggtgttccatggcctcaaaaccttcgagtacgacctagccctagaatcggacaaccgcacagcgatgctcaaggcgttggccgagttgcacccgaagatcgccaagtcgttgactgccaccgtcgatgcagaggttggcgacgctgctaaggccaaggcactgtttcgcggtatgttcgaacgccggaagaacaacgtccagaaaggcagcttcgcccagtcgctggcccaggtcatttcagacgacaaggtgtccttcatcgtaccgacctacatcaaggccgccatccaacacgcttgcagaacggaggaggctcccaaaccatga

SEQ ID NO: 73579 - DNA, 1764 bp, Ralstonia sp. AU12-08
atgagcgggctgacaccagagcagcaggatgtcgtcgacgcgccgatggtgccgctgtgcgtcatagcctgcgccggcagcggtaagaccaagacggccgtgcaccgcctcgtgcgaatgcgccgcaatcttggcgaggcacgcggccgcgtggcgctgctgtctttctccaacgtggccgtcgacaccttccgcaaagcctatgacaacctcgcgagcagcctgccgtccagcgcccgcaggtcgatggtcgacatcgacacactggatggtttcctcactaccaatatcatccgccctcacggccatcgaactatgaagtccgcacggacggcattcctggtgacgggcagcgaatcgtttctggagggtttcaagttctcgacatcgtcttttccccagccgatcacggcgctgcacctggcattcgtgaagggcgacgaagtgttctttcacgtcttcaacgaacagatcgagctggtggacacgtccacagcgcgcaatctcattgcgaagctgggccgcactggtgcctacacacatgacctgggacggtattgggcataccgggcactgaaggagcacccccagctcctcgcagccttggcccgccgatacccgcacatcctgatcgacgaggcgcaggacattggatcggtgcaccaagccatcctggagctgctcatcggggctggctcgtgtgtaacgctcatcggcgatcccaaccaaggcatctacgagttcgcgggcgcagacggtaagtttctgatcgactaccaccaacgcaccggtgtcaagcagcactcacttcaacggaactttcgatcgacccccagcatagtggctcttgccaacggtctgtgtggtcgcagcgatgtcgcggagcgagctgcacccagcacgccgaacggcgccttcttcacaggctataagcggaaccagcacccacaactcgtcaccgcgtttcagagcgcgatgtccgccgttggcgcgaagatcacgcgctcagccgtcctctgccggggaagaggtctcgccgatacactgcgcggcgacgagacgcccgccggccaaggcctggtcaaggctttcgcggctgctgcggtgctgcgcgaccggcggaaagacttcctgacggcgtttcagcgcgtagccgtcgctgtggtcgcgctgctagacaacgcgccccatggcctggtcagtcaaatcacacagtccggcagtgatgcggtgaatcgggaactccgcaaggcaatctgggcatttacgcgcgatgcggccactggtctccctgcctcatcgctggtcgccgatacgcagtggcactccttgctgctgagccgcatcaaggtcttgctggccagccttgagtcaaagttcggccttaagccgaccgacaacatcggccgaaagctgtccaagaaggctctgccgaacgcgccgctctcaagtgtcgaggacctggcctatagcgatgccacgcgcttgcgggtcgacaccgttcacaaggccaagggggaaagtctggacgccgtgctgtacatcacccttaaggagcatgcgctggcactactggatggtgtcagcacggaggtcggccgcatcggctatgtcgcggcgacccgcgcccgagatcttctgtgggtggctgtgcccgacagtgcccttaaggaacttaggccaacgctgctggccaggggcttcaaagaagtaggcatcgccacaacgcccgacatctctcgcacaaatcaaacctctgattaa

SEQ ID NO: 73580 - DNA, 2127 bp, Lactococcus lactis subsp. lactis A12
atgtatctatcaagattgaaaattacaaattttaggaattatcgattttccacttttgatttcaaaaatggagtaaataccataattggagaaaatgattctggaaaatctaatgcattaacagcattgaggattttacttgacgataggttctattactctccaaaaaatctcaaagatagcgatttcaactgttcttttgatagttggaaaggtcattggattattatcactgctgaatttgaagggatgacacctgaagaatcaagaagagaagctattgcttcaatttctcaaaaagtggacgtagaagagagtcttgaaaacctgaattttcagatgtccagtatctctaccgacacaggaagtgtttcggtaattattcgccccaatgataaaaaaaggaaagaactttttgctgcttctggcaacaaagataaatttaattctattaggcaatcaattagcttggttgactatgaatttctttacagatcgaagagtatcgtcaatttttctgacgagaatatttataataaaattgttggcgatttagaaaactatgatgctcccgatcccgatgaaaagcaaaatgaagatgatgttattggaattaagctggatattaaagatattacaaacctcatttcagttatctttattgacgctttaagagatgtgttgctactaatgagtaaagggaataatcctataaagactatcgtccagacaatagaaagtcatataagtgaggataatattcttgaggtacatgaaaaaataagagagctgaattcctcaatatctgggattactgagcttaggaatgttcaaggagaattaaacaataaattggttgatattcttgggcttgtatattcacccgaactgtcactatcatcaaatatatcagatgagttaacatccctttcgaagttcttgaatttaaacccggaaaatgaggaggggttgaattctttaggattggggcatttaaatatgatctttatcgccctcaaaattgttgagtataatatatcatcctctagagaagttctaaatatcatgctagtagaggaacctgaagctcacatacaccatcatatacaaaaaacattgttcagaaatttaggaatccatgatgattctacgcaagttattatgacaactcattcgccgaatatagcagaagtctcagaaatctcgcgaatgaatatagtaaagggaagcaataacatttcatccgtaatgaaaccattttgtggcttaaatcaatttggaacagaacaacttaatcttaaattggatttgacttcagcgatagaacgttatttggacacaaaacgaagtgcattgttattttctaaaggggtaatgttggttgagggggatgcagaagaaataataataccaacactagtaaagaaagttttaggaatttcattggacgaaataggcgtgagtcttataaatatcggtagtacatcctttgaatatattgctcctttgttctcagaagaacgaattcagagatattgtgcagttattaccgatttggatgagcaggcagttccagaagactctgtactgtataaaaagaacgctgaagataacggaaaatcacgcaaggaaaaacttgaaagactgttcgaaaacaatttgtgggttcatacatttttggcagacaccacctttgaaattgaattctctaattgtgaaactaacataactctctacaaagaggctgtttcagaattgtatgttaatcaagcgagtattgataattggaagggagaattatctcaagaagtctgtgataagaggaatgaggttgtactaaagcttgctgacaaatttggaaaaggttggctttcgcttattgtctctaaaataattttttctacgaatgatagagtctgtatcccaagctatattattgacgctttgctttttgcgagtcaggaatcactatccccaaaaattattgcgaatatgataaatggcgtcgtagaaagtgagccagttctaaatattgaagacttcattggtacagacagtaaatacaaaaatacacacccatccatgtttgaatttgtaaaaaaatggaaagatagatatgaaaagtaa

SEQ ID NO: 73581 - DNA, 1773 bp, Lactococcus lactis subsp. lactis A12
atgagtaaaatggaagatgaattaaaggaaaaacttcttagtgatttaaatgaaagccaaaaatcaacagtggaagattgtggtaataatttatatattacagcgtgtcctggaagtggtaaaacaagagctctgacaagaaaaattgcctatttacataacttgtatcccaattcgatgaagaaaattgttgctattacgtacactggtcgtgcggcagaggagatacaggaacgcttagaaattttggggatagatagtgataatgtttgggtgggaactgttcatcaattttgtttaaatttcattcttaaaccatttagttggcaaagcctgcgaatatcaaggggaattagaataattgatgaatatgtgacagagaagtatcttaaagagtgcgcagcgaatctgaagttaaaatatgattacaggaataaacctaacttaaaattgacgagtgaggctgagtttttggaaacggatgaaaataatctaaaattagctaaagcttatcatagaaaattgaagagaaataatgaaattgactttgagctaattttgactttgtcgctttctattttattaagaaatccggagtcatgcctgatgctgtcgagaacaatcagatctatttatgtagatgaatttcaggatacaacagaagaacaataccgaattctatccgctctatctaactcaaaccatgatataaaatatatgtttgttggagatgcagatcaagccatatatacaggacttggtggcgtagttaaaacgaaaactgatcttgaagaaataatgccaataaagttttttgaaaaaactcttgatggttgttatcgctctactcaggatattattgattattattcgaaatatcaacaacagccaataagaattataagtaaggcggaatggtgctcagaatttagcattatcagatataatgatgaagtttccaaagatgaattacctgaaaaaatttcggatataattaggcaggaacttgatagaggtgtgaaagaggaagatatatgtattgcttctcctaattattttattcttttcccattgataaaggaattgaagatgctacttccagatgtaaacttccgttctcaggatatttatcctataaagcctgacgatttgaatcttttttataagataagttttattgtatttacaactgtaggaaaaagggtgtggttgaggaaaaaaatcgcttcagaaattatagatatactaaaaaatgactatggcataagattcgatgataattttacagctttagatctgttggatttattaaactctttttcttcctcaaaaaataacggcctagaatatttaaaagattttgtttatcagttgtttatcgagctaaatattgatgaggataatagcgtggagttatgcagatctacgcgagaattttttaacaaggcgcaagaaagaatagagaataatgacataggtgtagagttggaaaatttcagaaatgcgtatgatgtcaaaaggggagttaacgtttccacaatccataaaatcaaaggggaggaatataatacggttattggtataggattattaaaagggtatattccaaattggaataatgtaattcatgatcaagaccatggaaaatgcgaagcaaagaaaacactttatgttttgatgtcaagagcaaagaagagcctatatcttttttcggagacaggaagaaagactgctagcaaaaatgatttagtcccaacagagtttttatcataa

SEQ ID NO: 73582 - DNA, 2076 bp, Thauera terpenica 58Eu
atgcgtatcaagcatgtagaaatcgaaaatttccggcttttgcggaaggtcgcgatcggactggaagagcggacgacgctgatcgtcggccgcaacaacagcggcaagacctcaatagccgagctgttccgtcgtctcctttccgaacgaactctgacgttcaggttggaggatttctccctcggctgtcatgaaggcttttgggcggccttcgatgcgttccgggccggcgcagatgttcccgatgtgctcggacatctcccatcgatcacaatcacgcttgacatttcctatgatgtagacgcacccgatctagggccgctcagcgactgcatcatcgatctcaatccagactgtgcagaggcgcggctggttctcacttttggtccgcgaacgacggcagccgaaacgctgttcgccgggatcgtcacggcaggcgaagatgtggccgccgaccgtagcactttgtttcgcgcgctcgggagcaggttgccggcagcctatgcgtcgtcacttgaggcggtcgatcccaacgatccaaccaatcgcaaggctctggagccgaagacgcttaccgcactggtccacgggggcttcatcaacgcacaacggggactggacgatgacacccaccgcgagcgcgatgtgcttggcaaagtcgtcgaagtgctctttcagtcggcattgacagatccgcttgacccggaaaaacgcaccaccgccgaacagttaaaagtggcggtggagcagatccagggtgacctgcatgccggcttcaatgcgaagctgacttccctactgcccacgttcgatctattcggctatccggggctagccgaccccggcttggttaccgaaaccagcttcgatgtagataagctactcaacgaccacaccaaggttcgctatttaggcgtgaatggcgtcacattgcccgagacttacaacggcctcggggtgcgcaacctcgtttatatgctcctacagctactgcgcttttttcgcgagtatcaggcaacaccgtcggctgccggagttcatctagttttcattgaggagccggaggcccatctgcatccccaaatgcaggaggtcttcatccgccagctcgaccagatcacaagtgcgttcgtggcacagctcaacgagaaccgcccctggccggtgcagttcgttgtgaccacccattcaccgcacatggcgaacgaagcgcgtttcgaatctatgcgctatttcctgtcagttccggacggcgaaagcctgcgccggtcggtcattaaagacctgcggcttggaatgggcgacgcgcctgtgcccgatcgggagttcttgcaccagtatctgaccctgactcggtgcgatctgttcttcgccgacaaggccgtcctcatcgagggtacctctgagcggctcctgcttccggccatgattcgcaagactgacgccgcggctgccggtgagccacagctggcgagccagtatctaacagtgatggaggtcggaggcgcttacgcgcaccggtttttcgatcttctgaccttcctcgaattgcgcacactgatcatcaccgacatcgacgccgtgaaatccaaccagaacgggaagcgcgtggccgtgcccgtcgcggagggcgaatttacgagcaacggctgcatcaaggcttggttcgagaatgatgtttcgccagccgcattgttggcaaagacggcagttcaaaagatggtcggtcttcgccggctcgcctaccagatccccgaggcagacggcgggccgtgcgcgcgtagctttgaagatgcattcattcttgcaaaccccgaccgctttccacttggtgacggggatgccgccgaactcgcctatgagcacgccgctgagcagaaaaagtcgacgttcgctttggagcatgcaatcgagcaaacggactggaacgtgccccgctacatttcggagggcttgcgctggttggcccatggcaaccttgtcgccctggagccaccacccgctgtcgctatcgagatcgttgccgaagtggccggtgtcgccgtgaatgtcgtagaggctggcgagaatggctga

SEQ ID NO: 73583 - DNA, 1575 bp, Thauera terpenica 58Eu
atggctgatggcgtcgaaagtcccgccgacgccgccggtcgcgtcgcgcttgaacggatgttcgcatgcctcgacgaagcgagaagctttcgtttggaggcgggcgccggtgcgggcaaaacctattctctcgacaaggcgcttcgtcgattgattgaccaccgcggctcggagcttcttcgccagcgtcagcaggttggctgcatcacatacacgaacgtcgccaaggacgagatactttcgcgtatcggggcgcatccggcggtgcgatcagagaccgtccatggcttttgctggtcaatcctgcaggattttcaggcgacgctccgtgcccttgtgcctggattgcccgggtgggcggagaggttggagccaactggtggtatcggcgctcgacgcgtgcactatgagcttggctttcccagcgtgggggatgagcaagtcaccatccgccacgaggatgtgttggcgctgatgattcaggtcatggcatttcccaagttccgggcggtgctaacggcacgttatccagtgctgctgatcgacgagtaccaggacacagacgcagcgtttgttgacgcacttaaggcctggttcctcgatcgcggcgaagggccactgattggactgttcggtgatcattggcagaaaatctacggcgacggatgcggctcagttgagcatgacgcgcttgaggtaatcgacaagaacgccaacttccgttcggtggccccgatcgtgcagatgctgaatcgtatgcgccccgatctgccgcagatggtgagcgaccctgacgcgccaggcgaagcgcgcgtcttccacaccaatgactggcccggagtcagacgcaccggacagggcggtggccactggacaggcgacaccagtgccgacgcggcgagagcctatttcggtcacatcaaaagacggctcggcggcgagggctgggatttctcagtcgggaagaccaagatactgatgctcagccacagcgtgctggctcgcgaacagggatacgcgagtattccgccgatttatggtcagttcaatgagccctggctgaagaaggatgatccccatatcaagtttctgacggaccagctcgaaccggcttgtgcggcgttcgaagcgcggcgttacggcgagatgttcgagagcttcggcgcgggcatgccgcgcattcgcaagcatgtggacaaggtcgcatgggctgacaccatggagacgttgatcgcgctacgactttctggatcgattggtgaggtgatcgactttcttgctgcgcagccacacatgcggcttcccgaggcggtggaagaacgcgaaagaaggctggcggaaacagggcctgaacctgtggagggagagtcacggcgtgtcacccaactgcgcaagctgcgggctgtctcttactccgaggtcatagtgctagaccaattcattgatggccatacgccgtttgcaacgaaacatggtgtgaagggtgccgagtttgagaatgtgctcgtggtcgtcggcagaggctggaacaaggtaagcgctccacgaaccccatccttacatagccgcgggtga

SEQ ID NO: 73584 - DNA, 2124 bp, Haemophilus parasuis 174
atgaaaatcagtcaaataaaaattaaaaattttcgtaagttaaaaaattgtattattaatctttctaataaagaaacgctatttgttggagcaaataatagcggtaaaacatctgctatgcatgctttgatgttttttctgagtaatgaatctaaaaaatttaaaataacagatttttcaattgattattggaaacaattagatgaaattggtaaatcctggctgcacgaagatgttagtaaccatattggttctgatattaatgaatggagaaagtattgtcctagcttatatgtaactttatctaattttatagagctagatttacccaaaattaaacatttaataccatctttgtcttgggatttaaattcatcattatatgtatcgcttatttatgagcctaaagatttaggaaagttgaaagctgattttattaaacatattaaacaaattaaagaagcttattcggaaagaattcctacaattttaccaacttcactaaaagaatttttaggagaaaatataacttcgtatttttctatcaatgcctatttatttgaagaaggcaatgagtcaaatttatatccattgcaaaatttcccttttgaaggaattttcaagttaagcataattcccgcacaacggaaatttgccgattcaactgatattgataataaaagtaataacttatccgatgaactaggtaaattttatgaaaatcacattgattttaagaaactcccatctattgatgatataaacacattactagccattcaagagcttcaaaatagaattacttctgaactaaatataaaatttcaagaaccattaagcaaattaaaaggtttaggatatccaagtgctaattatgatcccgatataaaacttgaaagctttattgataactcagatatattaaagcgacatacaaaggtaaaatttggcaatgatacaaacttagcattaccagaagaattaaatgggttaggttatcgaaatctgatctatatattttttaaattactagcattcaaatctgaatggcaaagagaaggaaaagcatccgaaattgagtatgatttacctattgaaccaattcatttagttctaattgaagaacctgaagcacatttacattctcaggttcaacaaatatttgttagaaaagcttatgaaattctgacacaagatgtatcagatttattttcaactcagcttattattagtacccattctagctatatcattcatgaaataggttttgaaaatctccattattttaaacgaattaataataaagatattctttgttcagaagccattgatttatctaatgtattcaataatagcaatatagaaaataaaaagtttgtttctcgttatttaagaacgatacattgtgatttattttttgcaaatgctattattttagtagaaggttctgcagagagaatgcttctaccatactttattcgttataatttccctgaattacattctagttacatttcaattcttgaggttaatggtgctcatgctcatcgatttaaaccattaattgaagcattaggtgttcctagtttagttcttacagatttagattctgttgaccaagaaggtaaaaaagttaatcctaaacgaggagaaggacaaaaatctagttgtgataatttaacctcttggctttctttgcctgatagaaacttagaaacagtattagattattctgatagtgaacaaattgtaaataattcatttatttcttatcaaaaagaaattcctattaattggcgtggaaaggaaaaaactgtcattccttatacctttgaagattctataatgtattccaatttagatctttttcaaaataaagaaaaaatgaaagaagcaacaggcatgttaaagaaaatgcatcaagctgcattagaacaaaatatagatgattgttgtattaaggcttttaatgcactaagtggagaaaaggctagaatggcattagatattttgtatatgtttgatcctgatgtcaacatatttaatacgccagattatatagaaacaggcttaacttggttaaaaaaagaattgggactagataatggagaatgtcatgaataa

SEQ ID NO: 73585 - DNA, 1800 bp, Haemophilus parasuis 174
atgaataatgtagataatgatatttactcttatgctacagcacagcctcctaaaagttttcttctttttgctggcgcgggatcaggaaaaacaagaacgttagtaactttgttgcaaaaaataaaagaagatcaaagaaataatctaacgaagaatggacaaagagtttgtgtaattacatttacaaatgcggcatgtgatgagataaaacacagactgaactacgatcaaacatttaatgtatctacaattcatagttttgcttgggatttaatcaaaaattttacaaatgatataaggagttatttaaaggaaaaattagaagaagatattattgagctaaatgataagataattaaagcaagaacgactaagtcaagagatagctatacaaaagataaagaaaagaatgagttacgcctagataacctaaaatatattcatcaatttatctatagcccaacagaaattttagttggtaaggatactctcaatcactcagaagttattggtatttgtgctgactttttaaaaaacaaccctttgatgcaagatattttagtcagccaatatcctattctatttattgatgagtgccaagatacgcaaaaagaattattaatttctttattggaaactcaaaaaagaaaaaaagattacttttgtctagggctatttggtgatctaatgcaaagaatctattctaatggttatgctgaattagtggaaaatcttcctagtgattgggaaaaaccatttaaagaagagaattatagatgtccaaaaagaattgttaaactgattaatgatattggtagttcattaaagaataatagatttataaaacaagaatctaaaaataatgatgaaggaatagtaagactatttattcttgataagaacactcctaataaattagagatagagcaaaaagttagagaagaaatggcatcaatatcttgcgatgaaacctggaaagatataaaaaatgttaagactctaatattagaacatgcaatggcagctaagagagctgggtttgatgcatttttctcaccattatctaaaaatgatataattagagataacctcctacaaaaaacaggtgaatctgttttatttctattaaaccaatttcttccactgattgaatatatacaaagtaatagaccatttgaaataatgaggatattagaacgatattctctctgtatgaataaagataacatagtagaaaattttgattattttaattctattattaaagatttttcttatagggtaagtgatgaatctagtttgaaagaattattactctatatttacgaatatgacatattagaattaccaaatgacataagaaatggattgcattttgaccaagaggccgatgaggaaaatagagcatttttatggaatcaagctttaaatgcaaaccttaaaaaattgaaaaattactcttcatatattaaaggtgaagtaggctttggtactcatcaaggtgtaaaaggcttagaatttcctagagtaatggctatcttagatgacagcgagtctcaaggtttcttatttaaatataataaattactgggtacagaacccttaagcagtacggataacaaaaatatttcggaaggaaaagatagtgtcattacacgaactttaagattattttacgttatttgtagccgtgctgaggagtccttagctattgttgtttatagcaatgatccagctagattaaatcaagaagtcattagctcaggatggtttaatgaaggggaaattattgaaatatag

SEQ ID NO: 73586 - DNA, 1779 bp, Sphingobium sp. HDIP04
gtgatcgaaaattttcgcggcatccagtcggcaaaactggtgctgcctgatcacgccgtactgatcggcgacaacaataccggcaaatcgtcagtattcgaggcgatcgatctcgccttggggccggaccggctgagccggcgaccacccgtggatgagcatgatttctatcaggggcgctatcttcccagcccaaaccccgatgctcccgagggcgcggagccaggccccgcgccgaaaatcacggtcgaggtgacgatcaccaatctgtcgccggagcaggaggcacgatttggagccaacgtcgagtggctgaatactactaccggagacttctatcaggaggccgacccggccggggtcgatgctgccgagatcaaggccgcgctgcgtgtcacattcgtcggccaatacgatcctgatgaggatgacttcgtcggcaacagctatttcacgcgcagcctttcagaggatgagacacctgcatcgttctcgaagaaggacaagcagcactgcggatttcttttcctgcggtcgttgaggacaggatctcgggcgctcagcttggaacacggcagcctgctggacatcatcctccggctgaaggaaatccggccgcagatgtgggaagggacgatcggaacgcttgcagccatcgatgtagcgagcgacccggccattggcatttcgggcgtgctcgagagcatcgacaagtcgctgaagaaatacgtcccacgcgaatggggggtgaagccgcacctgaaggtgtcgaacctgacgcgcgagcatttgcgcaaggtcatcaccgcgttcatcgccacgggtgcaggcgaccatgccgctcccttctttcggcagggaacggggacgatcaacatgctggtgctcgcgatgctgtcacagatcgccgaggacaagcagaatgtcatttttgcgatggaggaagccgaaacggcaattccgccatatgcgcagaagcggattgtccatgagctgcgcaaactgtcggcgcagtcgctcttcacgtcgcactcgccgtatgtgctcgaagagttcagcctcgacgaaaccgtcatcctttcgcgatcggacaacggccaactgagccaatccaaaatcgagttgccggagagcattaagcacaagcgttatcggcaggatttccggacccgtttttgcgaggggctactttcgcgccgtgtcctcatcgccgaaggcgctacggaggcgacctccttcccggtcgtcgcgcggcgactggccgagcttagtccggctacctatgcgtctctggaagccttgggcgtctgcgtgatcgacgccggaagcgagacccagatcgccgaccttggggccctatacaagagcctcgggaagcggacctttgcattgtgcgacaagcagacagatgccgccaaggctgccattgaggcccaggtggaacgcctgttcatgcacgacgagaagggcattgaggatctgatcctcaacaacaccacgcaggctgcattggagcgattttccgatcaactcgattggccgcagcatctgctgaaccagtatccgaatccaaaagcacaagcggctgccgcgcttggagcttatttcaaatggtcaaaaggtaattggggaatagccgagttcttagcccagtgctccgaagtcgaaatccctcagtggctgcgcgatgcctgcaccaccttgaaggcagcgtgtgacccgccacctcaaccggccgaggccgatggcgaagatctttttgctgacatcttgggatag

SEQ ID NO: 73587 - DNA, 1827 bp, Sphingobium sp. HDIP04; identical to SEQ ID NO: 73511

SEQ ID NO: 73588 - DNA, 1791 bp, Sphingobium sp. HDIP04; identical to SEQ ID NO: 71922

SEQ ID NO: 73589 - DNA, 1818 bp, Sphingobium sp. HDIP04; identical to SEQ ID NO: 71923

SEQ ID NO: 73590 - DNA, 1281 bp, Sporomusa ovata DSM 2662
atgaagcaacgaggctatttgtatgaaatagattatgtggtcaatgtgttatatattgattcttatgtggatttaaattcattgtttaaaaagaatgttaattcgttgattaaaaacgaaagtgatgttgataaaaaagtattggaacgtatacaacaaacgataattaaacttaattctcatatctcatccttatcaggtattaaagaatttgaaaaaaaagtcactcccgaatataaaaaattcagaaacgaaaatgtatctatatctataaaatcagaaatagcggttaagggattatattcaaatatcgttccgtatattaaacaagatagtgattcaaatttatatccgacagctggtgagggacgaaaaaagttattggcgtactctatttttgatattatttcagatgaatacgccgagacgaaaatcaatctgtttttagttgaagaacctgaaaatcatcttcataaatctatgcaaattgccttatctcagattttgtttactgatgaaaagtataaatatctttttgtgacaacacattctccgtttgtattatatgaaatggaatcagttaatcttgtacgtatttataatgagactaagataaacagtgccagtacgttttataaagtacctaaagagtacaaaaagaataggaaaatgttaaaccgcggactatcggaagctatttttgctgatagagttcttctagttgagggtccatctgaattaatgttatttgaaaaagtactatcctgcatcaatccgttctacgaagctgatggtacatatattttagcggtagggggtataggattcgaaaagtattttgttattttggataaattaaacatagataatgtgatcaaaactgacaatgatttgcgttatgtaaaaagcacaaaaacatatagtttacttggattttctcggtgtaataaaattatagacgaaaggttactgccaactaaacgaataaaagaaaatagcattgccgcaaagaaaaagttatatgcacacaacatcactcaattaaatgaaattcgtgatgattataaagtttttttatccaaatgcgatttagaaaacgatttagatgaagttcttcactctgagttagtaaaatatttaaatacagaagatgcagtggcctatctgcaggatgcaaagcattataatatggttaaattagttgaaaaacttactgacactgactgcagaaaaatatacaatcattataattttgcttgtttgaaagcagtgatgctatga

SEQ ID NO: 73591 - DNA, 1509 bp, Sporomusa ovata DSM 2662
atgattttatcgccaattcaaaaacaaattatttcaacttctggaaacttgatagtacgagcaagtgctggaacaggcaaaacgcatactatggtaaataaaattgcaaaagagataaatgataacaaaagtcataaggttgtagcggcaatcacttttacaattaaagctgcacaagaaattagggaacgcttaacggtagatagttcacagcattttattggtacaaataatagttttgcgattgaagaagtaattaagccttttatgaaggatgtgtacggagccgattttgattgtgatatgaacacggattattcattaaagattgacacgttagaagatggaatacaaaaaattgccgatgaatctactctatgttcgtataataataataaggcaaatttcatttttgaactagctcagcaaatcgttgaaacctcaactgcgtgcagactatatcttcaggcaaaatattttaaaatatatattgatgagtaccaagactgcgacaaagatatgcataagttttttatgtatttgtgtgacaaattgggcatagaaacattcgtggttggtgatgagaagcaatctatttacatatggcgtggagcatatccagatgcatttaaaagtatttgccagaagaataacttcaaaaaaatatttatgggtgacaattaccgctcctgtcagcagatacaaaactattctaatttactatgtgaagaaaccagagatttacatgttccaatagattcaattgacaatatagtttatttatccgctactagtaatacttgggtaacggaggtactgaagaagattgatgcttctcaaaattcggcattgctaagatttagcaatgctaatgctaaaagtggggcattattgttggagaggcagggaatggaatatgtttatattccacaaacacctattgcagacattactactgactcagcatggctttattcggctgttgcaaaatatatgattttagatcagtattcggtttatgatttgatatcagaaatacctgtagagggtaatgattctaaaaaaaacgtagcgacaattaaagattacttaaaaaatattgaaaccagcattaacatagaggatgttgatgaatttgagagtaaaattcaagatttagctaaatatcttggctattcaaccagacgaaatcatatagaaaaattatttcaaacaataattgatagtacttttcatgttgcatttgaacctgaaaaatatcaacatatagctataacttttcattcttctaaaggattagaatttgatcaagtaattatatttgctgaagattaccgtttgtctgacatggcaagtatctataatcactatgttgctgtaacaagagcgagatataagttaataattgttagacttaacaattataattccgatgttttccataataacattactgaaataatatctacatgcaatttgcacataggtgatgtggtttcactagtttga

SEQ ID NO: 73592 - DNA, 1791 bp, Sphingobium ummariense RL-3; identical to SEQ ID NO: 71922

SEQ ID NO: 73593 - DNA, 1818 bp, Sphingobium ummariense RL-3; identical to SEQ ID NO: 71923

SEQ ID NO: 73594 - DNA, 2070 bp, Peptoclostridium difficile CD41; identical to SEQ ID NO: 72494

SEQ ID NO: 73595 - DNA, 1866 bp, Peptoclostridium difficile CD41; identical to SEQ ID NO: 72495

SEQ ID NO: 73596 - DNA, 2091 bp, Peptoclostridium difficile CD44
atgattttaaaaaagatgaaagttaaaaattttaggttattaaaaaattttgaattagattttaaagatgaattgtcgttagttataggtaaaaataattgtggaaaaacatcagcccttattattttagataagatgttaaattcatctaaagtgatgtgggaagatataaatttggaatgtcagaaagaactttatgaaaaaataattgattttgatatatctgagcaagagaaagttgcatcattagaaactgttaatctgcaattatttatcgagtatgatgataatgattcatatgcaaatattcaaaaattcatgatggatttaaacccagaaaataacattatagtgttagaatttatttcgttaatagctgcaaaaaaaatcatagaattaaaaaacattattagtgaaaaaaatattgaagattttaaatcattttccaaatttatgagtaagtattttgcaaacttctttgaaacgaaaaaatattcaagagggtttgatgttgaagcaaacaaaataacgcaagatagatcagaagaaattgacaataaagatattcaaaaagtcattaaagtggcaggaataagagctgatcgagctgtttctaatgatgatcgtaatcatgttttatcaggtttaactggtaaatatttcagttcttataaagctgcaaaagatgaaagtgagtcggtatttacaagacttgaagaaaaattggaggaagccgataaagaattatataagatttacaatggagaaaaaagtgaaagtgaagaacccattgatggtatttttagtgatgttatagatgttattaaaacttatggtggtgcagaaaatggaattgatatagcaatagagtcatctatttcagagaaaaatttattgtcagataatacaaacttaagttatagacaagggggagattgttcgctcccagaaacatataatgggttggggtatttgaatttaattggtattttatttgagattgaaaccaagatacaggaattatttgaacaaccagcagatataaatctcttatatattgaagagcctgaagcacatacacaccctcagttacagtatatatttataaggaatattaaatctcatatcaaagcacatagaaaaaagttgttggaagacaagaataaacagttgcagattttgatcacttcgcattcatcacatatagtttctgaatgtaactttgatgacattatatatttaaagaaaaacgagaatatggttatagctaagagttttaattctttaaaagaagagtatggtggagatgaacagaaaggatttaagtttgtaaaacaatatttgacaatgaatagaagtgaacttttctttgcggataaagctatttgtatagaaggagataccgaacgaattttaatgccaatgatgatgcataagattgataataaagaaaagccaaaagcagatcttatcccactattatcacagaatatttctataatagaagttggagcgcattctcatatatttatgcctttattttcctttttaggaacaaaagttttgtttgttacggatattgactctgtaaaagctgaaaagaaaatagataaaaatggaaaagaaagaactgtatatacgagttgtcatcccgatgagggaacacatacaagtaacgcatcaataaaagaattttttaaagataccggaattgatacatcgaataatcaatttaaggaacttgtagggaaaaatgctgaggataaaattaaagataatatgagaatagcctatcaaataccagaatctgatggtgagtatcaagcgagtagttttgaagatgcatttatagcattaaataaagactttatattaaaaaacaaagaagggttttatcaatatggagctttaaaagactttgcagctgatgaaatagaaagtggcgattattataaatttgcattaaataatgttaaaaagaagtcagcatttgcatcaagtttattatatttcgataaagaagatggtaatgaggatgaaaaatggacggttccacattatattgaggagggcttattatggatacagtaa

SEQ ID NO: 73597 - DNA, 1908 bp, Peptoclostridium difficile CD44
atggatacagtaactttagaaaaggaagttttagaagctcttcaatgtataaaaaatggtgaaagtttcattttagaaggtggagctgggagtggaaaaacatactccttaatttccttaataaatgcactcacagaagaattaccagatattaagatagtatgcattacatatacaaataatgcagttgcagaaattttatcaagaatagaaaatgagaatatttgggtttcaacaatccatgagtttatatgggatcttatcagaaaatatcaaaatgaaattaaggatgttttagtagaacttattaatgatgaagatgaaaagaactttaaaaagccgaaagatttttctgaggatttaatttctaaagattatttcaaaaatctttatgtggattatgacgagtattattctgtaacgccaaatgatgaaaacagaattaaaattagccatgatcacattttgattgttgcagagaaaatgtttgagaaatacaaaaaaatagcagacattttgaaggatattgcagactgcatttttgttgatgaatatcaagatacaagtcctttagttgctgatatattattaaaacatcttgaacaaagcagtaagaaaaatgtaattggtttttttggagattcaatgcaatctatatatgacaacggagttggtaatttaaatcaatatagtttaactaaaatagtaaaaactcaaaaccgaagaaatccaagagttgtaattgaagtagccaataaatttagagatgatggtattatacaagaaccttcagaagatataaatgcacctaatatggagaatggcactattaaagaaggcagtattaaatttttatatggaaatgaaacagatgattttataagcataaaggaaaagagtatttttgaatcttggaatttctcggatggaaaacaaacaaaagagttaaggttgactcataaatataatgctgaaatggctggatttaaaggcttatatgatctatataatgctgatttgataattacgcttataagcaagataaagaaaaaaattgataagggaaatttagacagtgataagactttgggagaattggcgttagaggtaaaaccgacatataaaaaggtagagctgttggatcaaattaacggaaatgaaatttatcattcaatatacagtgttttaaaagatatgccatggaaagaagcttacgaaaaatgtagagttactaatgaatctcttatgtcatataaattaaatgggatgagtggtagatatgaagctaattcttatagagataggattttacgcagattagatatattagaggagattattgaattatatgaggctaataaatttaatgattttttacgaataacaaagttttctattcataataggaatgataagatttgccttaagcaagcaattgattatcttgtaagtgaagataataaaacgatagaagatgttttaaaatttgcggaagtaaaagggttactcaaagaagatgaattattcagtgattatattttaaataaagggttttatttatgggagagaataaaaaagataacatttaatcaatatagaaaaagtgttttatatttaaaagaattttcaccaatttgtactcaacatagtgttaagggtagtgaatatgacaatgtacttcttgtattagaatctgattggaataaatatgattttaatacattatttggaaaggggtcttcaaattccaatgttcagctaagaacgaaaaaattattttatgtatgtataacgagagcaaaaaaggatttaataatatatatgcctactaatgattctgacatattagggaaagcaaaagaattttttggagaagaaaatgttatggatatttcttcgattaaatag

SEQ ID NO: 73598 - DNA, 2070 bp, Peptoclostridium difficile CD51; identical to SEQ ID NO: 72494

SEQ ID NO: 73599 - DNA, 1866 bp, Peptoclostridium difficile CD51; identical to SEQ ID NO: 72495

SEQ ID NO: 73600 - DNA, 2070 bp, Peptoclostridium difficile CD68; identical to SEQ ID NO: 72494

SEQ ID NO: 73601 - DNA, 1866 bp, Peptoclostridium difficile CD68; identical to SEQ ID NO: 72495

SEQ ID NO: 73602 - DNA, 2070 bp, Peptoclostridium difficile CD133; identical to SEQ ID NO: 72494

SEQ ID NO: 73603 - DNA, 1866 bp, Peptoclostridium difficile CD133; identical to SEQ ID NO: 72495

SEQ ID NO: 73604 - DNA, 2064 bp, Peptoclostridium difficile CD169
ttgacaaaaataattcttagtaactataggtgttttggagaagaacctacaactattgaaattaataatttaactggatttataggtcataatagcagtggtaaaactgctttattaagtgcacttatgaaactttttggagaaaagtctagtgatagaattattgaaagatcagatttccatatacctgaaagtattgatccagatagtatttctaagaatgaattatatattgaagcacaatttgagtttcctgaattggagagaggtaaagacagcatatctataccagtattttttaaaaatatggttgttagtgaaccaggtgggaaaccttatttaaggattagacttgaagcaaattgggagaaaagctcaaatcctgaaggaagtattgattcaaatgtatactatataacatctacaacagaggagataaatcctgaagataagcgtaatatcaaaagatatgagcttgatcaaataaagatgatttatgtacctgccattaggagaccagatgaacagttaaaaaatgtctcaggaacaataatttcaagattattaaatggtataagttggtcagaacaaacaaaggcaagaattaaaacgaaagcaagtgaaacggaggaaattttctttgaagaaaaaggggttgaatcattaaagaaatcactcgaaactcaatggaatagttatcataaggatattagatattctaatccaaagataaacttcaatagtactgatttagagacaattttaaaaaaagttgaagtaactttttcacctacagggacacatcgagatcatcgggttgaagagcttggagatgggttacgttctttattttatctttcacttgtaaatacatttttagaaattgaagaagaaattctaaaatctattaatgatggtaaagaagaagatatatttacattaataccgcctgtattaacaattgttgcggttgaagaaccagaaaatcatatttcacctcatcttttaggaagggtagttgaaaaattaaattttatttctacaaaagaaaattcacagacaatattgacatcacattcaccagcaatagtaaaaagaattgaaccaacagacataaggtattttaggatttgtaaggaatatgaatgtacaaaagtgaagtcaattatattaccaaatgaagaaaaggaagcagaacaatttaaatttgtaaaggaatcagtattagcatatcctgaactttattttgcaaaacttgttgtattgggcgaaggtgatagtgaagagatcattattaagcagatgattgaattaaaagcagaatctgtagattcatcagaaatttcaatagtaccattaggtggtaggcatgttaatcatttttggcgtttattaaatgatttagaaattccatttattactttgttagatttagatagagaacgagatggaggtggttggggacgtataaagtatgcaatacaacaattaataaatattggtcatgataagaatgtattactttatacatgtgaaggaatttcacaagataatgaatttaaagagatgcatacttgggatgtaactgatactgaaaatatggctaaatggattgaaatgctaaaaggttatgatgtttatttttcagctccgttagatatagattttgcaatgttacaaagttttaaagataaatatatttcagcattaacaagtgcggaaggtcctaggataaaagatcatggaaaaatacaagatattgtgatcaatgaagatgctgaagatgaatcattgaaagctgcttataaagatagaagagatagtgatattaaatcaaccttaaaacaagaaggtggcgatggatctacttatactgagggagagaaagaactaatgatatggtattcatatttctttttaggaagaggtaaaccaactactcatttatctttattttctaataatactgatatagattttgaaagttttccatactgtctaaaggagtttgtaaatagtattattgaaaagatgatagatgattcagggggtggaagaaaatga

SEQ ID NO: 73605 - DNA, 1296 bp, Peptoclostridium difficile CD169
gtggaagaaaatgaagaggaattggttagtaaagaagattggagtccagcggctggattcagactagaagttgaagcgatgaatacagttattaatgataagaatacacttgttgtagctggtcctggcgctggaaaaacagatttattagctcagagagcctgctttttactagagactaatacctgtagatatcctaaaaaaatccttgctattagttttaaaaaggatgctgctgaaaatttaaaagagcgtttagaattgagatgtgggaaagaattagcttcaagatttgaatcaaagacctatgatgcttttgcaaaagaaatcgtagatagatttagaaatagtttagatgaagcatatagacctttaaataattacaatatagctgaaaatcgtgatgttagaagagcatttgagatagcaggattaaatttcagaggaaatcaaactgaatttaataaagtatatggaaataaactatcgataaataaattgcctttacatacagattttgtagataagatttttatagatgcttggaatgtactacttaaaggcaacaaagataataattttgtaagttcacttacttttggtatgatatcacgtttagccgaatatttgataagaaccaataggtatattaagaaagcaattgaaatgacttatagtcatgtgtttttagatgagtttcaagatactaaatctattcaatatgatcttgttaaagcttgtttttttaaaacagaaacaataattactgctgtaggggatggcaaacaacgaattatgttatgggctggtgctagaaagtcaatatttgaagattttcaaaatgattttttaagtcaaaaaagaacattaattatgaatcatcgttcagcgccaagacttgtagagattcaaaaagcaatgtataacagtttgaatgaagaggcaattgatttaaaaactaatgaaaagtggaattatgaagatggagaagtgtatttaagactttttgaggattatataaaagaagctgatatacttagtgaggaaatagtcgaattggtggaaacaggtatagaaattaatgaaatatgtatattagtaaaacagagcgtagatatttattcaaaagagattataaataaactttctgaacgtaatattaaggcgcgtaatgaagcaatgtatcaggagatattaaaagaagatataataaagacactggtttcgctttttaggttgtcgttaagtgatagaaatcccgatgattgggattatatttacgatattcataggtga

SEQ ID NO: 73606 - DNA, 909 bp, Peptoclostridium difficile CD170
gtgaagtcaattatattaccaaatgaagaaaaggaagcagaacaatttaaatttgtaaaggaatcagtattagcatatcctgaactttattttgcaaaacttgttgtattgggcgaaggtgatagtgaagagatcattattaagcagatgattgaattaaaagcagaatctgtagattcatcagaaatttcaatagtaccattaggtggtaggcatgttaatcatttttggcgtttattaaatgatttagaaattccatttattactttgttagatttagatagagaacgagatggaggtggttggggacgtataaagtatgcaatacaacaattaataaatattggtcatgataagaatgtattactttatacatgtgaaggaatttcacaagataatgaatttaaagagatgcatacttgggatgtaactgatactgaaaatatggctaaatggattgaaatgctaaaaggttatgatgtttatttttcagctccgttagatatagattttgcaatgttacaaagttttaaagataaatatatttcagcattaacaagtgcggaaggtcctaggataaaagatcatggaaaaatacaagatattgtgatcaatgaagatgctgaagatgaatcattgaaagctgcttataaagatagaatagatagtgatattaaatcaaccttaaaacaagaaggtggtgatggatctacttatactgagggagagaaagaactaatgatatggtattcatatttctttttaggaagaggtaaaccaactactcatttatctttattttctaataatactgatatagattttgaaagttttccatactgtctaaaggagtttgtaaatagtattattgaaaagatgatagatgattcagggggtggaagaaaatga

SEQ ID NO: 73607 - DNA, 1866 bp, Peptoclostridium difficile CD170; identical to SEQ ID NO: 72495

SEQ ID NO: 73608 - DNA, 2064 bp, Peptoclostridium difficile CD178; identical to SEQ ID NO: 73604

SEQ ID NO: 73609 - DNA, 1287 bp, Peptoclostridium difficile CD178
atgaagaggaattgggttagtaaagaagattggagtccagcggctggattcagactagaagttgaagcgatgaatacagttattaatgataagaatacacttgttgtagctggtcctggcgctggaaaaacagatttattagctcagagagcctgctttttactagagactaatacctgtagatatcctaaaaaaatccttgctattagttttaaaaaggatgctgctgaaaatttaaaagagcgtttagaattgagatgtgggaaagaattagcttcaagatttgaatcaaagacctatgatgcttttgcaaaagaaatcgtagatagatttagaaatagtttagatgaagcatatagacctttaaataattacaatatagctgaaaatcgtgatgttagaagagcatttgagatagcaggattaaatttcagaggaaatcaaactgaatttaataaagtatatggaaataaactatcgataaataaattgcctttacatacagattttgtagataagatttttatagatgcttggaatgtactacttaaaggcaacaaagataataattttgtaagttcacttacttttggtatgatatcacgtttagccgaatatttgataagaaccaataggtatattaagaaagcaattgaaatgacttatagtcatgtgtttttagatgagtttcaagatactaaatctattcaatatgatcttgttaaagcttgtttttttaaaacagaaacaataattactgctgtaggggatggcaaacaacgaattatgttatgggctggtgctagaaagtcaatatttgaagattttcaaaatgattttttaagtcaaaaaagaacattaattatgaatcatcgttcagcgccaagacttgtagagattcaaaaagcaatgtataacagtttgaatgaagaggcaattgatttaaaaactaatgaaaagtggaattatgaagatggagaagtgtatttaagactttttgaggattatataaaagaagctgatatacttagtgaggaaatagtcgaattggtggaaacaggtatagaaattaatgaaatatgtatattagtaaaacagagcgtagatatttattcaaaagagattataaataaactttctgaacgtaatattaaggcgcgtaatgaagcaatgtatcaggagatattaaaagaagatataataaagacactggtttcgctttttaggttgtcgttaagtgatagaaatcccgatgattgggattatatttacgatattcataggtga

SEQ ID NO: 73610 - DNA, 762 bp, Peptoclostridium difficile CD201
atgattgaattaaaagcagaatctgtagattcatcagaaatttcaatagtaccattaggtggtaggcatgttaatcatttttggcgtttattaaatgatttagaaattccatttattactttgttagatttagatagagaacgagatggaggtggttggggacgtataaagtatgcaatacaacaattaataaatattggtcatgataagaatgtattactttatacatgtgaaggaatttcacaagataatgaatttaaagagatgcatacttgggatgtaactgatactgaaaatatggctaaatggattgaaatgctaaaaggttatgatgtttatttttcagctccgttagatatagattttgcaatgttacaaagttttaaagataaatatatttcagcattaacaagtgcggaaggtcctaggataaaagatcatggaaaaatacaagatattgtgatcaatgaagatgctgaagatgaatcattgaaagctgcttataaagatagaatagatagtgatattaaatcaaccttaaaacaagaaggtggtgatggatctacttatactgagggagagaaagaactaatgatatggtattcatatttctttttaggaagaggtaaaccaactactcatttatctttattttctaataatactgatatagattttgaaagttttccatactgtctaaaggagtttgtaaatagtattattgaaaagatgatagatgattcagggggtggaagaaaatga

SEQ ID NO: 73611 - DNA, 1797 bp, Peptoclostridium difficile CD201
atgaatacagttattaatgataagaatacacttgttgtagctggtcctggcgctggaaaaacagagttattagctcagagagcctgctttttactagagactaatacctgtagatatcctaaaaaaatccttgctattagttttaaaaaggatgctgctgaaaatttaaaagagcgtttagaattgagatgtgggaaagaattagcttcaagatttgaatcaaagacctatgatgcttttgcaaaagaaatcgtagatagatttagaaatagtttagatgaagcatatagacctttaaataattacaatatagctgaaaatcgtgatgttagaagagcatttgagatagcaggattaaatttcagaggaaatcaaactgaatttaataaagtatatggaaataaactatcgataaataaattgcctttacatacagattttgtagataagatttttatagatgcttggaatgtactacttaaaggcaacaaagatactaattttgtaagttcacttacttttggtatgatatcacgtttagccgaatatttgataagaaccaataggtatattaagaaagcaattgaaatgacttatagtcatgtgtttttagatgagtttcaagatactaaatctattcaatatgatcttgttaaagcttgtttttttaaaacagaaacaataattactgctgtaggggatggcaaacaacgaattatgttatgggctggtgctagaaagtcaatatttgaagattttcaaaatgattttttaagtcaaaaaagaacattaattatgaatcatcgttcagcgccaagacttgtagagattcaaaaagcaatgtataacagtttgaatgaagaggcaattgatttaaaaactaatgaaaagtggaattatgaagatggagaagtgtatttaagactttttgaggattatataaaagaagctgatatacttagtgaggaaatagtcgaattggtggaaacaggtatagaaattaatgaaatatgtatattagtaaaacagagcgtagatatttattcaaaagagattataaataaactttctgaacgtaatattaaggcgcgtaatgaagcaatgtatcaggagatattaaaagaagatataataaagacactggtttcgctttttaggttgtcgttaagtgatagaaatcccgatgattgggattatatttacgatattctaggtgaattatatggaatagacgaagggtataaccctaaaatattaaatgatttcattaccaaagtagaattaatgattaatgatctcaaggtaaatttaaatattactgatgaaaaacaattttcagatttagttgattctaaggttgaatatatttcatatgaaaaatttgcatcaaagtttcaaaaatataaatctaaagattattttgatgatttggtagataaatttaaaaagctggtatggattgaatataatgaaactaaagattggattaaagcgattgataactttgaaggtaaaaattcaattccaataatgacaattcataaaagtaaaggacttgaatatgatactatcttttttgttgggttagaagattcagcattttggaattttaaaaatcaaccagatgaagatagatgtgcattttttgttgcattatcaagagctaaaagaagaattgattttacatttagcttagatagaccagcaggattttcgaattcacagaagcattattgtattaatgaattctacgaattgtttgataatactgagattgtaaaaaagatagagtattga

SEQ ID NO: 73612 - DNA, 2070 bp, Peptoclostridium difficile CD206; identical to SEQ ID NO: 72494

SEQ ID NO: 73613 - DNA, 1866 bp, Peptoclostridium difficile CD206; identical to SEQ ID NO: 72495

SEQ ID NO: 73614 - DNA, 2070 bp, Peptoclostridium difficile CD212; identical to SEQ ID NO: 72494

SEQ ID NO: 73615 - DNA, 1866 bp, Peptoclostridium difficile CD212; identical to SEQ ID NO: 72495

SEQ ID NO: 73616 - DNA, 2070 bp, Peptoclostridium difficile 655; identical to SEQ ID NO: 72494

SEQ ID NO: 73617 - DNA, 1764 bp, Peptoclostridium difficile 655
atgaagaggaattgggttagtaaagaagattggagtccagcggctggattcagactagaagttgaagcgatgaatacagttattaatgataagaatacacttgttgtagctggtcctggcgctggaaaaacagagttattagctcagagagcctgctttttactagagactaatacctgtagatatcctaaaaaaatccttgctattagttttaaaaaggatgctgctgaaaatttaaaagagcgtttagaattgagatgtgggaaagaattagcttcaagatttgaatcaaagacctatgatgcttttgcaaaagaaatcgtagatagatttagaaatagtttagatgaagcatatagacctttaaataattacaatatagctgaaaatcgtgatgttagaagagcatttgagatagcaggattaaatttcagaggaaatcaaactgaatttaataaagtatatggaaataaactatcgataaataaattgcctttacatacagattttgtagataagatttttatagatgcttggaatgtactacttaaaggcaacaaagatactaattttgtaagttcacttacttttggtatgatatcacgtttagccgaatatttgataagaaccaataggtatattaagaaagcaattgaaatgacttatagtcatgtgtttttagatgagtttcaagatactaaatctattcaatatgatcttgttaaagcttgtttttttaaaacagaaacaataattactgctgtaggggatggcaaacaacgaattatgttatgggctggtgctagaaagtcaatatttgaagattttcaaaatgattttttaagtcaaaaaagaacattaattatgaatcatcgttcagcgccaagacttgtagagattcaaaaagcaatgtataacagtttgaatgaagaggcaattgatttaaaaactaatgaaaagtggaattatgaagatggagaagtgtatttaagactttttgaggattatataaaagaagctgatatacttagtgaggaaatagtcgaattggtggaaacaggtatagaaattaatgaaatatgtatattagtaaaacagagcgtagatatttattcaaaagagattataaataaactttctgaacgtaatattaaggcgcgtaatgaagcaatgtatcaggagatattaaaagaagatataataaagacactggtttcgctttttaggttgtcgttaagtgatagaaatcccgatgattgggattatatttacgatattctaggtgaattatatggaatagacgaagggtataaccctaaaatattaaatgatttcattaccaaagtagaattaatgattaatgatctcaaggtaaatttaaatattactgatgaaaaacaattttcagatttagttgattctaaggttgaatatatttcatatgaaaaatttgcatcaaagtttcaaaaatataaatctaaagattattttgatgatttggtagataaatttaaaaagctggtatggattgaatataatgaaactaaagattggattaaagcgattgataactttgaaggtaaaaattcaattccaataatgacaattcataaaagtaaaggacttgaatatgatactatcttttttgttgggttagaagattcagcattttggaattttaaaaatcaaccagatgaagatagatgtgcattttttgttgcattatcaagagctaaaagaagaattgattttacattagcttag

SEQ ID NO: 73618 - DNA, 2091 bp, Peptoclostridium difficile 824; identical to SEQ ID NO: 73596

SEQ ID NO: 73619 - DNA, 1908 bp, Peptoclostridium difficile 824; identical to SEQ ID NO: 73597

SEQ ID NO: 73620 - DNA, 2070 bp, Peptoclostridium difficile 6042
atgcaattgacaaaaataattcttagtaactataggtgttttggagaagaacctacaactattgaaattaataatttaactggatttataggtcataatagcagtggtaaaactgctttattaagtgcacttatgaaactttttggagaaaagtctagtgatagaattattgaaagatcagatttccatatacctgaaagtattgatccagatagtatttctaagaatgaattatatattgaagcacaatttgagtttcctgaattggagagaggtaaagacagcatatctataccagtattttttaaaaatatggttgttagtgaaccaggtgggaaaccttatttaagaattagacttgaagcaaattgggagaaaagctcaaatcctgaaggaagtattgattcaaatgtatactatataacatctacaacagaggagataaatcctgaagataagcgtaatatcaaaagatatgagcttgatcaaataaagatgatttatgtccctgccattaggagaccagatgaacagttaaaaaatgtctcaggaacaataatttcaagattattaaatggtataagttggtcagaacaaacaaaggcaagaattaaaacgaaagcaagtgaaacggaggaaattttctttgaagaaaaaggggttgaatcattaaagaaatcactcgaaactcaatggaatagttatcataaggatattagatattctaatccaaagataaacttcaatagtactgatttagagacaattttaaaaaaagttgaagtaactttttcacctacagggacacatcgagattatcgggttgaagagcttggagatgggttacgttctttattttatctttcacttgtaaatacatttttagaaattgaagaagaaattctaaaatctattaatgatggtaaagaagaagatatatttacattaataccgcctgtattaacaattgttgcggttgaagaaccagaaaatcatatttcacctcatcttttaggaagggtagttgaaaaattaaattttatttctacaaaagaaaattcacagacaatattgacatcacattcaccagcaatagtaaaaagaattgaaccaacagacataaggtattttaggatttgtaaggaatatgaatgtacaaaagtgaagtcaattatattaccaaatgaagaaaaggaagcagaacaatttaaatttgtaaaggaatcagtattagcatatcctgaactttattttgcaaaacttgttgtattgggcgaaggtgatagtgaagagatcattattaagcagatgattgaattaaaagcagaatctgtagattcatcagaaatttcaatagtaccattaggtggtaggcatgttaatcatttttggcgtttattaaatgatttagaaattccatttattactttgttagatttagatagagaacgagatggaggtggttggggacgtataaagtatgcaatacaacaattaataaatattggtcatgataagaatgtattactttatacatgtgaaggaatttcacaagataatgaatttaaagagatgcatacttgggatgtaactgatactgaaaatatggctaaatggattgaaatgctaaaaggttatgatgtttatttttcagctccgttagatatagattttgcaatgttacaaagttttaaagataaatatatttcagcattaacaagtgcggaaggtcctaggataaaagatcatggaaaaatacaagatattgtgatcaatgaagatgctgaagatgaatcattgaaagctgcttataaagatagaatagatagtgatattaaatcaaccttaaaacaagaaggtggtgatggatctacttatactgagggagagaaagaactaatgatatggtattcatatttctttttaggaagaggtaaaccaactactcatttatctttattttctaataatactgatatagattttgaaagttttccatactgtctaaaggagtttgtaaatagtattattgaaaagatgatagatgattcaggggggggaagaaaatga

SEQ ID NO: 73621 - DNA, 1866 bp, Peptoclostridium difficile 6042; identical to SEQ ID NO: 72495

SEQ ID NO: 73622 - DNA, 2070 bp, Peptoclostridium difficile 6057; identical to SEQ ID NO: 72494

SEQ ID NO: 73623 - DNA, 1866 bp, Peptoclostridium difficile 6057; identical to SEQ ID NO: 72495

SEQ ID NO: 73624 - DNA, 2070 bp, Peptoclostridium difficile DA00132; identical to SEQ ID NO: 72494

SEQ ID NO: 73625 - DNA, 1866 bp, Peptoclostridium difficile DA00132; identical to SEQ ID NO: 72495

SEQ ID NO: 73626 - DNA, 2064 bp, Peptoclostridium difficile DA00134; identical to SEQ ID NO: 73604

SEQ ID NO: 73627 - DNA, 1287 bp, Peptoclostridium difficile DA00134; identical to SEQ ID NO: 73609

SEQ ID NO: 73628 - DNA, 2064 bp, Peptoclostridium difficile DA00141; identical to SEQ ID NO: 73604

SEQ ID NO: 73629 - DNA, 1287 bp, Peptoclostridium difficile DA00141; identical to SEQ ID NO: 73609

SEQ ID NO: 73630 - DNA, 2070 bp, Peptoclostridium difficile DA00212; identical to SEQ ID NO: 72494

SEQ ID NO: 73631 - DNA, 1866 bp, Peptoclostridium difficile DA00212; identical to SEQ ID NO: 72495

SEQ ID NO: 73632 - DNA, 2064 bp, Peptoclostridium difficile DA00215; identical to SEQ ID NO: 73604

SEQ ID NO: 73633 - DNA, 1287 bp, Peptoclostridium difficile DA00215; identical to SEQ ID NO: 73609

SEQ ID NO: 73634 - DNA, 2070 bp, Peptoclostridium difficile DA00246; identical to SEQ ID NO: 72494

SEQ ID NO: 73635 - DNA, 1866 bp, Peptoclostridium difficile DA00246; identical to SEQ ID NO: 72495

SEQ ID NO: 73636 - DNA, 2070 bp, Peptoclostridium difficile Y10; identical to SEQ ID NO: 72494

SEQ ID NO: 73637 - DNA, 1866 bp, Peptoclostridium difficile Y10; identical to SEQ ID NO: 72495

SEQ ID NO: 73638 - DNA, 2070 bp, Peptoclostridium difficile Y41; identical to SEQ ID NO: 72494

SEQ ID NO: 73639 - DNA, 1866 bp, Peptoclostridium difficile Y41; identical to SEQ ID NO: 72495

SEQ ID NO: 73640 - DNA, 2070 bp, Peptoclostridium difficile Y155; identical to SEQ ID NO: 72494

SEQ ID NO: 73641 - DNA, 1866 bp, Peptoclostridium difficile Y155; identical to SEQ ID NO: 72495

SEQ ID NO: 73642 - DNA, 2190 bp, Peptoclostridium difficile Y266; identical to SEQ ID NO: 71982

SEQ ID NO: 73643 - DNA, 1794 bp, Peptoclostridium difficile Y266; identical to SEQ ID NO: 71697

SEQ ID NO: 73644 - DNA, 2070 bp, Peptoclostridium difficile CD104; identical to SEQ ID NO: 72494

SEQ ID NO: 73645 - DNA, 1866 bp, Peptoclostridium difficile CD104; identical to SEQ ID NO: 72495

SEQ ID NO: 73646 - DNA, 999 bp, Peptoclostridium difficile Y312
ttgacatcacattcaccagcaatagtaaaaagaattgaaccaacagacataaggtattttaggatttgtaaggaatatgaatgtacaaaagtgaagtcaattatattaccaaatgaagaaaaggaagcagaacaatttaaatttgtaaaggaatcagtattagcatatcctgaactttattttgcaaaacttgttgtattgggcgaaggtgatagtgaagagatcattattaagcagatgattgaattaaaagcagaatctgtagattcatcagaaatttcaatagtaccattaggtggtaggcatgttaatcatttttggcgtttattaaatgatttagaaattccatttattactttgttagatttagatagagaacgagatggaggtggttggggacgtataaagtatgcaatacaacaattaataaatattggtcatgataagaatgtattactttatacatgtgaaggaatttcacaagataatgaatttaaagagatgcatacttgggatgtaactgatactgaaaatatggctaaatggattgaaatgctaaaaggttatgatgtttatttttcagctccgttagatatagattttgcaatgttacaaagttttaaagataaatatatttcagcattaacaagtgcggaaggtcctaggataaaagatcatggaaaaatacaagatattgtgatcaatgaagatgctgaagatgaatcattgaaagctgcttataaagatagaatagatagtgatattaaatcaaccttaaaacaagaaggtggtgatggatctacttatactgagggagagaaagaactaatgatatggtattcatatttctttttaggaagaggtaaaccaactactcatttatctttattttctaataatactgatatagattttgaaagttttccatactgtctaaaggagtttgtaaatagtattattgaaaagatgatagatgattcagggggtggaagaaaatga

SEQ ID NO: 73647 - DNA, 1866 bp, Peptoclostridium difficile Y312; identical to SEQ ID NO: 72495

SEQ ID NO: 73648 - DNA, 2070 bp, Peptoclostridium difficile Y171; identical to SEQ ID NO: 72494

SEQ ID NO: 73649 - DNA, 1866 bp, Peptoclostridium difficile Y171; identical to SEQ ID NO: 72495

SEQ ID NO: 73650 - DNA, 2070 bp, Peptoclostridium difficile Y307; identical to SEQ ID NO: 72494

SEQ ID NO: 73651 - DNA, 1866 bp, Peptoclostridium difficile Y307; identical to SEQ ID NO: 72495

SEQ ID NO: 73652 - DNA, 2064 bp, Peptoclostridium difficile Y381; identical to SEQ ID NO: 73604

SEQ ID NO: 73653 - DNA, 1287 bp, Peptoclostridium difficile Y381; identical to SEQ ID NO: 73609

SEQ ID NO: 73654 - DNA, 2070 bp, Peptoclostridium difficile P15; identical to SEQ ID NO: 72494

SEQ ID NO: 73655 - DNA, 1866 bp, Peptoclostridium difficile P15; identical to SEQ ID NO: 72495

SEQ ID NO: 73656 - DNA, 2091 bp, Peptoclostridium difficile P29
atgattttaaaaaagatgaaagttaaaaattttaggttattaaaaaattttgaattagattttaaagatgaattgtcgttagttataggtaaaaataattgtggaaaaacatcagcccttattattttagataagatgttaaattcatctaaagtgatgtgggaagatataaatttggaatgtcagaaagaactttatgaaaaaataattgattttgatatatctgagcaagagaaagttgcatcattagaaactgttaatctgcaattatttatcgagtatgatgataatgattcatatgcaaatattcaaaaattcatgatggatttaaacccagaaaataacattatagtgttagaatttatttcgttaatagctgcaaaaaaaatcatagaattaaaaaacattattagtgaaaaaaatattgaagattttaaatcattttccaaatttatgagtaagtattttgcaaacttctttgaaacgaaaaaatattcaagagggtttgatgttgaagcaaacaaaataacgcaagatagatcagaagaaattgacaataaagatattcaaaaagtcattaaagtggcaggaataagagctgatcgagctgtttctaatgatgatcgtaatcatgttttatcaggtttaactggtaaatatttcagttcttataaagctgcaaaagatgaaagtgagtcggtatttacaagacttgaagaaaaattggaggaagccgataaagaattatataagatttacaatggagaaaaaagtgaaagtgaagaacccattgatggtatttttagtgatgttatagatgttattaaaacttatggtggtgcagaaaatggaattgatatagcaatagagtcatctatttcagagaaaaatttattgtcagataatacaaacttaagttatagacaagggggagattgttcgctcccagaaacatataatgggttggggtatttgaatttaattggtattttatttgagattgaaaccaagatacaggaactatttgaacaaccagcagatataaatctcttatatattgaagagcctgaagcacatacacaccctcagttacagtatatatttataaggaatattaaatctcatatcaaagcacatagaaaaaagttgttggaagacaagaataaacagttgcagattttgatcacttcgcattcatcacatatagtttctgaatgtaactttgatgacattatatatttaaagaaaaacgagaatatggttatagctaagagttttaattctttaaaagaagagtatggtggagatgaacagaaaggatttaagtttgtaaaacaatatttgacaatgaatagaagtgaacttttctttgcggataaagctatttgtatagaaggagataccgaacgaattttaatgccaatgatgatgcataagattgataataaagaaaagccaaaagcagatcttatcccactattatcacagaatatttctataatagaagttggagcgcattctcatatatttatgcctttattttcctttttaggaacaaaagttttgtttgttacggatattgactctgtaaaagctgaaaagaaaatagataaaaatggaaaagaaagaactgtatatacgagttgtcatcccgatgagggaacacatacaagtaacgcatcaataaaagaattttttaaagataccggaattgatacatcgaataatcaatttaaggaacttgtagggaaaaatgctgaggataaaattaaagataatatgagaatagcctatcaaataccagaatctgatggtgagtatcaagcgagtagttttgaagatgcatttatagcattaaataaagactttatattaaaaaacaaagaagggttttatcaatatggagctttaaaagactttgcagctgatgaaatagaaagtggcgattattataaatttgcattaaataatgttaaaaagaagtcagcatttgcatcaagtttattatatttcgataaagaagatggtaatgaggatgaaaaatggacggttccacattatattgaggagggcttattatggatacagtaa

SEQ ID NO: 73657 - DNA, 1908 bp, Peptoclostridium difficile P29; identical to SEQ ID NO: 73597

SEQ ID NO: 73658 - DNA, 2070 bp, Peptoclostridium difficile P36; identical to SEQ ID NO: 72494

SEQ ID NO: 73659 - DNA, 1866 bp, Peptoclostridium difficile P36; identical to SEQ ID NO: 72495

SEQ ID NO: 73660 - DNA, 2064 bp, Peptoclostridium difficile P61; identical to SEQ ID NO: 73604

SEQ ID NO: 73661 - DNA, 1287 bp, Peptoclostridium difficile P61; identical to SEQ ID NO: 73609

SEQ ID NO: 73662 - DNA, 2070 bp, Clostridium bifermentans ATCC 638
atgtttttgtcacaattaaaaatatggaattttaggaaatatggtacaaaagaaaatggagatacaggaattacagtatcttttaatgatagattaaatctaattgttggtgaaaatgatagtgggaaaacagctattatagatgcaataaagttagttctaggtactcagagttatgacaatattagaatagaagaaaatgatttttatagaagtaaagatggaactagaacggattcattaaagattgaatgcacatttgaagatctatctgatttagaagcaggtagatttttagaatggatttacatagatgatgaaggtaaagctaaattagaagttagactagtagcaagaatcaaggataacaaggtaactataagaaaaactggaggtaaagaaggggtagatattaactttgaagcatcagaaaatctaagagttacatatttaaagccgttaagagatgcagaacatgaattaaatccaggatatagatcaaggtttgcacaagtactaaagagtcatcctatatttaaaaataatgggaacactcacaagatagaagaaattatgcaagatgcaaataaaaatattgaagaatattttaaagtaagtatatctcaagataatagtgaaagttcaggtagtgattctgcagaagaaaataatgaggaacttaattataaagacgatccatcaagtattataagttcaatttcagatacattaagtaactttttaggaaataataaagatcaatatgatgtgaatattaatatatctgaaatggaattaaacaagatattatctaggcttatgttaaaaatagatgaagataaggttggattagggactctaaatcaattatatatggcgatggaattactattattagatataaaagaaaagaataatgaatttggattagctttaattgaagaaattgaagcacatatacatccacaagcacagttaagagtaataaagcatttagaggaaaatattaaatcacaaacgatacttacaactcacagtataacattagcatcaatagctaatttaaatagtttaattctttgtaggaataacaatgcatattctttaaacagtaaatatacacgtttatcttcaggtgattatgagttcttagaaagatttttagactctacaaaagcaaatttattttttgcaaaaggtgtaattatggttgaaggggatgctgagaatatattaataccgactattgctaagattataggaagaccattatatatgcatggagtatcaattgttaatgttggaaatgtagcatttttaagatattcgaatatatttatttcaaaagatggagagcaaactataggaatacctacttcaattgttacagatttagatgtaaggcctattcagtattatcaagatgatgataatgattgtgatagtgattttaaatatactgtatatgagataaaagatactaaagaatgctttataaataaaattaattcgaagaaaagattgaaagaaattttgggaagagcatctaggcagatacttaggaataatgagtatttagataaagttaatattatagaagataattacagtaaatataaagatgttgtaaagaaagataaagaagaaaaatataatttacaggatataaaagtatttacaaataactggactatggaatttgatttagcattaagctgtataagagaatatgtatatgcagcagttttaatagcaaaatatataaaatctgatgaaggtggtattgatgatattgatatagatgaatttattaacgatgctaaagaagaaatagatgaatttattgaagagggtaaagttgatatggatatagcatatcaaatatataagccactattaaaaggaaatgcatctaaagctgtgtgcgcacaatatttatctaaaattttattaaataagtcaaatgaaagtgaggaattagttaataaaattaatgaagatgagaatataaagtatatattagatgctatacatcatgtgactaagactagaagtgaggttacagaataa

SEQ ID NO: 73663 - DNA, 1968 bp, Clostridium bifermentans ATCC 638
atgaatatgatatttaatgatattgaaataacagaagatgatattaggtatgcagaggagatacttttcgataaagttaatatttttgatgagcaagagagaattccaataatacaagacttcaataattcatttgatgtaaatgcatgtccaggaagcggaaaaactacagttttattagctaaattaattatattatctagaaagatgccactaaataatggacaaggcatatgtgttttaactcataccaatgttgcaatagatgaaataaaaagtaagttaggtgacaagagtgatatattgtttaaatatcctaactattttggaactattcaaaattttgtagataaatatttagctataccttattttaaaagacaaaagaatgagaatattaaaagtatagatgacgatatatattacgataatataaaaaaattatcaaaagaagtgtatcctaacatagatagtataatacagttttgtatcgaaaagggatatggtaattatacttgcgattctcacgaaagaaactttatgacctttatagcgaataaacattttaatattgataataatgacataagagataattacaataaagtactaacagataagttttattatagtgagttgaaagatattatgttaaataagacattagataacggaatattaagatatgaagatgcatattttttagctggattatatattaaaaaatttccagatataaagaaatatttttcaaatagatttaaatatgtttttatagatgaaatgcaggatgtaagtaaaatacaaatgaaaattatagggaatatttttaatgatgataaagttattattcaaagatttggagacataaaccaaagcataagtaaattcgactcaaataataacaattggatatttaatgaagagcttaaaacaattaattcaagtaaaagatatggagatggagtggttaaatttttagagccattgagagttgaaaagtttggagagtttaagggaaatgaagacattgatactttaaatcctcatataataatatttgatgatcctgaaatagaaagtgttataccaaaatatttagagttattagataagtataatattaaggaagaaaaaaataagaggataaaagtaattgggaaattggcactttcagttagtaatccatataaatcaatatcatcttatgtaagaggatataattcaaaaggaaatagagatatacctttacataaaaaagttattaataaattaaatagagtaaagactactaaggaattttatgattatttaatatctgtaattttactagctatagatattgatgggagaaaagttagtaatgaagaatttactaggttgatggaggataaatatattaatgaatttacgatatatcgttctaatatattaaaatggactaaaaattttagagagaatactagtttagtattggaagatatattagacaaaactcaatctctatttagtgaagtagaagaagtaaattgtaataatgatatactaaaaaacaaaataaatagtaatactggagaagtggaagaaagccaggaatatctagaagcgatagagctagttataagtatggataatattgatactataatgagtactaaaggagaaactcataaggcaacattatatttagagagtaaactagtgtatagcaatggcgatgatagaagcgatatcagtagaatcttagattatatggtaaataaaaaagaggaagtagacgatggtgataaagaagcattaatgaatgcatatgttgctatgagtagagctgaaaaattaacttgtattgctattcaatatgagacaataaagggaagaataaaagagtttaaagagtatggatatgaagtaattggatgtaatactgagatcgatgtactaatatcgaatgaacttcaagaattataa

SEQ ID NO: 73664 - DNA, 1992 bp, Vibrio parahaemolyticus 10290; identical to SEQ ID NO: 72330

SEQ ID NO: 73665 - DNA, 1752 bp, Vibrio parahaemolyticus 10290; identical to SEQ ID NO: 72331

SEQ ID NO: 73666 - DNA, 1923 bp, Pseudomonas alcaligenes OT 69
atgaggctgagcaatctgcttatcagtaacttccagtcctttgggccggcagcggaggagatctcgttcgaagatgttacctacctcctaggccctaatggtgcagggaaaacagccgcgctgcaggcactctgccggatgttttcagttgatcccagcttacgccgaatccgccgttcagactttcacgtccctgccactgaagcgaagcagcccgagcagcgtcatctgtggcttgaagcagattttacgtttgaggaaacactcgaggacgatgataacgacactgtgccgccgttcttcgggcaaatggcaatgcgcgaggtgggagggaccccttggatacgctttcgcctagaggcaacactgtacgaggatggggagattgaagagcaatttctcttcgtcaccaagacggacgagaatgacgagcctgtatcgaaacaggcggttccaaaacggcatcgtgacacaatccatctccactacctcccagccaagcgcgatccttccgatcacgtcgcctacggcgcaacagcccttctggggcggctcctacgagctgccaactggactgaagaccgagagacggtaaaggatctcacagagcaaattactgactgccttgttgagaacgagtcagttaaaacactgagcgatagcctcaccactgcttggcagcgtctgcacaagggggacttctttgcatcgccccgcctgacgtttgagaactctgagatcgaagcattacttcggcacctcactgtctccttcagccctggccatggagaaaatcaggttgactttgcacgcctgagtgatgggcagaagtccatgctgtacctctcgctggtcctgtcagcactcacgatagggcgtgatgtgaggtcgggagagaacaaggctttcgatccccataaattgaaaccgccggcattcaccatcctcgcggtggaagagccggaaaacagcctttcgccacattacctcggccgcatcgtcaactcgctgaagtcctcagtcgacgtggatgcccaagcactgatagccactcaagcgccctctatgctgcggcgggttgagcctgaaaacatccggtacctgcgactgaatggagatcggcgcacccaagtcacaactattcagctacctcagaagcataccgacgcttacaagtttgttagggaggcggtgcaggcgtttcctgagatctatttcgctcgactggtggtgctgggggaaggtgatagcgaagagatcgtactgcccagaatccttcaggcgaagggggcacctgtcgatgaatttgctgttgcaattgccccgctcggtggtcgccatgtgaaccacttttggcggttgctctcagcgatcggaactccctacatcacgctccttgaccttgatgtcggccgccatcagggcgggtggggacgcgtgaagtacgtcagggaccagcttgctcagtatgctcctgaaaataacctacccgctggctggccttaccatgaatggaacgatcccaacacgcctgtacgaacccataactggttcgagagtggaacagtaagcctcttcaacgagctcgaaaaaaggagcgttttcttctccgaccccttggatctggactttgcaatgctgtgtgccttcccacaggcatatgaggctgaagccatcgcagcaaccccaaagagccacaccaaggtcttaggagatagccatttcaatcccgaccaatacgacgaagatgaacagagcttgttcgaggcttaccacaagcttttcaagttgagcagcaagcctgcagcccacttgggcgcgctaggaaggctcactgatcaggagcttcttgatggcctgcctgagtcgctggatcggctcgcagataaagttatcgaacggctcgatgagtcaccggaatga

SEQ ID NO: 73667 - DNA, 1335 bp, Pseudomonas alcaligenes OT 69
ttggtggatgaggcgttgagccaagactacgaaattggtccacagtacatccgaggcaaacagatcaccttcaatcatctgctcccgcttgcccttcggatcgtgaaagagagcgtgatcgcccgcaatgcaatacgtcagtcctattcacatgtgttccttgacgaattccaagactgcactgcagaccaatacgaactgataaaactgctgttccacggtacaccagcgatcctgaccgctgtaggagataccaagcagaccatcatgggttgggcaggcgcacttgaaggaatcttcaaaacttacgctgacgactttggtgcccgccctctgcgcctgttcttgaacttccggtcccagccagcccttctgcggatgcagaatgacgtcattcgggagattgaggctgatgcggtgatgccggaagatcttgccaagggtgatgggggggagattttggcggggcgtttcccaaatgccgcggaggaagcgcaggctgtagcgaaccttattcagcgctggatttctcaggaaggcataccacctagtcagatcgccgttttgatgcctcgtcagattgaagagtacggcgaattcctaatgtttcgactcactgagttgggaatcgctcatcgcaacgatcacaaccttcaggatctcctgaaagagccggcagtcagccttgtagtcgactacctcacttgcctgtacggccaggagcaagcagaagcatggtctcgattaatggaccacttcaccccgttcgaggacgacgacagccgaagcagtgcccaacggatcttcgaagagacctatcgtgagcacctgaagaaagttaagcaagagcgcaaaacagcgaatccatatgcctcatggtgggatatggccaatgaattcctcaaaaaactaggcttctcgtccgtcagtgcactctccgccgactaccgctccaaggctcgtctgttagagattgttcgcgaagttcgtgagcgcatcagagggctactggctacagagccagatttactcagagcattggcacggctttctgacgattcggcagttcggttcctaaccatgcataaaagcaaaggtttggagtttcattcggtagttgtgcttggcgtcgagcaacaaacgttctgggggcaactcgaccaagagcgatgcgtgttctttgttggaatctctagggccaaaaaccggcttgtgcttacaactgcggattacaggccatggccaaagaacgcaagaagatgggatgagcatcgagctccgcatgccgagtttgtgagccatgttgtgcgccatctcaccaagcagcacttctaa

SEQ ID NO: 73668 - DNA, 2226 bp, Flavobacterium indicum GPTSA100-9 = DSM 17447
atgaatcagaaattgtatgatattttcttaaagttaatattattacctaactatctaaaaaaacaacatctatatatgaaaatcgacttcattgaaattagaaatttcagaaagcttcaatcttgtaaaattgatttctcagaagaagagacaatttttgtaggcgctaataatagtggtaaaacaactgctatggatgcattaattatattcctgaaaacaaaaattttcaaaactcaagacttcacattaaacaattggaaagagttaaataaaattgccgaaaattgggttagtgatgaagaattgacagaagaaaaacaatcaattaaaatattagaaaactatctacctacattagacgtttggattcaagtcgaagatagcgagctacactatgttagccacattataccgacgttagattggaaaggaggattacttgggatacgattacgatatgaaccaaaagaaatgatagatttgattcaggaattttccactacatataataaagcaaattcattactaagtgaaaaaggcaaaaaatttaaattatggccaaaaacattttgggatttttgtgagaggaaactaagttcacattttacagtaaaaacatatttacttgacccagaaaaatctactgaaagacaagaattatctgaaaacagtatagctttagatggtgatgttttgaaaggcctaatcagaattgatattataaatgcgcagcgtggattcagcgatgcaaattcagagccttctgaaaacaaaaatgataaaaaattatcatctcaattaagagcatattatgataaacacttaaatccaacattagaaccaacagaaagtgatatagatgctttagaatccattaatactgcacaagatgcttttgataaaaatttaaaggaaagttttaaaacatctctttctgaactcgaaagtttaaattaccctggatttggaaacccacaaattcaactttcgactcaagtttctacttcagatggtcttcaacacgattcagcagttcaatattatcttgacgagggattatctctaccagaaaaatataatggattaggttatcaaaatttaatatctatcatatttaaattaatcagatttagagatgattggatgagagtgggtaaaaattctataagtgaagatgaaataattgaaccattacatttagttttgattgaagaaccagaggcacatctacatacccaagtccaacaagtttttataaaaaaagcatatagtgttttaaggaataacggaaatttagaagacaagaaagattttacgactcaattggttataagtactcattcaagctatctcgcccatcataagtttattagtttgagatattttaaaagaaatgtctctaacactttatctacttctgaagtaataaatctatccacaacttttggaacagaagatgaatctactaaattcacaaaaagatacttaaacactacacataacgatatattttttgctgatgctgttattttagttgaggggccggctgaaagaatgctcattccccactttataaaaaactttcatccgttattggataattgttatattaccattttagaaattggaggaagtcatgcccatagattgaaacctttaattgaaacattaggaataatatgtttggttataacagatattgattcagttgacccaagtaataatggaaaaaaatgtcaaccagaattaggtaaaaattataaaacaaataatgatactctaaaaacatggcatcctcaaaaagaacttttagacgacttattgaacttaacttttgataagaaggtaaaatctgacttaccaattcgagtggcatatcaaattgacgtagagcttgttaatgagggaagtagtatttatgcaaatccttacacatttgaggattcattggtaatcgagaataaagaaggatttaaatcaatcgataagccaacaggtcttttaagaaaaatggttgatgcttcaaaaaaggataatttacaagaatttgttaaagagacatattcaattataactgaacctcaaagcaaaaaggctgaatttgcattagatgtattgtatttcgaagaccccaaaaacataaatactccagtatacattaaagagggattagaatgggttgaagagcaacttaaaagtaataaacaaggactaaactcataa

SEQ ID NO: 73669 - DNA, 1875 bp, Flavobacterium indicum GPTSA100-9 = DSM 17447
atgactcaatataacaacgacatagatattcatgtagataatgagatttacgaatgtattgatccaaattctcctaaaagtttttttttatttgctggtgcgggatctggaaagacaaagactttaatcaatgtactttcacgttttaaagaacaacatggagcaaattttaaatttcggaataaaaaaatcgcgattataacttatactaatgcagcagcagatgaaattactcgaagattagaacacaatagtatttttagcgtaagtacaatccatagtttttcttgggatttaattaaaaatttcactcccgatattaaggtatggattaataataacttaattgtggaaattgctgatctagaagaacaacaatctaaaagcagaggagtaaataaaacatctataggtagggctaagaaaattgaatcaaagagggaaagattagcttcattaagtaaaattaaaaaattcatctataatcctaatggtgataatataacaaaggattctctaaatcatagcgaggttatttcaattactgctaattttatcaagtcaaagactttgtttaaacagatattgttaaataagttccccgttattcttattgacgaaagccaagataccaagaaagagttaattgatgcgctgtttgaacttcagaaccagtataaagaaaaattatcattgggtttgtttggagatactatgcaaaggatttatgttgacgggaaagagaatttaggtgttggactgccagctgattggatacaacctgcaaaaaaaatgaatcatcgttctaaaaaaagaataattgatttaataaataaaatcagaagtgaaattgacggtcaagaacaactccctaggacagaaaaaacagatggtgtagttagattatttgccgtatctagggcgaaaaacaaatcagaagtagaaaaacttatttgtcaaaaaatgaaggaatgtacagatgatgaaaaatgggagaatgacgatactgatgtaatgacacttactttagaacatcatatggcagcaagaaggatgggattttctacattttttgaccctctttatgctgttgataagattaaaacaagtttattagacggaacttcaacgtcgattaatttattttctaaaatagttttacctttatatcaagcacatataaaaaacaataaatttgaaattgcaaacatcgtaaaaaagcattcagaattagttaataaacaagcgcttttaaaagaagaaaataaattaagcacattccattcaacaaatgaaaaagtaaatgaattactatctttatggatcgagggaaaccaacctactttactagaaatattagaaaagattaatgaagctaatctatttaaaactccatcaaccttaaaattagtcttagcaagaacaggtgctgaagtgattgaaaatgaggaagaattagatgaggatggtgatattttaggagcttgggaagttgccctaactgcaaagttttctgagataatagaatatagcaaatacataaatgaagaatctacttttggtacacaccaaggagttaaaggattagaatttgaccgagtaatggtaattatagatgatgaagaatcaaaaggatttatgttcagttatgataaattgtttggaataaaacctttaacttcaaccgatcaaaagaacattgatgaaggtaaagaaactggaatcgatagaacattgagactgttttatgttgcatgtagtagagctaaagaaagcttagcaattgtctcctatacagatacaccagaagaattgaagaaaaatataattaattatggttggtttattgataacgaagtagaaattattaaatag

SEQ ID NO: 73670 - DNA, 1842 bp, Stenotrophomonas maltophilia MF89
gtgtatttggcagagctgtctatctcgaactttcgcaagatcaacaacgctgtactgcacttccaaagtggactgaacgtcctggttggtgcgaataacgcgggcaagaccgccattgtcgatgcgctgaggtctctccttgccgggcacgatgaaccttacccgcggttggactcagacgatattcatcggccgaagacaggatcgcctagcggcaacatcgtgttcaagtacatcttccgagggttgagccccgatgatgaagctgacttcatgactgccctgaagcctgccaaggacgggcagatggaggcgcatatcaccatcagcttctccgaggcggataagacggggcgacttagagcgaagcgctggtgcggagaccatgatgatgtcggcttgacagcggacatgatggaaaaccttcgtggcgtctatctacagcccctgcgcgatgcttctcaggctcttaggcccggccgcacaagccagctgtcccgactgtttcagctgctcgttgatgacgatggcaagatcgagatcaataaggcactgaagctgctggatgatgagctcaagacgaaagcgccgattgtgagcacccataaggcgataacgactcgccactccgagatgttggggccacagctgtcccagctgctcgagctgggggttagcgtcagcgatttccaacgcctggcttcgcgtctctctcttaccgtagatctgttcgagcttgagcaaaatgggctcggattcaacaatctgatcttcatggcggtcgttctcagcgagctgaccaagaacccgcaagctagctatcgaggcctgatcattgaggagcccgaggcacatctgcatccccaattgcaggctgtgctcctgggatactttgagaccatcaaggcagtggacaaagagaagcctgtccagctgttcgttaccagccactcacccaactttgccagcatcgccaacctcgacagtctcacctgtcttgttgacaccggaatcaaggtggagactttctttccccgagacatcaagttttctgtcggaaagcgtgagaagcttgagcgctatttggacgtcactcgggctgagcttttctttgcgcgccgcgcaatcctggtcgagggtgctgcggaattggtccttgtcagtgtgctcgccgagaagtgcggtcacgatctacgtaagcatggggtaagcctcatcagcgttgaaggtctcaacttcgactcattcattccactgttcggcgagaaggcgctgaagattcctgtctccgtacttacggatgcggacccaacaggtccgagtgaagaggatgaagaggaagaggaaaagggcgatggcagcgcagaagcagacgaccatgcgccggaagatgggacctcaagtggaaagaagaaggcggcccctgtctacccttcgatcggcgacaaggtgcaggcgtccgccaacaccttgaatatgctcaggttcgcggattcatatctcaagatcttccatgggctgaagacgcttgagtatgacttggccttgtacgccagcaatcgcaagatcatgcttgcggcgcttaaggagctacacccgaagatttctgcgaacctggagaagaaggtagacgccgctacgggagatgcagagaaggctcgcgtactgttcagcgggatgttcgagaggaagaacggaaacgtccagaaggggcgctttgcacaagctttggcgtacctgatcgccaaggcgaaaaaggaagaattcactgttccggagtatatccaggctgcagtcgagcacgcttgtcagcctggcccgaagaaggctgaagacgaatga

SEQ ID NO: 73671 - DNA, 1737 bp, Stenotrophomonas maltophilia MF89
atgtcggtcattgcttgcgcgggaagtgggaagaccttcacggctgtacgtaggctggcccacatacgtcaatgcctcggtgatcaccggggccgggttgcgctcctgtccttctcgaacatcgccgtggagaccttcaggcgcgagtaccaggcactcgcaatgggatcgctcaagatcccgtcccaccagcgtgtcgagatcgacacattggacgggttcattacgacaaatattctgcgaccccacgcccatcggacgatggggtgtaccacgaccccgttcttgctatcagggagcgagtcattccttttaggtaaggactatcgcttctgggtggaatcgccgagaaccgatagctacccagtgccccaagggcatatccatcgcgttgtcataggcccttctggagctgcaacgggcttcttctatcagaactccggcatgctggcgaggatcaacaatggcccaaaggttgccgcagcattgggaaaactgggggcttacacccacgagctggcgcgctactgggtcgaccttaccctccgcgaacaacccgagatcctccgagtccttgcgcgtcgctatccccacatcctcattgatgaagcccaggatatcggcattctgcaccaggtgatcattgagaggctcagccaagcaggctctcagatttcccttattggggatcccaatcaaggcatctacgagttcatgggcgcgaccggctcgttcctgtccagctaccacagcaaacccggtgtttctgcggccgccctgacgcggaactatcggtccgtgccggccgtactcgatctcgccaacgcaatctcggcgcgtacggacgatccggataggacagcgccacctacgctccacggggcctacttcgttccgtacacgactgccgatacgaagaaggtcatggcggccttccaggcaacactggtctccgctgggttggacccagcacgctccgccgtgctctgccgcgcacgcaagtgggccaacgagctggctgggcatgagggtgcgcctggcgtgggaacgaccaagatccttgcccaggcagcgatggcgcgcgatatccactccgactactcaacagcattcagactcgtggcaactgccatcatgggtttgaccgacaacgcgcccaagggcatcgttgctcgcctgactcagcctgccaggtacccagaggaacgagcacttcgtcgtgtcatttgggcttttacgcgagatccggtctcgggcctgcccagcgcggcgctgcccgctgttagcgattggcagccggcactgttgcaacgtataagggtcctgatgaccaatctgagcacagcccacggtctcaaccacacatcgtccacgctcggtgctcggctctcgaagaggagtttgcccggctcaccgctaatgagcccgcctgacctaggtgccgatcagcccttgcgggtcaaaatcagtaccgtgcaccaggtcaaaggcgaaagcctggatgccgtcctctacatggcaacgaaaccgcatgtatctgcactgctaggcggaggttccaccgaggacgggcgaatcgggtacgtggctgtgacccgggcaagggatctgctgtggttggctgtccctgcaacagctttgaagagccttcgtgccgatctccaagcaaagggcttcaaggacgcaaccgctacggctgcaaccccaacggccggacatgacaacggttccctctga

SEQ ID NO: 73672 - DNA, 2073 bp, Escherichia coli HVH 9 (4-6942539)
atgtacattcatcaggtcgaaattaaaaacttccgtcttttagctgatgcagagcttgtattggaggaacagacgaccgtcattgttggacgaaacaacagcggaaaaacatcactctcagaaataatacgcagattcttagcagatggtagtgctactttccaacttgaagacttttccagttcctgctacgaccgtttttgtgatgctctggaagcacttaaggaaggcatggaagatcatctcgttcgagaacttattcccgccattgaacttcggctgaaattccagtacgaccctgcacaacctcaattaggtccattgagtccctttgttatcgatttggatcccgcgtgttctgaagcgcaggtagtagtccgatacgaattgaaagatggccatctgacacaatttctcgaaagtcatactgaaatgccactttctagagaagaccgcctcgctttcctccgtatattgcgagaacgtatccctaataatttctgtgtgaaaatatgggctgaagatcccaacgatcctgataatcgtcgcgagttaccacctagtgcattgcgcggtctggtcaaatcgggctttatcaatgctcagcgaggacttgatgatgtgacatcccgagaatccgatgtactggctaaaacagttgaaaatcttttcgcaacagcctcttcggcatctgcgggaacggctgataaacaaattgctgatgcattgaaaggtgcagttcaggacattcagactcaaattgacacaaacttcggaaaccagctcaacagtctgattccggctctagaaacttttggatacccaggattgggaggacaggagttacatactgaaacattgctcgatgttagcaagttgctatcaaacttcacgaaagttcgctattcaggttatagcggaatcgcattaccggagtcatataacggtcttggtacacgtaatctgatatttattctcttgcaattagctggtttctataaagcattttgtgccgaagttactgagccgggtgtacacctgatattcattgaagaaccagaagcccatctgcatccacaaatgcaggaggtttttattcgtcaacttgccaaaattgcacaacaactggtggatggcactgaggacaggagaccctggcctgtacaatttgtcgtgtctacacactcgcctcacattgccaatgcggctggtttcgagagtattcgctattttctgggggctccagcacaggggactcgggaaggtgtccgaaaaaccaaaattaaagatctgcgtaaagggctgaatcatattccaattgaagataaaaaattccttcatcaatacatgacgttgacacgttgtgatctgtttttcgcagataaagcgattctcgtcgaggggttaagcgagcgattattgcttcccgtcatcatcaaaaaactagaatcagccgaaccagagagaccgaagctgtcgagccagtacgcaacggtgatggaagtcggcggtgcatacgctcatttgttcttcgagttattagcgtttcttgagcttcaaagtctgatcataacagatctggacgcagtcctaagagcaggaggtcaggcatgtgctgttcatcttggtacatattccagtaatgcttgtttgaaagcatggttctctgaagatacccctttcacattagctggtttgattgccaggagtgacgatgataaagctcgtaatggaaatcgtattgcctatcaatgtgcagaagtgacagatggcccctgcggacgcacattcgaagatgcatttatccttgcaaattcggctttattcgggctggtagggagaaatactcaggaactggaaatagaagcccgtgataaagcggctgagtggaaaaaatcagaatttgcattgaaatacgcgattacagagacagaatggaacgcccccaaatacatagtcgatggaatccgctggttagctggcagcaatgagcttatgacacaagatccagtattggcgcaggttgtagaggccacaactagtattgaagaaggagccagcgctgatgtctga

SEQ ID NO: 73673 - DNA, 1734 bp, Escherichia coli HVH 9 (4-6942539); identical to SEQ ID NO: 72137

SEQ ID NO: 73674 - DNA, 2073 bp, Escherichia coli HVH 198 (4-3206106); identical to SEQ ID NO: 72136

SEQ ID NO: 73675 - DNA, 573 bp, Escherichia coli HVH 198 (4-3206106)
atgtctgagatccattcgcccgccgaagctgctagccagcgagctttggaatctatgtatgcttgcctcagtgaaggacgaagcttccggctggaagctggcgctggtgcgggtaaaacgtattcccttattaaggcacttcgattcttgattgagcgaaataaggatttatttgaaaaacgtagccagcaaattgcctgcatcacctttactaacgtggcgaaggatgaaatcgtcgcgcgaacagatcgaagccccatcgttttttgtgataccaatcatgcgttctgttggtcgttaataagcagctttcaaaaaccgttgagagaactgattgaaacaatgccaacatgggcagaaaagctcgaagaagttggtggaagccttgggaatcgtagtattgagtataatcttggacatcgctctattcgcgaccatcgtataactcttcatcatgacgatgttctttctttaactatctcactcatggagcacgaaaaattccgtagagtgattgcagaacgctttccaatcattctggtcgatgagtaccaggacactgataaaaactag

SEQ ID NO: 73676 - DNA, 1704 bp, Escherichia coli HVH 222 (4-2977443)
atgtatattgataatgtgtatttaaaaggatttaggaactattctgatagttttgtaaaatttaattattcaactcttataattggtggtaatgatgttggtaagaccaacttattgtattcattaaggattttgttggataaaagcttttcggatttagatttagaacctaaaaatagcgattttcatattgatgcgaaaggaaatcagtgtgaagagttagaaataataattaattttcgtgaagtaaaagaggatgctgttctctctaagttagcggggtatgttagtgatgatgcacaaacatacatcaaatataaagcatacagagctactcttgattacaagttatatataggccacaaagaatctgaaatggatgagattagtggcagattttatcttaaatatttaaatttacgctatgtgaattcacagcgagaccttgctaaatatatatctacagagaaaaaacatttacttcggcttgctcaagaaatgagaaacgaggagcaagtgcggaaggatgaaaatactttgaatgaattaactaatttattaaatgatgtcaatgataaggtaaaagaaataagctacgtctcgaccgctacggaagaattgaatgatgagttaaagaaattatcatataacaatgaaaagatttctgtaatgctcgattctggagcaattggtgttgatcagtttattgaaaaattagagttaagttcaaatacaaatggaaaaaaggtaatgcttggaggggacggatttaataaccaagtattacttgcattatggaaagccaagagtgtacgcgagcacgatactgaaaatgaagtggttatatattgtgttgaagaacctgaatcacatctttatccgcaccaacagagaaaattatctgagtatttaattagtaaattgccggggcagtctctagtaactacgcattctccgcaaattgccattaattactcaccagattcaataattaaaatttgctcttataacggtgagtcttacgcagcaagtgaagggtgttcagattgcataagtaatgcctggagtggaatgggatacaggatgagtatacttcctgcagaggcattcttcgctaatgtcgtattcttggtcgaagggccttctgaaatgttattttatcaggcccttgcaaaagagtgccaaattgatctggatttctttaatataagtatattatcagttgatggcgttcaatttgaagtttatagaaaaattcttgatgcacttgagattaaatgggttgctcgtacagataatgattcgtctaaagttccaaggaaaaaagagtggcaatattcaggtttaaatcgagctttggctctatgtggaatggagccactaaagaatgaattaacggaaatatctcaagctcaaagaatagagaaacacaaaatttataaagataagcttaaacatcataatatatttgtttcaattaatgatctcgagggtgatattggcgttgagttaagtacacagctgaaagaatatgtaggtgttgataatgaggaaattgctgctgattatttaagaggaaagaaagcaataaggatgcaagagttcttaggtgaatactcttatgcactgaaaaatatttcagacggtgaattaattcaaccccttttaactgctgtaaaattggctacggaagagttgagatga

SEQ ID NO: 73677 - DNA, 1623 bp, Escherichia coli HVH 222 (4-2977443)
atgatagattttacccatgagcaaaaagcagcaatagattacccatctagtatggtattgacggcttgtcctggaagtgggaaaacagcagtaatcgtagagaagattgtccgtgacttggtagaatgcaaggaatatcagggtgttattgccatatcgtatactaacaaagcaagcgatgaactgaaaaagagatgtttaaaggctactccaaattcaaaatcaagcttttttgggacaatagataaattttatttgactgaagttattttaccattcattaagcaattatggggaagagttgatgacttacatgtagttaagcttaatgagttagcttcttctgaaaaagataggctttctgctttttttaatgtcgaattcatttgtgaaaaaattaatgagtatgattttaaggatataaaggaactatacgccaatggtattctaatactggagtttataccattgcttgcattttatatattgcgtaacacgttagcatgtcgccgatatatcgctaaaaaatacacatctatatatattgatgagtatcaagatgctggatgtgttcagcatcttctttttctttatcttttcgaacttggagtaaaagcggttgcagttggtgatgctgaccaatccatatattcatatgcgggtaaaagttcgaaatacttaatgtctttactggatgaaaaaagtggctttgccccttttaaaataactataaatcatcgttctcattcatctatagttaattatgcttctcgattgttgaatgaaaactgtgacttgttaataacagatgaaattcgtgtctacagaaaaactgttaatggtactcaatgtgaaatagctaagtggattgatgctaatattaacaatattaaacgaaagttcaatatttcaaaagaaaaagagatagcgatacttactgcaacgaatagttctgtcgctttagtatccggccttataaactccaaagcaagagcatatcttgatgatgagctgtctgtactcggtggagatgtgtctctcttattaaagaaccttttgaattatcgatttaataaaacgattacagcacaggctatcattgaaagtttaaattacaaggtgctagagaggaatgcaataagaaagatgaggggggttattagagatgtgagagattctaatgacaaccaacttattcctgatttacgtaaggcagtaaaattattaatcaacgctgatatttctgctaaccatattgatgccattaactcaatcttacacaataaaatgatgctaaataattatttaccagttagtgatgatgagttacaaataatgactttacataaagcaaaaggactagagttcgactttgtttttcatttggatctttatgattggatattaccgcgaagggaatatataaaacattgttttgatgaggttttttcacattatgagcaatgtctgaatcttcattatgttggagttactagggccaaaaaagctgtggtattaataaattctactgagcgtttaaattatcagagtgaattaaaaaaagcgaaaccatctcagttcttgtcactaaaaggacttgaaagtctgtataaaaaaatttaa

SEQ ID NO: 73678 - DNA, 1785 bp, Escherichia coli KOEGE 73 (195a)
atgcggatttcccgaattcggttaattaatttcgccaacttctctgacgttgatgttgaaacgggtgagagtattgttattgttggtgaaaacaaggttggcaagagcaattttattcgcggcctgcagctgattcttgacccagggttgtctgagcgtgaccgtcaactgggttttgaacatttttgggatggattgggcgaagaaaaattgggggagaccatcgaaatttcagtggatcttactgatttcactgacgatccccgattgatggcccacctgaatgactgtgtccttaatccgggacctccgatggtggcccgtcttacctatcgctttcagcccaaaaccgggttaaatcgagctcctgagtcgttaaaagattatgagtatgtgatcttcggtggcgctgatcctgacatgcatattggtggtgcgtttcgccgtatgttacccatcgatgttcaaggcgcgttgcgtgatgccgagaaggatctttcaagctggcgtaattcacccttaagaccacttattgaagaactatccgcatctctggacgacgagactcgtgaggagattcaaacccaggttgatgaggctcagcaggaactggctaatcatgatgaggtggcagcaacagccgaacgaattagcgaacggttggttgctatcgcaggtgagcaacatgccgttccgctatcgttaggacttgcaccgactcgcgttgatgcgctactacgtagcctgcgcttgctgcttgacagtggcattcgtggcattggcgatgccagtctggggacggctaatctgatttttctggccctgaaaagcctcgaacttgatcgtcttgtcgatgatggagaacgagaccatacgtttttcgtagttgaggagccggaagcgcacctgcatccgcacgtacagcgtctggtgtaccgttatttcctgggtactgatggggggaatgatgatgaagggacgccgctgacaacgatcctgaccacccactccccacatattgccagcgtcacgcctgtcagatctatcgttctgctgcgttatgactcagaggacgagaaaacaattgctgtttcaactgcgaacgcaccgttttcgcggcgggacgaagatgatttgcagcgctatattgacgtcacccgtggtgaaatattcttttcacgtggtgtaatcctagtggaaggagatgccgaacgttatcttgtcccggcatttgccgatgctcttgatattcccctcgatatgcttgggatcacggtgtgctccatcggtggaacaaatttcactccgtatgtgaagctattggggccacacgggctcaatattccgcatgtgattctgacagatcgcgatcctatagcgggtagagagcctctggttcgtagaagacttatcaatattttaggcgtacttgagggagatgttgaccatgatgatatggataccgatgaggtgattgcacgtgctggggagtatggatgcttcgtcaatgagatcacactggagcctgagctgtttaccggtggattggccgaagccatgcagtcggtaattgagcgggaattgtcgctggcgcaagttactctagatcggatacaggcatgggtggatgacacggaccagcttgatatcgtccggttgttgaaactgattgagcgaattggcaaagggcggttcgcccaggcgctggcaccttcggtgtcggaggataattgcccggattacattcgtgaagcactggagtatatctgcgatgccgtcacgtag

SEQ ID NO: 73679 - DNA, 1818 bp, Escherichia coli KOEGE 73 (195a)
atgccgtcacgtagtgtcagtgcagcctacttagctcaggctgccgagttggccggaaatccgggccagttagccgcgtatcactcccagggacactgcgtggtgctcgccgggccagggagtggtaagacaaagacgcttgtactgaagctggcccgaatcctggctgaggatgttcaagctccacgtggtgcggcatgtatcacatatagccaagaatgcgcacgcgagttaacccgtcgtctcgaagcgctggggctcagagaggcaccgaatctctttattggaaccgttcatgggttctgcttgcgccatctgttgatgccctatggacgacttgccgatctgccaatcccatttccgctgtcagtagtgtctcagcgcgagagcgaacggttacttcgacaatctggtgaccgtctatttggcgcaaaccatccctataaggctattgatctcggacggcatcgccgttcggtgttgaatcgcaatagcgttgcctggcgtgcagaggaggagctcgctgcatgggccgaggcctacgaagtagcattgcgccagcaagggctaatagactacgacgatatggtgatattcggccagcgtctgatcattgagcatgattgggttctgcccctagtacaggcgaaatttccgatccttgctgtggatgaatatcaggatttgggcgtggcgctccaccgtatggttaaacgcctggctttcgagggaggcgtacgcttatttgctgtgggtgatgcagaccaatcgatttacggtttcactggtgccgatggtgcgttacttctagaactggcagacaggagagacgttgaaacagttcggctccagttgaactatagatcaggggcgggcatcgtcaatgcatcggagatggtgttgggtgaggttcgtggttatcgagcaaacgacccgaaccgccagacaaccattgcgttccagctgtgcccggatggtttggtggatcaggctgtccatgctgttgcgcagattattcctgctgcgttggccgctaagccgggtcgaacgctgggtgacatcgccattctgtacaaggactaccgtgccggcgatgtggtggccgatgcggtgacagctggcggttttgattacattcgtgtggacaccgcagcaccttatcgcaaggttaccttgacgagctgggtggaggattgtgcggcatggtgtgctggcggttggcgtattgggcaccctcaactgcgcggattgatagaccgttatatagcatttcatcgggcaaggctggatgatgcatgcgcccggcgtaaggggcaggaattaactaggctgctttgggcgcttcgtgcagaccgacatcctgcgtgcgattttgtcgcatctttgcgcaacggtctcgttgattccctgctggcaactgagccgacgctttctgatcaggctgagcaactagatcgcatgactgctgcacttgccgaaggcggtacgttagcgatgttggatatcacgagcctaggtggtcgtgacggttcacctgagcacctcaatttgctgacacttcactcagcaaaaggttgcgaatatgacgtggtcatcatggtcggcttggatctggggaatttgccgtggcgcaatgaggcgccagagaagctgcgtgaaagccgtcgtcttttctatgtagggctgacccgcgcacgggacgaggtgcatatgctgtattccggttttgttgatggtcgctacggccctatgcgtctagggcgttccccatttctggatgaactggaggagcgaatgcgaggggccggtttacggtag

SEQ ID NO: 73680 - DNA, 1824 bp, Escherichia coli UMEA 3113-1; identical to SEQ ID NO: 71786

SEQ ID NO: 73681 - DNA, 1893 bp, Escherichia coli UMEA 3113-1
atgaatctatcaaatgctcagcgccagatcgttgaagcccctatggatatagctattcaagtgcttgcctcagcaggttctggaaaaactcgtgtcttaacagagcgtgttcgatatatattgaataatacaaagagagatgctgttattgccctgacctttacgaataaagcagcggaagaaatgagttcgcgtttaagtgattttgatccagatgaagacagggtctggattgctacgattcactctgttgcgcagcgtattttagaaaaatacggacacaccattggtttgccatcagatttgtatatatatgatagagataaggatcgtatggaagtctttatgcagtctttgcgtgaagatggtattgatatagatgaatatctctccattgcagattccaaggaattgaaaaatagagagcgaaatctgcaatcgtatatggatatattttcaaaaataaagagagagttgcttactgagtttgaggtatctgagttgtatccagataataatatctggaaaatatatcaagattatcaggcttcattacttaatagtggcggtatcgattatgacgatattttagtatatgcacatcggattctgctcacgcatgattggatagcaaaaatatatcgttcaaaatataaacatgtttgtgttgatgaagctcaagatcttaataaagcgcagtatgaatttattaaggtgctgtgcggtgatgtgataaaaagtattcttatggtaggtgaccctaatcaaatgatttatggttttaatgggtcatcaaaagactacttttgtgaagattttattaatgatttttttcctaatcagtttgagttaaaggagaattatcgtagtgccaaagctattattcgcgcagcaaataagttaagaccgggatcacaagcagagattgattatgccttagagggaggcgttagaatctcagaagtcgcttcagaagaggatgaagctgatacggttgtcgctactataaagtatcttctggaattgaaagttcacgatgagattgagggggatatttcactaaacaatatggttgtgattggccgtaatcggtttgtttttggcaaacttgaaaaatgccttaaagaaaatttgattccctactctttgaggaaaggagagagagcgttagaaccttcgactagatttggaaaagtcctggactatgccattagagtgaagttgaattcaaaggattgggttgatggaaaaaaattatgtcaagtactttgcatatcagagccggctggctggacacctgatgtattgcgagagatggcggttcaaatttcatcatcagatgatgattactctattgtatttgaaaaacttcttactactattgatagcttaaatattgaaaatcctaaaattcccaagctaataaaggaatttaatgctcttcttacatcgttagttgaaaatcacaatggtatttcagacgataaaatagaagacgtcaagttgagtattgaggagcttaaagagtttagtggtatgtggactcgatttaagcgtaaggggttaggtgattcattagttgcatttaggaacgcattggcattggggcaactagctgaaagtagtatggatgaaggcttaactttaagtacagtgcatactatgaagggactggaaaaggatatcgtgttcttgataggtatgtgtgaaggggttttcccggattacagagctagaacgcccaaagagcttgaagaggaacgcaataacgcttttgttgcggtgacaagagcgaagcgttggctgtacgtttcttatcctaggcagaggatgatgccttggggcgaccttaggtttcagcaaaaatcccgatttgtcagtgaaatagaataa

SEQ ID NO: 73682 - DNA, 2073 bp, Escherichia coli UMEA 3117-1; identical to SEQ ID NO: 72136

SEQ ID NO: 73683 - DNA, 1734 bp, Escherichia coli UMEA 3117-1; identical to SEQ ID NO: 72137

SEQ ID NO: 73684 - DNA, 2313 bp, Escherichia coli UMEA 3155-1
atgtcagcagcagacgccaccacatcattaactgggcagatatcccttcggtttgttgagctttgccagttccgccgacttggtaaggtccagcttgaagttgatccaaagactactattctcgtcggtgcgaataatagcggcaaaacatcaattctggcagcgctgcgccatttcctcgcagatggctcgccatttggtgctttcgacatcagtgtttctcaatggccaaaattgcgggaacttggaagagcttgggacgcattagaagaagatccatctacgtctggcgcatccgaagatgaatgggtagagcaacttggaaccttactttcggcgatgccaacgctagatctatggttcgatgctaaggccggtatgttccactatgtctctccgttcttgtcaaaattcagttggaaggggggtggggtaggtgtccgattgcgtctggaacctgctacgaacattgaggatctaaagcagttggcttggaagtatcacctgacgagaatacctgtgaaggatatgggaaaggattcgcttgcgtggccgattgatcttcttgatttttggctgcgagaaccttctctactcggccaggttcgggcctataagttggatgcagataacaaccctttggacggaataaagacctatgttagccagatattggatgctaactctagtccaattgatcgtaaacatttgcagaaaatcataaaggtagactttgtggctgcacagcgtggccttggtagtgaggaagcagattcccggtctgcttctggcccccatcgcataggtttattctctaatcagcttctcaaatttgctcgacagcatctaaatgtggctgcaacaggtcatgggcatcgagctgacctcataaaagctgttgctgatgcccagcaggaactagataaaaagattcatgaggctattggaccatccgtagaagaggttaaagagctcgggtaccccggcttgcacgacccccaagagattcgtttccgcacgcgcatacagacagccgaattactcgaccatgggacagctgttcagtacagcatgcagaaggattcattagaggagcttctcccggaatattccattggactcggttatcagaatttacagtcacttagttaccaactagtttccttcaaagctgctcgcctaaatcctgaaaagggcgctccagtacctgttcacctggttatgattgaggagcccgaggctcatttgcacgtacaggtacaacgtattttcccaggtaaggcacataagctaatcagccctaacggtagcgctgagtcaggccttaaaagccaattgattatcagtactcattctagccatctagcacatgctgagaattttgaccggctaagatatgttcgccgcgttgccaagagtaaagaacaaaacatgcctaccaccgaggtggtcaatcttgggcaagtttttggtgatgataaaacgacccgtcaattcgctgagcgttattttcgcgttcaacacacagaccttttatttgccaatgctgcaatctttgtcgagggggttgctgagcggatgctgttacctcttttcattgaaagagattttgcaatactcaacagccgctatctgtccttccttgatattggtggtagccatgctcatcggctaaagtctctcgttgaaagactccgtattccgacagtaattattactgatatcgatcctgttgaagaaaaagttggtaaccctaaaaaaaatgatgagcctactacaaccttggttgctgtagctaatacaggacagcctgggctgcaatgcggaaacccgactcttcgtggatggcatcctaaattacaacagcttgaagatttcaaggacccgaaagacgagcaccttgtctggaacgaaattgccgaatgtttcgtgcgtttcgcatggcaattgcccgtagccgaagctgatggtcagtggccgagtacctttgaagactctcttattcttagaaatatcccttggtttaagcaactgattgatgaaaaagttgatggtgatggaaagaaaatcaaaccgccgaagggggcgctgggctcagtcgctagaaaggttgccgagaatgataatattccagatctgctctcagctttgcataagctaatgcatgggtcttttaataaaggagattttgccgcaagcatctttgaaatggttgctgcggatgagccgatagtctgtcctaaatatatcgaggatgcattggaatggctccagacacagctggagccaagcagggaggtgatgcatgactaa

SEQ ID NO: 73685 - DNA, 1950 bp, Escherichia coli UMEA 3155-1
atgactaactcaccaatccttgacggcaatgatcgcgatgcaggggtagtagaagagatttgcggctaccttacagacacaccacctcgtaactacttcctttttgcaggggctggttctggtaaaacacgaacattggtggaagttttacgtcgccttactggtgtgaccgagcatgagaaggggggacaattagcacggtccctgaagatgtatgggcgttcgattagagttgtgacctacaccaagaatgctgtctctgtaatcaacagacgtcttggggacaataatttagtcagtgtgtctaccatccattcgttttgctgggagttaattaatgggttcaacgatgacattcgggagtcccttatagcagtaaaagaagctcaactcgctaaagagactgcagaggcacaagcgaaaccgaggggtattactgcagcaaaacagcgtgaccttgacgaaatcacgaatgaaatcgaggttcttcggacaactgaagtattcaaataccatcccgatcgcaatacatatggacctggtgcattaccacacaattacgtactcgatgcgacagcttggttgcttcaaaataagccaacactccaatccattctcaaagatcgacatccaatcatactgattgatgagtcgcaggacacgatgaaaggtgtactggactccttgatggtgcttgccaaaaaaagtgacagagatttgactcttggtctgctgggagatcatcgacaacgaatttatatggatggtcatgccgatcttccaagcattgttccggaaagctgggcaacgcctgagttacaaatgaatcatcgcagtcaacgacggatagtcacacttattaataaaatctgggaaactgaatttgaaggcaggacacaaccaacaaagggttcagcacaacatccccgaacggaaaaagctggtggaacggttcggctcttcttgggggatacatcacgaagtccagaagataaagtgcttagtgaacgctggtgcgctgagcgaatgtttgaaattagtggtttagcagattggaatcaagggcaatatcagttgcttgcgcttgagcataagcttgtcgccactcgtggctcgtttcttgatgtctatgaggcaatggttctgttagatcccaacgctgcagcaccatctggcagtagggacaataaggggccttcaacagtacaaattttgcttaatgagctggcgcatttagaagcctgcgtcagtgatgaaggaatcgttaatgagtttaaggccaccgaggtttttcgacgttatggcggtttagacaatatgcctgaggactcagaagcaagagttgaacgtactgatgaaatgctcgaggcgatagcgatatttgcaatggcttgtgccaactctgagtcaacgatcgctgaggtgttagcgccagtcttgagtgcaaacttattcgaggttgatcatcgactcctagaggcttatgtcgacaagtcaccagccccgcaagctcctggacgtggtgaggatgagtcaaagcaaaccagaatgcgccgtggatggtgtgcactgtttgcttctccatggaaacaacttaagtgctatcggaattaccttgctgggatttcagagctcgcaacacatcaggtagttaaaggctctgagttcaatcacgtcatggttgtaatggatgatgctcttgctggtgggactctcatcaagtacgacaaaatttttggtggtacgcagttaagtccaacagataaaaagaatgcagaggctggtaaggagacaacaattgaccggactttacgtttgctgtacgtgacttgtagcagggcgcaagaatcgctcgccttagtgctttggtcgtccgatccaagtgcagcaatggctcgaatcgagaagagcatgtggtttaccaaagatgaaatacaggtcattccatag

SEQ ID NO: 73686 - DNA, 1785 bp, Escherichia coli UMEA 3355-1
atgtatttatcaaaactcggaatccgcaactttagaaattttgaggcggctgatattcccctagcaggtaatgttgtgttattgggggaaaatcgtgtcggtaaaagtaatctgcttttcgcaattcgactggttattgatcctactctgcctgattcagccaggcagcttaagctgtcagatttctgggatggctgcagccttgaattaaaccctcaaattgaggtgcaccttgaattcgccgattttgacagtgacccttccctctcagctctgttgaccgattttcgcatagcagaggaccctaccgtagcaaggttgagctacatatttcgtaaaaaggaagaagtaggtggggctccacgttcgggtgatgactgtgaatttattgtttttggcggaggtcaggaatcgcgaaccattcctggacgcgtcaggcggcggatctccattgatatgctggacgcgttacgcgatgcagaagcacaacttgcttcctggcgaagctctccgctacgccccttattggaagatgccttctcttcactaagccgagccgatttggatcgcgtagcaactgagcttcagaccgcaacggaaaccatggagaagttcccatcaattaaggagctcgaagattctctgcgtggtggcattcttgacctagctggaactgctcacgatttagatgcccgcctccgttttgcacctgctgacccgctcagattgatgcgttctatctctatgttcattgatgatggaaagagaggcattattgaagcgagcctaggttctgcgaacgtggctctgatatcactcaagctagcagagtttgcatggcgacgtgaaaagaatgaacgtaatttctccctgctttgtattgaagaacccgaagcacaccttcacccacagcttcagcgcgctgtttttgacaaactcttcaataatgtcgataaagatcagtcattgattgtaacgagccattctcccacgctggcaaccattgctcctcttcgttctatcgttcgcatttgcagggatcctgaagggcgatcacgagctttttccctagctaaactgccagtaagcagtgaagaactcgacgacattgaacggtatctaacagcaaccagatcggagctgctttttgctaacggtgtaatatttgttgaaggcgatgcagaggaggttttacttccaggtttcgcgcaggctatggggatcaatctcgaccagcttgggattacggtatgtaacgtagcgggagttaattttgaaccatacgtgaagctggcagccagcctcggactacccttttccgtcgtaaccgactgggacccactggatggtacgaaacaaccgatgggtaaaacacgttcaattggtatctggcaggcatttagcgatgtatcgggaaaactaaaaaaactaactcctgggaatattaattggctcaataatcgatcttatgaagagtgtaagactgcatttgaaaagattggtatttttttaaacgatcagacgtttgaggtcgccgttgccaatacgactggcctcaaagaagcgctgctggatatcctcgatgagcagggatttggtgtgttacgttcatcaaggattgcttcatggcgtgccggtatggttccagacccgacgcaacttctcgcgatgatatctgacataggtaaaggacggttggctgccaagctgaagcaaaaagcacctgggcttgcgccgccggagtatattgcttcagctattcaatatgtggtgtcgaatgtctga

SEQ ID NO: 73687 - DNA, 1782 bp, Escherichia coli UMEA 3355-1
atgtctgaccggcgtgcactttcagaggctctgaatgagctattgccgaacagagagcaatacgctgcggccacataccccggccactgcgtagttattgctgggccaggcagcgggaaaaccaaaacacttacgaccgcaatggcacgagccctgattgaagaggtcgctgacccccgaggcgtagcctgtattacttacaacaatgaatgcgcttctgaacttgaaggacggctagcatgctttaacgtcattggcgatgatcggaactttattggtaccgtgcatagctttgcattaaatcaggttttaatcccctactcacgatgtatacctggtttgctgccggatggttttcgtgtggcgaccagagatgagagtcgcgcggctgttgaagtggcttatcaggctagattcggagctgtcggagatcctcatgctcggtggaaatttgcagaagagaaacgacgccgggatgtgaaccgactcctaccggcttggcggaataacaacccggagctggcagattttattgatggttatgaggcagaacttcggcgcttaggactgattgactatgatgatatgccactcatcgcttttcgtattattagcgagcatgaatgggtacgtaatgctattcggtcgcgctatcctgttttatttgtcgatgaataccaagatctggggcacgctcttcatgagctggttctgctgctgtgctttaatggtggaatacgattatttgcggtcggtgatgcagatcagtccatttacggatttaatggtgcaaatccagggctactggatagtcttgtttcacgggcagatgtaagaccgttccgtcttcgcttcaactatcgatctggcgcgaaaattatcagggcatcactaggggcgctgggagaagaccgcgattatgttggccccgatggtaatccagagggagagttaggatttcatgggattaatggcgattatgacgcacaggcgcattttatcgctcatgatctaattccctcgttgtttgaaagagggtttcagcctgaacgtatcggggttctttaccgggcagcctggcttggcgataaagttgcggatgagttcaaggccaaaaatattgccataatacgtgctgacagtaatgctctcattaagcgcaattctcgtcttgcccgtttcatcgaagcctgcagtcagtgggtaactgggggatggaaagaagcctctccgccatttaacctcttactgggtcaggcgctctttcttgtttatggccgccgcgcaagccgtgctgaagaacaattactgaccttacagctcatcacttttttacgaaacggaattgataaagcggaaagtgctcacgaatggctgagacgtttaaatgatgagattatcaccgactggatggctatctcacagaatactcagcaggaatgggatgtcatctctgagttactgaaacgaaccgatccccttaggggactggatgtggctctggatatattcgctggtaaagtagaaggaactggacgcatcacccttagcactcttcatagtgcaaaaggccgagaatttgatgtagccataatgtttggggtaaataaatatgacttcccgagtaagcgagatctagcttcagataatgcccttcgcgaggcccgtcgcctcttttatgtaggcgtcacccgtcctcgaaaagaactgcacatggtttatgaaaagggtaaacattcaccttggattgcggaactgtatcatcgcagccagcagatatag

SEQ ID NO: 73688 - DNA, 1785 bp, Escherichia coli UMEA 3682-1
atgcggatttcccgaatccggttaattaatttcgccaacttctccgacgttgatgttgaaacgggtgagagtattgttattgttggtgaaaacaaggttggcaagagcaattttattcgcggcctgcaactgattcttgacccagcgttgtctgagcgtgaccgtcaactgggttttgaacatttttgggatggattgggcgaagacaaattgggggagaccattgaaatttcagtagatttcactgatttcactgacgatccccgattgatggctcatcttaatgactgtgtccttaatccggggcctccgatggtggcccgccttacctatcgctttcagcccaaaaccgagttaaatcgagctccagaatcgttaaaagattatgagtatgtgatcttcggtggtgctgatcctgacatgcatattggtggtgcgtttcgtcgtatgttgcccatcgatgttcaaggcgcgttgcgtgatgctgagaaggatctttcaagttggcgcaattcacccttgaggccgcttattgaagaactttccgcatctctggacgaggaggatcgtgaggagattcaaaccctggtcgatgaggctcagcgggaactggctgggcatgatgaggtggtggcgacagccgaacgaattagcgaacggttgattgctatagcaggtgagcaacatgccgttccggtatcgctcggacttgcaccgactcgcgttgatgcgctgctacgtagcctgcgtttgctgctcgacagtggcattcggggcattggcgatgccagcttggggacagctaatctgatttttctggctctgaaaagcctcgaacttgatcgtcttgttgatgacggagagcgagaccatacgtttttcgtcgtcgaggagcctgaggcacatttgcatccgcacgtacagcgcctagtctaccgttatttcctgggtactgacggggagaatggtgatgaaagggcaccgctgacaacgatcctgaccacccattccccacatattgccagcgtcacgcctgtcagatctatcgttctgctgcgtcatgacgcagaggacgagaagactattgctgtttcaacggcgaacgcaccgtttacgcagcgggacgaagatgatctgcagcgctatatcgacgtcacccgcggcgaaatattcttttcacgtggggtgatcctagtggaaggggatgctgaacgctttcttgtccctgcattcgccgatgctcttgatattcccctcgatatgcttgggatcacggtgtgctcgatcggtggaacaaatttcactccgtatgtgaagctcctggggccacgggggcttaatattccgcatgtgattttgacagaccgcgatcctatggcggttggagagccgctggttcgtaggagacttatcaatattttagacgtgcttgagggagatgttgaccatgatgatatggataccgatgaagtgattgcacgtgccggggtgtatggatgctttgtcaatgagatcaccttggagcctgagctgtttaccggtggactggccgaagccatgcagtcggtcattgagcgggaactatctctggcgcaagttaccttagatcggatacaggcatgggtggatgacacggaccagcttgatatagcccggttgttgaaactaattgagcgaattggcaaagggcggttcgcccaggcgctggcaacttcggtgtcggaggatgtttgtccggattacattcgcgaagcactggagcatatccgcgatgccgttgcgtag

SEQ ID NO: 73689 - DNA, 1818 bp, Escherichia coli UMEA 3682-1
atgccgttgcgtagtgtcagtgcagcctatttggctcaggctgccgagctggccgggaatccgggccagttagccgcgtatgaatcccgtgggcattgcgtggtactcgccgggccaggtagtggtaagaccaagacgctcgtgctgaagctggcccgaatcctggccgaggatgttcaggctccacgtggcgcggcatgtatcacatatagccaagaatgtgctcgcgagctgacccgtcgtctcgaagcgctggggctcagagaagcaccgaatctctttatcggaaccgtccatgggttctgtttgcgccatctgttgatgccctatggacgactggccgatttgccaatcccatttccgctttcagtagcttctcagcgtgctagcgagcggttacttcgacaatctggtgaccgtctctttggcccaaaccatccctataaggctattgatctcggacgacatcgccgttcggtgctgaaccgcaacagtgttgcctggcgtgcagaggaggaactcgctgcctgggccgaggcctacgaagcggcattgcggcaggaagggctaatcgactacgacgatatggtggtattcggccagcgtctgatcgtcgagcatgactgggttctacccttggtacaggcgaaatttccgatccttgcggttgatgaatatcaggatttgggcgttgcgctccaccgtatagtcaaacgcctggctttcgagggtggcgtacgcttatttgctgtgggtgatgcagaccaatcgatctacggtttcactggtgccgatggtgcgttactcatggaactggcaagcaggagagacgttgaaacagtcaggcttcagttgaactatagatcaggaacgggcatcgtcaatgcatctgagatggtattgggtgaggttcgtggttatcgcgcaagcgacccgaaccgccagacaaccattgcgttccagctgtgtccggatggtctggaggatcaggctgtccatgctgtcgcgcagattattccaactgcgttagctgctaagccgggtcgaacgctgggtgacatcgccattctgtacaaggactaccgtgccggtgatgtggtggccgatgcggtgaccgctggcggttttgattacattcgtgtggacaccgcagcaccttatcgcaaggttgccttgacgagctgggtggaggattgcgcggcatggtgtgctggtggttggcgtattgggcgccctcaactgcgtggattgatagaccgttatctggcatttcatcgggcgagactggatgatgcatgcgcccggcgcaagggacaggagttaactaggctgctttgggcacttcgcaccgaccagcaacctgcgtgcgattttgtcgtgtcgttgcgcaacggactcgttgattccctgctggctactgaaccggcactttctgatcaggctgagcaactggaacacatgactgcagcacttgccgaaggcggtgcgttggcgctgctggacataacgagcctaggtggtcgtgacggctcacctgaacacctcaatttgctgacgcttcactcagccaaaggttgcgaatatgacgtggtcatcatggtcggtttggatctggggaatttgccgtggcgtaatgaggcgccagagaagctgcgcgaaagccgtcgtcttttctatgtggggctgacccgcgcacgggatgaggtgcatatgctgtattccggttttgttgatggtcgctacggccctatgcgtctagggcgttccccatttctggatgaactggaggcgcgaatgcgaggggccggtttatggtag

SEQ ID NO: 73690 - DNA, 1698 bp, Vibrio coralliilyticus OCN008
atgtacatcagaaaggtaacgatcaacaactatcgaagcttccgctttttcgaagcacagcttcaacagctaacagttgtcattggtgaaaacgatactgggaagacgaactttttcaccgcactttcgttaccgttgagcggcaaccaaatagacttcaaccagaagcgtttgagtgtgtctgatatcaacaaagatgccgttattgattttctaaagtctgttgtcgatgatgacactgaagagaatcagcttacaaatatccctaaagtatccgtaaccgtagagttcgcagatccgaaaaatgcttatgaaacagctctgttagctaagtggattgttgctgatggagacgaagaaacatacaaaatcagatacgactttaagcctaaagacgacaaagacttgcttgaggttgtaaagaaatcgctcgctggtaagactttagatgatattaattggtttactctacccgttgagctatacgactaccaagtcgtatctgtgaacaacgaaaagcctatcgcatacagtgacttaaaacacgtcagtatccatagtatcaatgcagagcgagatgacttctccgaaagcagttcaatgaagtccaatagcattttcaccaagctgcttatgaacactctcaacgatgacgacaaaggtcagatcaatacagcttactctgagttctttagtgctattgaaaagactgaaacattcgacaaagtcattggaactaatgacgattttgagaattacgacagtattatcaaacagcttgagtgcactcctaacctgcctaacttgaagaacatcttatcgaacatcactttgaaatacggtaatgaatctctgtaccaaaagggcttaggacaaagaaatcttatctacatactcatcctgtttgcttactacaagtcatgtggtgatacattcaacctgtgctgtatagaagaaccagaagcacacttgagcgttaacaaccttcgtttagtaagagacttcattgagaaaagctcaagcaacagcggctcgcttgtacaaactatcatttcgacccataacccatcgatcattaacaagttgaagatctctaatgtgttggcgtttactggcgagaaagcaattagtctgtctgatactccacctaaactagttgactatctaagaaagagacctaacttcgacatcctaaagctgttgtttgcgaacaaagtcattctcgtcgagggtccaactgaagaaatgctgatcagcacttatttgtctaaacaaccagacctcagcgatattgatattattccaattggtcaacgtggttacgccactttcttagatatatggctagctttgaacaaagataaccagaacaagaaaattggtgttgtccgtgattatgacaattcagatgccgcaaaaaccaaacatgatgcttatgacacagcgcatgcgaatgtcactgtaagaacaacaacaaactacacacttgaaattgatttagtagaagcagaagacaacctagctctgctgaatggtttattcgaaatggaaggcgacctcgacgcagtatcaaagcacatgattaatggtaagacagcaagaatgcttgatgtatgtgatgcaatggttgatgaagagaacccactggatatccaattaccggctcacatcgctgaggtcattggtgcggtatcatga

SEQ ID NO: 73691 - DNA, 1377 bp, Vibrio coralliilyticus OCN008
atgatagaagtacaaattgctggtgcaggtgctgggaaaacttatggcttagcaaagactttgatagatcacatcaaagcttgtactagtcacaaaacgacatttgcactgacatacacaaactcagcaacagcgaagatagagcaagagataatcaaacagcatggctttattccgtcgaatctatgtatacagacagtacatagcttcttgttaaacgagattatctacccgttctcgtcattcactctcggtgatgtgtataacgacgcatcaataatgatgttaccgagtaatgttagattcaaaaactggcacttaaagcgattaaaagataagaacatcattcatgcagagagcgtatacaacatcgctaaacaaattgttgatgaaaccaccagcaagcacaacaacagagcgaagaaagcaaaagtccgcagactattagctattctaggaagctgctttgacaagatattcatcgacgaagtccaagacttagacaaagatgcactccgttttttcgaagttctagggtgcaacgatattgatgtgtatatgatcggagatccaaaacaagcaatcaagtttccccaagatcttgatgctttcgttcgaaaagtagctccaaaagaatacgcgaccatactaccgatcaacaatcaaaccagacgagtacccacagagatactagcggtctcaaacagcttctgttatgaagatcagcaacaagagtcactatcagaaatcgttggtgaactcatgtacattgagtcgacggacggacgatatgacgagctactaacgaactacttagatacaaaacaacttgtttgtatcgacaaaaagaatggtcgctatacaacttcgtctaaacacaaacacgcattcccacgagagatcgaggaaatgattcgtgattctaaccacaagaaagacaaagctttgtttgttatagcagctttttctgactttatggacgatgtcgccgaagtcggtgcaagaattgctatcaataggctaaaagccagtcatggcttgacacttagtaaacaacacttcgcccaattacttgagctgtgcaattcttgtacgggaaatgacgttcaattcaaagtccaaagtatcgaatctatcaagggattggatgctgatgtgtgtgtaatcatacttagctccaatacccttaaatacttgacccaaaatgctattagcgaagcaaaccaatttaataaagaatggaaaaaggtctatgtcgctcttactcgtgccaagaagaggttggtattggctttagatcacgagttactcgctaaagaagatatggcggctgttagggattccattggtgaactgggattcgttactcataactag

SEQ ID NO: 73692 - DNA, 624 bp, Listonella anguillarum M3; identical to SEQ ID NO: 72410

SEQ ID NO: 73693 - DNA, 1647 bp, Listonella anguillarum M3; identical to SEQ ID NO: 72411

SEQ ID NO: 73694 - DNA, 2067 bp, Streptococcus intermedius B196
atgattttaaaaaagatgaaagttaaaaattttaggttattaaaaaattttgaattagattttaaagatgaattgtctttagttataggtaaaaataattgtggaaaaacatcagcccttattattttagataagatgttaaattcatctaaagtgatgtgggaagatataaatttggaatgtcagaaagaactttatgaaaaaataattgattttgatatatctgagcaagagaaagttacatcattagaaactgttaatctgcaattatttattgaatatgatgataatgattcatatgcaaatattcaaaaattcatgatggatttaaacccagaaaataacattatagtattagaatttatttcgttaatagctgcaaaaaaaatcatagaattaaaaaacattattagtagaaaaaatattgaagattttaaatcattttccaaatttatgagtaagaattttgcaaacctctttgaaacgaaaaaatattcaagagggtttgatgttgaagcaaacaaaataacgcaagatagatcagaagaaattgataataaagatattcagaaagtcattaaagtggtaggaataagagctgatcgagcggtttctaatgatgatcgtaatcatgtcttatctgggttaactggtaaatatttcagttcttataaagctgcaaaagatgaaagtgagtcggtatttacaagacttgaagaaaaattggaggaagccgataaagaattatataagatttacaatggagaaaaaagtgaaggtgaagaacccattgatggtatttttagtgatgttatagatgttattaaaacttatggtggtgcagaaaatggaattgatatagcaatagagtcatctatttcagagaaaaatttattgtcagataatacaaacttaagttatagacaagggggagattgttcgcttccagaaacatataatgggttagggtatttgaatttaattggtattttatttgagattgaaaccaggatacaggaattatttgaacaaccagcagatataaatctcttatatattgaagaacctgaagcacatacacaccctcagttacagtatatatttataagaaatattaaatctcatatcaaagcacatagaaataagttgttgaaagaaaagaataagcagttacagattttaataacttcgcattcatcacatatagtttctgaatgtaactttgatgacattatatatttgaagaaaaacgggaatacggttatagctaagagctttaattctttaaaagaagagtatggtggagatgaacagaaaggatttaagtttgtaaaacaatatctgacaatgaatagaagtgaacttttctttgctgataaagctatttgtatagaaggagataccgaacgaattttaatgccaatgatgatgcataagattgatagtaaagaaaagccaaaagcagatcttataccactattatcacagaatatttctataatagaagttggagcgcattcacatatctttattccattatttgagtttttaggtattaaggttttaataatcacagatatagatgccgctactaaaaataacaatgggagatatgtaaaatcacaccctcaggaagcaaagtatacaagcaacgcttccataaaagattttttcaaagatacttgtcttgatgagtcaaataatgaatttgaggaacttttaaaaaaaacacctgaggataaaattaaaaataatataagaatagcttatcaaataccggaaactgatggtgagtaccaagcaagtagttttgaagatgcatttatagcgttaaataaagactttatattaaagaataaagaagggctttgtgaatatggagctttaaaagatttttcgaatgatgaaatagaaaatggtgattattataattttgctttgaataatgtgaaaaagaaatcggcatttgcatcaagcttattgtattttgatgatgagaatggcgaagaagatgaaaaatgggcagttccacattatattgaggagggcttattatggatacgctaa

SEQ ID NO: 73695 - DNA, 1908 bp, Streptococcus intermedius B196
atggatacgctaacattggaaaaagaagtattagaagctcttcaatgtataaaaaatggtgaaaatttcattttagaaggtggagctgggagtggaaaaacatactccttaatttccttgataaatgcacttacagaggaattaccagatattaagatagtatgcattacatatacaaataatgcggttgcagaaattttatcaagaatagaaaatgagaatatttgggtttcaacaatccatgagtttatatgggagcttattagaaaatatcagaatgaaataaaggatattttagtagaacttattaatgatgaaggtgaaaagaactttaaaaagccaaaggattttgatgatgatttaatttctaaagattacttcaaaaatctttatgtggattatgacgagtattattccgtaacgccaaatgttgaaaataaagttaaaatcagccatgatcacattttgattgttgcagaaaaaatgtttgagaaatacaaaaaaatagcggacattttaaaggatattgcagattgcatttttgttgatgaatatcaagatacgagtcctttagttgctgatattttattaaaacatcttgagcaaagtggtaagaaaaatgtaattggtttttttggggattcaatgcagtctatatatgacgacggagttggtaatttaaatccatataatttaactaaaatagtaaagacgcaaaaccgaagaaatccaagagtcgtaatcgaagtagctaataaatttagagatgatgatattgagcaagttccatcagaagatataaatgcacctaatatggagaatggcactattatagaaggtagtattaaatttttatatggaaatgaagcagatgattttataagtgtaaaggagaagaatatttttgaatcatgggatttttctgatggaaaacaaacaaaagagttaaggctaacacataaatataatgctgaaatggtgggatttaaagacttatatgatctatataatgctgatttaataattacgcttataagcaagataaaggaaaaaattgataaggaaaatttagacagtgataagactttgggagaattggcattagaggtaaaacctacatataagaaagtagagttgctggatcaaattaacggaaacgaaatttatcagtcaatatacagtgttttagaaggtatgtcatgggaagaagcttgcgaaaaatgtagagttactaaggaatcacttatgtcatataaattaaatgggatgagtggtagatatgaagctaattcttatagagataggattttacgcagattagatatattagaggagattattgaattatatgaggctaataaatttaatgattttctacgaataacaaaattttctattcataataggaatgataagatttgccttaagcaagcaattgattatcttgtaagtgaagataatcaaacgatagaagatgttttaaaatttgcagaagtaaaagggttactaaaagaagatgaattattcaatgattatattttaaataaagggttttatttatgggagagaataaaaaagataacatttaatcaatatagaaaaagtattttatatttaaaagaattttcaccaatttgtactcaacatagtgttaagggtagtgaatatgacaatgtacttcttgtattagagtctgattggaataaatacgattttaatacattatttggaaagggatctccaaattctaacgttcagctaagaacgaaaaaattattttatgtatgtataacgagagcaaaaaagaatttaatagtatatatgcctactaatgattctgacatattggataaagcaaaagagttttttggagaagtaaatgttatggatatttcttcgattgaataa

SEQ ID NO: 73696 - DNA, 2313 bp, Escherichia coli HVH 190 (4-3255514)
atgtcagcagcagacgccaccacatcattaactgggcagatatcccttcggtttgttgagctttgccagttccgccgacttggtaaggtccagcttgaagttgatccaaagactactattctcgtcggtgcgaataatagcggcaaaacatcaattctggcagcgctgcgccatttcctcgcagatggctcgccatttggtgctttcgacatcagtgtttctcaatggccaaaattgcgggaacttggaagagcttgggacgcattagaagaagatccatctacgtctggcgcatccgaagatgaatgggtagagcaacttggaaccttactttcggcgatgccaacgctagatctatggttcgatgctaaggccggtatgttccactatgtctctccgttcttgtcaaaattcagttggaaggggggtggggtaggtgtccgattgcgtctggaacctgctacgaacattgaggatctaaagcagttggcttggaagtatcacctgacgagaatacctgtgaaggatatgggaaaggattcgcttgcgtggccgattgatcttcttgatttttggctgcgagaaccttctctactcggccaggttcgggcctataagttggatgcagataacaaccctttggacggaataaagacctatgttagccagatattggatgctaactctagtccaattgatcgtaaacatttgcagaaaatcataaaggtagactttgtggctgcacagcgtggccttggtagtgaggaagcagattcccggtctgcttctggcccccatcgcataggtttattctctaatcagcttctcaaatttgctcgacagcatctaaatgtggctgcaacaggtcatgggcatcgagctgacctcataaaagctgttgctgatgcccagcaggaactagataaaaagattcatgaggctattggaccatccgtagaagaggttaaagagctcgggtaccccggcttgcacgacccccaagagattcgtttccgcacgcgcatacagacagccgaattactcgaccatgggacagctgttcagtacagcatgcagaaggattcattagaggagcttctcccggaatattccattggactcggttatcagaatttacagtcacttagttaccaactagtttccttcaaagctgctcgcctaaatcctgaaaagggcgctccagtacctgttcacctggttatgatcgaggagcccgaggctcatttgcacgtacaggtacaacgtattttcccaggtaaggcacataagctaatcagccctaacggtagcgctgagtcaggccttaaaagccaattgattatcagtactcattctagccatctagcacatgctgagaattttgaccggctaagatatgttcgccgcgttgccaagagtaaagaacaaaacatgcctaccaccgaggtggtcaatcttgggcaagtttttggtgatgataaaacgacccgtcaattcgctgagcgttattttcgcgttcaacacacagaccttttatttgccaatgctgcaatctttgtcgagggggttgctgagcggatgctgttacctcttttcattgaaagagattttgcaatactcaacagccgctatctgtccttccttgatattggtggtagccatgctcatcggctaaagtctctcgttgaaagactccgtattccgacagtaattattactgatatcgatcctgttgaagaaaaagttggtaaccctaaaaaaaatgatgagcctactacaaccttggttgctgtagctaatacaggacagcctgggctgcaatgcggaaacccgactcttcgtggatggcatcctaaattacaacagcttgaagatttcaaggacccgaaagacgagcaccttgtctggaacgaaattgccgaatgtttcgtgcgtttcgcatggcaattgcccgtagccgaagctgatggtcagtggccgagtacctttgaagactctcttattcttagaaatatcccttggtttaagcaactgattgatgaaaaagttgatggtgatggaaagaaaatcaaaccgccgaagggggcgctgggctcagtcgctagaaaggttgccgagaatgataatattccagatctgctctcagctttgcataagctaatgcatgggtcttttaataaaggagattttgccgcaagcatctttgaaatggttgctgcggatgagccgatagtctgtcctaaatatatcgaggatgcattggaatggctccagacacagctggagccaagcagggaggtgatgcatgactaa

SEQ ID NO: 73697 - DNA, 1950 bp, Escherichia coli HVH 190 (4-3255514); identical to SEQ ID NO: 73685

SEQ ID NO: 73698 - DNA, 1596 bp, Pantoea dispersa EGD-AAK13
atgcgactggacgagccggatggggttccgcgcgtacgttttcgccttaatgcaactatggggctggatagcgatattgaagacgctctggtatatgtcctagacgttaatgaagatgattcgccccagagtgtcgctcaggtcccacgcgctgaacgtaatcatatccaggtacactacctgccagccagacgcgaccccgctgaccatattgcttatggtgcaaacgcattactcgggcggttacttcgggctgtgcgttgggacgctgagcgcgaaacgattaaagggctgaccgatcaaataagtgacagccttgcagcaaacccttcagtgaaggctttcagtgagagtttaaaggcaacatgggcaacactgcataaagggaaattttttaccgatcctagaattacctttgtcgcatcagaaattgaatcgctgttaaggcatctttcggtttcatttacgcccggtcacgacggctcacttgtggatttctctaggctaagcgatggccaaaagtccatgctttacctttcacttgtcttatcgtcacaagctattggcagggctgttcttgcggaagaagatacatcgtttgattccgataaattacgtcctccggtcttcacactggtagcactagaggaaccagaaaacagcctttcaccacattatctaggacgcattgtaagctccctgaacgtcatgacaaaaaacatggatgcacaagctcttattgcgacacatgcacccacaatgctgcgtcgggtagcacctgaacttatacgttatcttcgtctggataagtcacgagagacttgtgtaacttgtatcaaattgcctgatgaaactgatgatgcacataaatttgtgcgggaagccgtgcaggcatttccggagatctatttttcacggctggtcgtgcttggtgaaggtgacagcgaagaaattgtgttgccacgcttgcttcaggccaagggggcacccgttgatgagtccgccatcacaatagcgcctttgggtgggcgtcatgtaaaccatttctggcgtttgcttgcagcattaaagatcccctattttactctgcttgatctcgatgttgcacgatatgcggcagggtgggggcgatttaagtacgtaaacgaacagtttgcgatacatcaaccgcataataaacttcctgaagagtacaaaattccaaaatggaatgctgaaaagtataaagttcgcgacttcaaaaattatctcaacatacttgaagagcgcggcgtgtttttctcctatccgatggatttagatttctcaatgttacttgcgtatccggaagcctatgacgttgatgaagaggaacccgacgatgcaaccattaaagctgttcttggaaaaagtcattacgatccatctcagtacaacgaagatgaattagcgctttttaacacctaccatcagcgcttcaaacttggcagtaaacccgcagcacacatcgaggcgttaactaatttagacgatgctgatttgcttgcaagaatgccggattcactggacaggctggctgaagcggttattgccaaactcacggaactgccagaatga

SEQ ID NO: 73699 - DNA, 1665 bp, Pantoea dispersa EGD-AAK13
atgattgctgttgaagaatggcagcccgcagatggattgacgctggaacccaatgcgaaacgtgcagcgaaagcgcgtaaacgttgtctggcactaactgccggaccgggcgcgggtaagacggaaatgcttgcacagcgtgctgacttccttttgcgaactggaacgtgtcgataccccaaaaggattctggcgatctcatttaaggttgatgccagcagaaaccttacagagcgcgttgaacgcaggtgtggacggaatcttgcttctcgctttgacagttttaccttccacgcatttgctaagcgcataatagatcgattcagaacggtactcacgggagaatatgccttagatgctggttacactattgtggacaagaaaagcgggacgtctcgtcacgaaatagcattcggcgaactggttccctatgcaattaagatattgcaaacttcaaaaatagcccgaaatgcaatccgtcaaacttatagtgacattttccttgatgaatttcaggactgcacaaatttacaatataacttagtaaagttcgcttttcagggaaccaaaattcgactgactgcagtcggagacacaaaacaaaaaattatggcctgggcaggtgctctggacggtatttttcagtccttcataaaggacttcaatgcggtgccgctcaacatgtatcgcaatttccgctcaaaaccaacattgctgcgtgttcagaacgaaattattcgtaagttagatcctgactccgtaatgcctgatgatcaactggaaggggaggaaggggaggtttttgcctgggaatttaaagatagtcaaactgaagcaatctatctggctgacctaattaatgaatggataaataaagagcagctacctccagctgaaattgcagtcctggtttcaaagcaaccagatttgtatgctgatcacctcttcagagagttagagcagcgcggaattccctaccgcaatgagcagcaaatgcaggacatcactgttgaacccgtggctcgtttaatcgttgattacctgtcctgtctttatggacagcgggaacctaaagcctggattcgcctgatgaaccagctggttccctttgctgatgaagaaattcaggccagcatgcgaaaaggccttgatcaacttataagaaagcatcgtaaggaaatttctggtgcaaaaagaacggacacacccttttctgaatggtggaaatttggccgagctctcttaaagcacttaggtttacagacgcttgttgcactatctcctgattatgagtcacatgaacgtctgaaacaggttattagcgatgccagagcacgtatcaaatacttactggagatcgaatctgacttacccctcgcattaaaacgatttgctgatgatcaggccgtacgcattttgaccattcacaaaagcaaaggattagagtttgattcggttgtcatcatggctgtagaaaatgagactttctttggtaaagaagaagacaatcgctgcgcgttttttgtcggtgtttcgcgagcaaagagacgacttattttaactcatactaacaagcgtgatgaacctgctaatgctatgcactggaaagtttttcggactgctcgattagagtattttgattatgtgcttccgtttgtgaggtaa

SEQ ID NO: 73700 - DNA, 1872 bp, Acinetobacter baumannii EGD-HP18
atgaaaattgataaagtaattctaaaaggttttagaaattataaagatgcgacaataaattttaataataacactttaattattggtgaaaatgatgttggtaaaactaatctcatttatgcattacgcctcatgttagacagaagtctttctgaattggatatagagccatcagagttggattttcatgtacagggtggtgtccagtctgaaaatttagaaatcataattaaattctttgatattaaagaagaagctgcattatccattttgaaagaacacgtaagtgatgatggagaatgtgtttttaaatacatggcttctaaagaaaatctagattataaattatatcttggtcaaaatgagacagacttatctgaaattcaaagtcgttattatttaaaatatatcaatttaaagtatatttcttcccaaagagatttaagcaaatttattgctaaagagaaaaaacaattacttaggatctccaaaacaaagattactgaagaacaagaaaagcttgatcgagaaaacgtactagaaatttctaagcaattggttgacctagacgataaagttgcacaattagaatatgtaaaaactgctactcaagaagttaatttagaattaaagaaattagcttatgcccatgatgattatgatgtaaaactaaatgctagtggtatagaagtggatgattttattaataaattacaattaggggcaatgagcggtggctcaaatgttatgttgggtggtgatggacgtaataatcaaattttaattgctttatggaaggcactgagcgaatttgaacacgattcaaatgatgaagtagtgttttatgttgttgaggagccagaggcacatttacacccacatcaacaaagaaaattagctagttatttatcttcagaattacaaagtcaatgtttaataacaacacactctccgcaaatagcctcaagtttttcgccaagttctattattagattatttaagaaagatttctctacaattgcggccagtaatggttgtacaaaagaactagaaaaagcatgggaagaattaggttataggatgagcattatccctgcagaagcatttttttcaagtggtgtttttttagttgagggcccatctgaagaaattctatataaggaactgttgcttaaaaataaagttgatattgattactacaatttatccgtttttgcagttggaggaattcaatttaaagtatttgcagccgttttaagagctctagaaataccattttcattaagaactgataatgatattagtactgtagaaatgaattgcaaagttcatggttttaataaaaatgactctttaaatccttgctatgtatataagaaaattgaaattaattatacagatgaaaaatgtataaaatggcaatatctaggagttaatagatgctatggaatattaaatagagattccgaaaaatggaagcatagtctttaccctttaaatagagttaatattttgggtgataaacggtggaaagcctttgaaaagatgataaatgcacatggcatatttatgtctaatatagatttagagtgtgatttagtaagtgttgcttctgaagaaattaagaaggcattaggtaaaaaaaataataatagtgcagtagattttctcaaaaaaagcaaagccctaaatatgcaaatattaatggctaaattagaaaagaaaggctttgaaaaaatttatgaaagtgattttggcaagccgattaggtacttaataaatttattattaaaacaatctgacactgacactgaatctccagttcttattaatacgaactctgaaactgccaaagaagtggtcttgttatga

SEQ ID NO: 73701 - DNA, 1620 bp, Acinetobacter baumannii EGD-HP18; identical to SEQ ID NO: 73285

SEQ ID NO: 73702 - DNA, 1917 bp, Listeria monocytogenes serotype 4bV str. LS542
atgtatttatcatcgcttagattgaaaaattttaggtcgtttgactctgagagccatgagataaagttcaataagggacttacagttttagttggagagaatgactcgggcaaatctgctattctggatgctatacgtattgtcttaggaacaacagattttagttggtacagagtcaatgattctgactttcataacgaagattgttcacttgaaatagaaattatttgtaagtttagtgacttatctccgttagaaacttctgcgtttttagagtatttgacatacgaagaagggaagaatccctcgctttatttgcattggaaatgtcgatatatgcagtcatttaaaccaccaaggccagtaagttctatggttactggtaaaaatggtgatggaccagccttatcaccagaatctagagagatactaagggtcacctatctacgcgctttgagagatgcttatagtgatatgcagtctggaagaaattcaaggttgtctcaagttgtgcaaaacattccggacatacttaaaggtgagtctgatctaaaagaaggagtaaaacttgaagagttatctttgattggtatattcaatttatctaataatttattagcggactacccagctttaaaaaaaattaaagaacaaatgacagatatattaaagaatcaaatgttgctagatagcgataacttagctactagatttagagttacgggctctgcgactgcagatacaagaaaactaacaagtctattggagaaattagacttgacgattgataaagacacaacttctctcaaaggaattcctggactggggacaagcaatattatgagtatggcatgtgagctattattaaggagaaactcacaagaggcttgtcagctactacttatagaagaaccagaggcacatatacatgctcaaagacaaatgaaattagttaaatctcttcaggctgattctgaagctaattcacagcaaattattttaacaacacactccccccaactagcatcagcagttaagttggaaaatataattttaataaaaaatggaaaagcttatcctctctctaaaagtgaaacaagcttgggaccggatgactatatttttcttgaaagatatttagactctacaaaagcaaatttgttttttgctcgaaacgtgattgttgtcgaaggaccaggtgaggcacttctactacctactctctctcgactgctaaatagagactttgtagattttggtgtatctttagttgatgttcgaagcactggactgagacggtattccaaaatatttcaaaggaaaaacaaagacgatccaaagcactcaggtgattggcttaatgttaatgttgcttgtgtcaccgatagagatattatgccaaattgtgcaccaaggatttgtctaaataatgactatagagatgataatacaaattggcctgaaaaaaatgatagaaaatggagagctgaaagtgattttaatgatactgaaaaagatacgtatttgaatgatatagaatctaaggctagtggtcagaatgttaaaactttcgtgtcgaataaatggaccctagaatatgatttagcatactatggactagaaagtttagatatgaagaaggctttaataaatgctttagtaaaaactacttatgctcaagttaattggaaaagcaaaactactgagatattaatggcactagactcaagagccagtaaagaagaaaaagcttcatatttccatagcttttttacaataagaaaggcttctaaggctgaattttctcaacagctagcttcagaacttgaggcgaatttttttagaaaagaagaagaattaaaagctttattaccgccatatatagtggattctattttatatgtaaccaaatattga

SEQ ID NO: 73703 - DNA, 1908 bp, Listeria monocytogenes serotype 4bV str. LS542
atggatggcattactgagataacaataactgataaagacatagattgggttgaggagatacttgatggtgatatcaagtttgatttacctagaagaaatataattaaaaatctagaatctatagatatccaagcatttccaggaagtggaaaaaccactatccttgttgcgaaactagcaattttagcaaaaaagtggacgtctgctacttcaggaatttgtgttctttcccatacaaatgtagcaagagaggaaattgagaaacgattaggcaacacggaaattggcgcccaacttctaagatatccacactttattggtacggttcattcttttttcaattcttatataggtcttccctggataagatcaacaggcaatcctgttgagattgtagatacagattttgtatgcactaatagatggaagagtctgccagcatcatttcataaatccttattaagtaggagaaagactcatatggacctttgtttcaaaaatgagttaggaaagatagatctggggaatcttagcgagagtacctcaacctacaagatagcaaaaaaaatcattgaaaaatctcaagaaaaaggctatttcactttcggagaaactttgttgtttgctaaagaagccatatcgaacaatcctcaaatagtagattatgttcagaagaggtttccacttctgtttgttgatgaggcgcaagataccaattccttccaatgggatttaattaattctacttttccaaattcaatacagcaaggatttggtgatgaaaatcaagcaatttataattatgtcggcgaaaacgtaacagatagatttccaagagaaaatccattgattctacctgagagtaagaggtttaataaaagtatatctaaaataacaaatcctttagctatatctaatgcagagatgattggggcgagtacgacatttgagtgtaataatactatatttctttttaataccgataaagttggcactgtgttagaggaatactcaaagcttgttttatcaacgttcacagatgaagaattagaaaaataccagtcagaaggctgtcatgcgattggtatggttcataaaaagaaagaggagacgacgcctgagcagtttccaaaaggtgtatttgactattggaacaattataatcacaggtcaagctctataaatacgatgccagagtatttagttgaatattttatattgggtaggaatgaactagatttaactggtgaagcgcatcttcaaatagaatgggttttaaagggattaagaattttaatcaataaatctacagatacaattgttattgaaaatataaattcattgtttaattcatttttgagtaaactagatgatgagaaacaaaatattttcagagaaaaaattttgttgataatgaataaaacttcttttccagaagctgaatgggtagaaattcaaatagtggtttcctcgattttaagcctttttgatgtagagtttggcatgtctgactttctggactggagaaataataccaacattactctttctgaaaatagtgatgaaatgggtcctgaaaatgtgtttagatatatagatgagagtaacagaagtgttgatattactttaggaagtatacactctgtaaaagggcaaactcatttgtcaaccttagtcttagagacgttctcatataatcataatattgcttctatactaccttttatctctggtgtcccttctaaaaagaaacttggtacacgtgataaaaataggctaaagtgtcactatgtagccatgacaagagcgcgaggtttattgtgcttagccattccaaaagataaagttgacaaagacacaattacaaatcttgaattattaggatggaacatacgagttattgaataa

SEQ ID NO: 73704 - DNA, 1878 bp, Actinobaculum sp. oral taxon 183 str. F0552
atgcgtattcaaatattagatattaaaaactttcgtggcattgctagtggacatgtaatatttaaaaaacattcacttcttgttggaggcaacaatattggtaagtcaactgtatgtgaagccctagaactggttctaggaccagagcgtctttatcatcgaccagttattgatgaacatgacttttaccgcggtagatatcaaaaagatgacggctcttttcttaaaatcgttattcgcgtcgttttaacaagtctaaatcttaagcagcagctacgctttcaccaacaccttcgtctctggaatgaggatgagctgacgtttgtggacgaagaagtcgacggtatctcccacgccgatgatccaaacgtcgactgggcgcttccagtcgttttcattggtcgatacgaccctgaggaagacgatttcgtcggcgataccttctttgaccacccgctggatgatccagatagtctgagtgacgaagagaaagcttcattggggcaagggcgttctatattcacccgcgctcacaagcgggactgtggattcatctatctacgcgcactgcgcaccggctcacgggcgttgagcttacaacgtggctcactgctggatacgattcttcggcttggcgaacaaggtggcgcaaacatgtggccagcagcacttcgctcgctcaaagaactcaatccggcaattggagagataaggcagcttaagtcgatccgcgctcagctgcaagagcgtcttggccgtttcatcaatctcgcttctgaaggcgaccagacttccttttacgcctctgacttaactcgtgacaacctccgtgaggttgtcaaactatttatcgcgacttggccgagcaactaccccgtccctttcagtagacaggggaccgggtcagttaacttgctcgtattcgccctgctgacaatgatcgccgatttgaaggagcagaactcagccatatttgtaatggaagagcctgagatcgccttgccaccgcacatccagcgacgggtagtgaagtatgttcttcaggagatggggcaatctatcgtcacatcacactcgccttacatcattgagcaatacgaagccgaaaatgtcgtcgttcttggtcgcgacgataagagctgctttacgggcaagccaatcgaccgtagcgccatcgaacaaaaaaactatcgagctcaacgacggcagtttgcagaggctattctcagccgagcggttttcgttgtcgaaggggcgacagaagtagcggccgtcaacgccacttcaatagcactcgaaagattccatgccggctactcccatatcgacttatctggcgtgtcacttttcaacgctggaggcgaccaggaagcgccaaagtatggaccgatctttaaagcgcttggcaaaccggtcttcggcatgcgagacaagcctaaccgccaagatcagcctggcactagagacaatattgatgcatatgacaagttctgggagtcaccggaatcaggagtcgaacgcatcctagtggaccaggtgcctgaaagcgtcctgcacggtttctttaaaaaagtatcgcctcgtcctgactatccggcgaactgcgggtataacgcgtcgatggagggaaaggagctaaaggctcttgctcaaaaggtgttaaaagcgcgaaaaggcgactcgtacggttacggttatgctgcgatccttattgaacaatgccagagcgaaaacgaattgccttcgtttattcgctacgctttactctatatcgacagatatctaactccttcgacacaaagtaatcccattcgatccgaaggcgagacgacgatgtcatccgagactgcttcagatgggcaacctgacaatgaatga

SEQ ID NO: 73705 - DNA, 1758 bp, Actinobaculum sp. oral taxon 183 str. F0552
atgggcaacctgacaatgaatgacggtgggcctgccggcatgaagttatcagataccgccgagaacgcgctacagagtgaatgtcctgtgttggtgcttggcggccctggttccggcaagacaacactgtcactgctgaaggcaaagtcgtacgtctcggagcttgcgcctgaacaagcgattctgtttctgagcttttctcgggcagccgttcgacaggttgagatcagatgtcgtgacctgctgaatgcagaagagcagcggtcaatcgaggtgcgcacctaccactcatttgcccttgacattctgaaaacacacggcagactgctcactggcactcctccgcggattctgtatccaagcgaggaaacacttcttaaatcatgtcactccggactttgggagaaggaagccaagcgtttggccgcagaggaaggccgctatgttttcggcgagttcgcatcggcggcaaacaagctcctcgttggctcaaaggcggttgcaaagctcatcgcagacaagtatccagttgttatccttgatgagtttcaggacaccaacgactctcagtgggagctggtcaagactttgtctctgctgtcacgcatggtgttccttgccgatcctgatcagcgcatctttgactacgacaaacatgtgagcgctgagcggcttcaccatcttcgcaacgatctcagaccggcggagtttgatttgggaggcaataaccatcgcagcccgaactcggggatcctcgcctacgccaacgcagtcctccacaacaaagcttttcccggtagcatcggcgagatcgagacgattacttactacccgaatagctttgacaagagtgtacattttgccgtagtttcaacgttatcgaaactacgaaaggaaggcctcgagcgaccttctgtggcggttcttgcgcgaaccaatgcaatggtggcgaagacgtccgactgcctctctcaagatcatgagttcagaagccgcccgatgaagccgattgtgcacgacgtcctctgggataccggtctgacgaccgctgccgctctggttgtcgcatctattctggagtggacggcacttcccaaggtgacggctttggcccaaacgttcgagctgattgctgaatacttcgatataaagaacgcgtcaaactctaaaggggttaagtatgcccaggaagcttctaaaaaatattctaacacggcaaaaagcctcaaagctggcgataaactaaggtgtgaggtgacgaaacactttgagaaggtctatgacagtgagtcactatttatcggccgtccggcagacgattggctgaaagctcgcgttttactagatacaacaaccggcaagctgaaccatgtatttggtgatgtgaagtttgttcgattgttcagggcaacggatcagataggcggctgtttgagtgatctgtgggataggcacggcaactacatcaacgcctctcgtctgcttcgtcggccacttagcatgcagtccctccaatcagattatcgcgagcccgtcggctgctccctgatgacggtgcacaaagcgaaagggaaagagttcgacggagtcgtaatcgtcgacggccacccgaaaagcgctgacgcctttttccgcgagaaggcctcaccttcggagcgtgaaagcgcacgtcgattgctacgagtcgccatcacacgcgcacgtcgtcacgtcttcctggtgcgcccgtatggcgctctgccattggccgacgagtaa

SEQ ID NO: 73706 - DNA, 1797 bp, Atopobium sp. oral taxon 810 str. F0209
atgccacacaaaggtcatttgacgtttggagaccaaatgcacatatccgagctagatatacacaactacaggaaccttgatggtatctcaatcaagttcaatgacgagctcacctacatagttggcgagaacaatgtgggtaagtccaacgttcttgacttccttgacaccctgtttaacagaaccaccttcaatgagaatgatttcacccaacaaggtactcccatcactgcatctgtcaagttgtctctgagtgaagaggagattggtttcttcggtatacttggtgatccagtggaccccaacagcatcaagatcaatatgtcgagcgacgcaccagacgatgatatcgtctttacgtttgacaccaatggagatggaatctcccttcgcgatatacgtcgtgccaactacttccatatctccagcgtggatttcgacaataggacacttgcattcgacagcatgcgtggtgtcgggcgcgtcctcagtagaagcgtcgagctctatcgcgagcagagcggaaaggaaatcattgacttgtttgaccagacagaggtcaaggcgctgcttgcgcatctcaatggcaagattgcgaacctcccgcttctctctgcataccgtcttcaggctgcgatagatacagcgaatggagacgccatggcttctgtggtctcccttgctgaccagaataatataggcatcaagtcaactggcaatggtgtgcagtacgttacccttatgattctctcgattctgcagtgtctcatgtctttgagcaaggctcgtcgtgagaatagtacggtcacgctcaaaaaggagagggataagaataaggagccaagatccgccattcgtgccatcatatcaatcgatgagcctgagattcacctccatccatacatgcagcgtaggctcatcaaggcgctttcggtaattgcggcgggagaagatgagggcttcaatgccatcgtcaaggatcttcttgacatcgacgtctttcaagcacagctcatcgtggtgacgcactcgccagaaatcctcgagaagggaagctacaagaacattgttcgccttgggattacgcaaggaaagcttgctgcagtgagcggcaaggatctgactttggaagataaggttttgaagcagctacagtcgcagttctcggtcgtgagagaagccttctttgcccgtgccgttattgtcgtcgaggggcagactgatgaggttgccttaccgatattcgcaaacgcgatgaacaaggacctagacggctatggtgtcctcatcattcgagctgagggcaaaggttcggtgccgggcattcaggagctcctcgccagcttttgcataccgaatatctccatacgcgatagagacaagacgaacaatacgtccacaggaaccagtttctatacagtaaagcacgacttcgaggaggagtggatagagtcaatcttccatgctggcgatcagcatctgttcgttaaacttatagagacggtcgatcctaatggcaggggtgcggaaatcacttcgaaacaaatcgagaaggctgccggaaagcttgaggtttcgataggatcatttccccaaaacggcagacatgactttaaagatacagaattcgatggtagcttcagtcgcacgatgaagacactcatcatgatgtacgcatggctccagtcaagaaaaggcgcactgatgccacagactctggcgcacttaacgccagagtcggaaattcctcaagtctatcgtgatgctatcatcgaagcagtgaggctcgcacaatga

SEQ ID NO: 73707 - DNA, 1806 bp, Atopobium sp. oral taxon 810 str. F0209
atgaacgctaatgtcgaggatcgactctcacggttgaagtctgaaatcaagaaatcccacgagggggacgaatcgcagacggccattgtcttctcagaggcgcctcgggtgttcgtcacagcgccggcaggctatggcaagacgaagacgatgacgagcaagattgtctaccagcttgtttctggcatgattccgaacccgaaggcgattctagcacttaccttcagcgttgctgctgcgcgtaaaatgcgaaacgaagttgattcagcgatcaagtcatataagctcagcactagaagtgtgatatccaatcgtatcttcatcacaaactaccatggtttggcacgcaagcttctcagcctctacggcaatcttgttggctttgacaaggaacttgtaaacactgcacggatgtgcgatgagaaggatttgtctgcatctctcctcggtgctggataccaattggatcccatgaagagcgaatacctcaagacgttcgctcttctggtcaaggaacacgatgtcgaacatatggagtcctcaattgggccgtacaatactattctccgggacgttgcacttgatgctaattatatgacgtacagtggtctgataaccttcgccatcgaactccttgacaagtatccagctatcacgcacatcacgcattcgtattaccaatgcgtgatgatagacgaggcgcaggacacgaacatcttgtgctatgcgttcctgaggcgtctcgtcgggccaaatacacactgctgcttttttggggatccgttgcagcgtgtttatggattcatgggtgctttgccggatttcaagtctcaggctacggataatttcaatctccgacacgaagatctcagcatcaatcatcgctttgaaccaggatcaaatctgcagaggattgataaggtgataaggtctgcgattggtagcgcaggaacctctttgccccaagagacagcagagctgcctataatcgttgcgaattcattcgaggaagagtacgagggagtctgcgcgaaagcaactcatatgctcgaggatgacccagactcaacggttgccgtccttgttaatcgtcgtggggacctcgcgaaatatatcgaaaataaccttgccgagagcgaagtgtcctatttcaacgggctcttccttgacgactcgtcggagtatgcgtccatgtgcgatgcatgtctacgtgccctaaatttgtgcatcgaaagtggaagacctctcaccacgcccgaagcaaaagacgtccttaagaagatttcaaacagggtggctgcaagttcaagtgaatatgcgagcgcctactctatgctcgtcgatgccctcgctaaacaggttgtcgctgattgtcgcggcatggatcctgctgagcgatatgagtacatagtcgatgtgtttgccactcggtcgttaaggcgttatagcgagtatatcaatgccaagcttacgctctcgaccgtccactccgctaaaggtcttgagtgggaccatgtcatcgtcgctggcgttaaccgcgaggactttccattcttcacgatttgcaagtcttgtcaaagtggaggttcttacgatgccccgtgtcaaccaccgtctcctccttatggcacagactttctcagtgagctaaatatttggtatgtagcgctcacgagagcgcgcaaatctctgacggtgataacttcttaccagacttttatctcaaagcgcaactggctaaagcagacaaatccatcctgcttactctttcttcctagattaagtccggtcacagcgaatgggtga

SEQ ID NO: 73708 - DNA, 1677 bp, Clostridium symbiosum ATCC 14940
atgaaattcgagaatgtaaagattaaaaattttaggaattttgaagatgtgaatattgatttatcaaacaaaaatattttctttggcttgaatgatgttggtaagactaatttcctttatgctttacgttatatatttgataaagatgttcgcaggctcaatttaatggattctgattttcataataaaagattagataaaaccatagaaattatggtcacccttgatattactgatgtatcatgtacggattgtcaaaagctacgcgcccagttaaaaggagcattattaagtgagcacaagaaagtctttattaaacttgaagcaaaatatgatatgcaagaaatgcttgccttgccaatattatattggggcggagacgtggagcatttacatgaaatgaagcagagaggctatttgtatgaattggattatgtatttaacgtcatatatattgattcttatgtggatttacactcattatttaagaaaaatgttagcttacttattaagaatgaaagcgaaaaggatcaagaaatccttgatgatatacaggggacagtagatcagttaaacatacatatatcctctttgtctggtatcaaggaatttgaaaagaaaattgcaccggaataccaaaaatttcgcaatgaaggaataacagtttctgtaaaatcggaaattgcagttaaagggttatattctaatatcatcccatatataaagcagaatgatgatgataatttgtatcctactgccggagaaggtcgtaaaaagctacttgcctattcaatttttgatttgctatcagacgaaagtgcagaaaagaaaatcaatttatttttagttgaagagccagaaaaccatttacataagtcaatgcagattgcattatcacaaattttatttacggatagcaagtatacttatttatttgtatcgacacattcaccttttgtactttatgaaatggataatgtcaatttaatccgtatttatagtgaacgaaaaattacaagtgccagcacattctataaagtgccagataattttgaaaaaaaccgaaaaatgctaaatcgctctttagcagaagcaatctttgcggacagggttctgttagtggaagggccttcggaagagatgttatttgaaaaagtcctttcagttatcaatccgttttatgaagcagatggaatatatgtattatcagttaagggcattggttttgaagcatattttacacttttagataaattaaatattttgaatgtcgtcaaaacagataacgatttacgaagtgtgccatcaagcaaaaactatagtgttctgggcttttcccgttgtaataattttattggtgagaaagtccttccaacagcaagaatttccgaaaatacaatagatgccaaaagggatttatataataaaaacattgaatctttagataaaatacgagacaaataccatatttatctttcaaaggtagatttggaaaacgatttggatgaagctatacatgataaattagtgaagtatttaggagcttcaccggttgactatttacaagactcaaaacactatcatatggtagagctaatagaaaaactttccgatacagattgtcgaacgatttatgaacactataattttgcctgtctcaaggaggtatctgaatga

SEQ ID NO: 73709 - DNA, 1503 bp, Clostridium symbiosum ATCC 14940
atgaaattatctccaatccaagaagaaataattaatattcctggaaatttaatcgtccgagcaagtgccggcactggtaaaacacatacaatggttaataaaattataaaagagattgaagacaatcacacccataaggtcgttgctgcaattacttttacaataaaagcagcccaagaaataaaggataggctttctgttgatataactaatcattttatcggaacaaataatagttttgctattgaagaaataataaaaccatttatgaaagatgtatatggtgctgaatttgatttagatatgagcacagattattcttccaaagtagacacttatcaagctggtattgataagattagattggagggtgttctttgctcctaccaagatactaaaaaaaattttatatttgatttagcacaagaaattgtagaggaatctttggcctgtaaactttatctgcaagcaaaatatttcaaaatttatatcgatgaatatcaggactgcgatcaatcaatgcataaatttttcatgtacctatgtgatgaattatttattaatacttttattgttggtgatgagaaacaatccatttatatatggcgcggtgcttatccaaaagcatttaaggatatttgggagaaagctaattttgaaaaaagatttatgggtgataactttcgttcatgcaaacaaattcaaaactattccaatttactttgtgaagaaacatgtaaactttatagccctacagaaaatcttgagaatattgtatggcttacgcccacatctacagattgggccgccaaagtaatctcacaaatagatagtggaaaaaagtcggctctattacgatacactaatgaaaatgcaaaattgggggctgaagcattatcaatagcaggaatagaatataaatatattcctcaaattccaatagcagatataactaccgatacagcatggttatattcagctgttgcgaagtatcttattttagaaaagtattctgcttatgatgttatttcagaaataccagttgaaggaaacgaaagtaaaaaaactatatctactatcaaaaagttgcttagtaatatagaattttcacaagatgatgaaggttcttttaatattgccgtcgagaagttggcagaatatttaggttatcaaaccagagaagaacatttaagtaaattgtatcgaactgtttcggataaaagtttccatgttgcttttgaggcggataaataccaacatgttgcaattacattccactcttccaagggattggaatttgaacaggttattgtatttgctgaagattatagactttcagatatgccgagtgtttataatcattatgtttccgttacacgtgctaaaaataaattaattattgttaaacagaataattataatgcaaattgttttcaagcaaatttgtcaaagctattcttgaaaagtggattaaacatatcagatattgtattactcaaatag

SEQ ID NO: 73710 - DNA, 1911 bp, Lactobacillus crispatus 2029
ttgagactaaagacattactaattaagggatttaaatcgttcaatgaagaaacgaaaattgatttttcaaaagaaacagcatttattggtacaaatggttcagggaaaacagcctgtcttcttgcacttaataaattattctcatataatgcatcggatagaataatacatgaatcagatttttatataaattcagcaaatcaagatagtcaatcgagggacctatatattgaagctgtttttgagttagataaagctaataaagacgaagataagaagtgtgaagcacagtattggaatcggctaatcataaaaaacggacaagataagccgcttttacgaattagacttgaatctacttggacgaattcaggaattgctgatggaacagcagatacaaatatttacttcatgacttctctagaagataataatgaagaaaataagatagtagctagaagatcagagttaagcagtatacagttcatttatgtacctgcagttagaaatcctgaacgacaattaagtaatacctcagatggaatgatttctcaattgataaaaagagttaattgggatgatgaaattaaacaaaagatagtaagcatttcatcacaattaaatgatacattttgggacgaaaaaggaagtaaattaatacaagatactttaaatcaagaatggaaaagtctagaacctaattctagattttctaatgtaaaagctagtgtatctagcatagatatcaataagattatgagtcgtatacggtttgaatttaattcaaatgtaactaataatgtattttctgtggatgaaatgagtgacggaataaaatcattgttttatatttctaatattgcaagtgttttagcaatagaaaatacggtacaagaggatgatataaaaattgaatatcctgttgtaacaatatttgcattagaagagccagaaaatcatatttctcctcatttacttggaaaagtaatggataaagttaaaagcataactaaattagataatacacaaactataatcacctctcattctccagcaataataaaaagagtattgccagagaatgtacgctattttcatttgacaaaagatgccgtgacagaagtgaagaaaataaaattgcctgatgacaaaggagaaaaatataaatttattaaaagagcggttcaaacttacccagaattgtatttttcaaaattagtaatattaggtgaaggcgagagtgaagaaatagttttatcgaaaataattagttcgtatactggtttagatgaagcaaacatatcaattgtacctttagctggacgaatggttaattatttgtgggatttattagaaagcttaaatatagcacatataactttgttagatcttgattatgggagatatttaggcggaaagaaaagaattaaagatattattgatgagttgaagcgatttaatcctaatgatgacgaattagaaaaaatagaaaacaaatgcgccgatttagcagaaaataaaaataatttgttggatttgacgaaacaactagaaaagtatgatgttttcttttcctttcctttagatttggattttatgatgttagcagcttttctggataaatataaaggaatagcatcaggaagtccaaagaccaaagcggatgaacgcaaaaaaattttggatagaactttaaaaggaaaaagagaggaagaagttgattatgataaaaatgatatagaattaatgagatggtataatatgcttttcttaggaataggaaaaccattagtacattttactgctttggaagatatatctgaagaagagctatgcaataatttacctgaacaattaaaaagattacttgagtctgtaaagaataaattggataagaaaaatgatgaataa

SEQ ID NO: 73711 - DNA, 1860 bp, Lactobacillus crispatus 2029
atgaataaggatcaatggaaacctagtaatgggatagttttagaatcaaatgcaaaacaggctatttttacaaatgataatattttggttcaagcaggcccaggagcaggtaaaacagaattattagcacagaaagcatcatatttatttcaaacaggattatgtcctgctccttttaatattttagcaataagctttaagcgtgatgctgctgagaatattaaagatagagtttcaaaaagagttggtaaagaagagggaagtagatttatttcaaaaacttttgatgcttttgctaaattaatagtggacagattttatttagtattgccgaaagatttacgacctagacctcagtatgaaatctcctctaattcaactcaaacaaaaatatacgaacatgccttcggctatgttcctgatagaaacgctgtaaatgatcttttgaaagtagatttgaatgatataaaccctcagagtaataattataaattttggaagtatatgttaatgggagaagaaaaaacgtatttgacttttgaaatgatttctagactagcattatatattatccagcataataaatatgtaagacatattattcgatcagcttttccttttgtgtttctggatgaatttcaggatactacagttttgcaatatgatattttccgtgaatgttttttaaatagtgaaagtaaaattacggctgtaggggataataagcagcaaataatgttatgggctggtgcggataaagaaatttttggaaagtatacgcgtgaatttagagcaacaaaggtatttttaaaagaaaatcatcgatcagctttaaatatagtgaaattacaaaaacttatgtatgaaaaaatagataaggatataaaccctgacataataattaataaaaataaggatgaagggaaagtttttctaatagaaactaacgaaccctcaaaagaagctgaaattgttggggaaaatattataaaagaaatacgtatgggtgttaagccttcagaaattgctatattagtaaaacaacgccctgaagattacataagaaatataaaagagtatttaaaaactaaaaatgtaactgttagggttgaatcaaagtatactgaaactttctctgaacctatagttaagttgattttgaaaatgattttagcgtctattaacgtgataaatggacaggagtggcaagaactggtagatgagacttctgaaatatttctcattaatttagctgatgctgaaatagagcaaaaatatatcaaaaaattaaatgtattccttgataagctatttaaaaatctattggttcaagtccatgagaatagatcaaaaagtaattattactgtaaaatcgtagaatctataatagacttttttacgattaataggcttcaagtttactatccagaatacttagaaatagatcaattaaatagaacgaaaactcaatttatagagcagcttaaagaatgcggatcaataaatgagttaaatactgacatcaaagaaatatggaaagaaataattgacaattatttaggaaagaattcaatagcaactttaactatacataagagtaagggactagaatataattctgtttactttattggattagaagatagtgctttttggagtttctcaaaccaatctgagtctgatcgtaaagcattttttgtggcaatttcacgtgctaaagaaaagctgtactttactttttgtcgaggaagacaaacggttagaaatatttatcaaactaaaaaaaacattaaggaattttatgagttgtttgacaaatcaggtattgtaaaggaaataaatgataataacaattcttga

SEQ ID NO: 73712 - DNA, 1505 bp, Pseudomonas alcaligenes NBRC 14159
ccgcaaatgacgagcctgtatcgaaacaggcggttccaaaacggcatcgtgacacaatccatctccactacctcccagccaagcgcgatccttccgatcacgtcgcctacggcgcaacagcccttctggggcggctcctacgagctgccaactggactgaagaccgagagacggtaaaggatctcacagagcaaattactgactgccttgttgagaacgagtcagttaaaacactgagcgatagcctcaccactgcttggcagcgtctgcacaagggggacttctttgcatcgccccgcctgacgtttgagaactctgagatcgaagcattacttcggcacctcactgtctccttcagccctggccatggagaaaatcaggttgactttgcacgcctgagtgatgggcagaagtccatgctgtacctctcgctggtcctgtcagcactcacgatagggcgtgatgtgaggtcgggagagaacaaggctttcgatccccataaattgaaaccgccggcattcaccatcctcgcggtggaagagccggaaaacagcctttcgccacattacctcggccgcatcgtcaactcgctgaagtcctcagtcgacgtggatgcccaagcactgatagccactcaagcgccctctatgctgcggcgggttgagcctgaaaacatccggtacctgcgactgaatggagatcggcgcacccaagtcacaactattcagctacctcagaagcataccgacgcttacaagtttgttagggaggcggtgcaggcgtttcctgagatctatttcgctcgactggtggtgctgggggaaggtgatagcgaagagatcgtactgcccagaatccttcaggcgaagggggcacctgtcgatgaatttgctgttgcaattgccccgctcggtggtcgccatgtgaaccacttttggcggttgctctcagcgatcggaactccctacatcacgctccttgaccttgatgtcggccgccatcagggcgggtggggacgcgtgaagtacgtcagggaccagcttgctcagtatgctcctgaaaataacctacccgctggctggccttaccatgaatggaacgatcccaacacgcctgtacgaacccataactggttcgagagtggaacagtaagcctcttcaacgagctcgaaaaaaggagcgttttcttctccgaccccttggatctggactttgcaatgctgtgtgccttcccacaggcatatgaggctgaagccatcgcagcaaccccaaagagccacaccaaggtcttaggagatagccatttcaatcccgaccaatacgacgaagatgaacagagcttgttcgaggcttaccacaagcttttcaagttgagcagcaagcctgcagcccacttgggcgcgctaggaaggctcactgatcaggagcttcttgatggcctgcctgagtcgctggatcggctcgcagataaagttatcgaacggctcgatgagtcaccggaatga

SEQ ID NO: 73713 - DNA, 1668 bp, Pseudomonas alcaligenes NBRC 14159
atgatcaagcctgaacgctgggttccctccccaggaattcgactggagagaaatgcgtgggaggctatccgggagcgagaagagtcagtagtgcttactgctggtcctggtgcaggcaaaacagaagtacttgcgcagcgagcggactttcttctacgtacgaactcctgccgctacccgaaacgcatacttgccgtctcgttcaagaccgatgccagtcggaatctcaaacagcgggttcagcttcgctgtggctgggattactcgtcacgcttcgacagcgttacctttcatggctttgcgaagaggatcattgatcggttccacccaattttggtggatgaggcgttgagccaagactacgaaattggtccacagtacatccgaggcaaacagatcaccttcaatcatctgctcccgcttgcccttcggatcgtgaaagagagcgtgatcgcccgcaatgcaatacgtcagtcctattcacatgtgttccttgacgaattccaagactgcactgcagaccaatacgaactgataaaactgctgttccacggtacaccagcgatcctgaccgctgtaggagataccaagcagaccatcatgggttgggcaggcgcacttgaaggaatcttcaaaacttacgctgacgactttggtgcccgccctctgcgcctgttcttgaacttccggtcccagccagcccttctgcggatgcagaatgacgtcattcgggagattgaggctgatgcggtgatgccggaagatcttgccaagggtgatgggggggagattttggcggggcgtttcccaaatgccgcggaggaagcgcaggctgtagcgaaccttattcagcgctggatttctcaggaaggcataccacctagtcagatcgccgttttgatgcctcgtcagattgaagagtacggcgaattcctaatgtttcgactcactgagttgggaatcgctcatcgcaacgatcacaaccttcaggatctcctgaaagagccggcagtcagccttgtagtcgactacctcacttgcctgtacggccaggagcaagcagaagcatggtctcgattaatggaccacttcaccccgttcgaggacgacgacagccgaagcagtgcccaacggatcttcgaagagacctatcgtgagcacctgaagaaagttaagcaagagcgcaaaacagcgaatccatatgcctcatggtgggatatggccaatgaattcctcaaaaaactaggcttctcgtccgtcagtgcactctccgccgactaccgctccaaggctcgtctgttagagattgttcgcgaagttcgtgagcgcatcagagggctactggctacagagccagatttactcagagcattggcacggctttctgacgattcggcagttcggttcctaaccatgcataaaagcaaaggtttggagtttcattcggtagttgtgcttggcgtcgagcaacaaacgttctgggggcaactcgaccaagagcgatgcgtgttctttgttggaatctctagggccaaaaaccggcttgtgcttacaactgcggattacaggccatggccaaagaacgcaagaagatgggatgagcatcgagctccgcatgccgagtttgtgagccatgttgtgcgccatctcaccaagcagcacttctaa

SEQ ID NO: 73714 - DNA, 2046 bp, Prevotella sp. F0091
atgtatatcaaggagattaatatattaaacttccgaagctttaaggaagctttaataccttttcatgaaggagtgaatgttataataggtcataataacaccggtaaaagtaacctgctccgtgcaatggggttagtgcttggctatagtaatggtcatagaataggtaccagtgacttattttatgagacagatgtggcagagcttcaacggcagtcaccacggatcaaaataactcttgtcttacgtagaagtgcagatgaaaacttatattctgcagatatggcgctgtttgccaatatgatgacagacccagcattaagcgaagaggctgaattaagatacgagtttaaactggatgatagccaagagcaaaactataaggcagatgttgctaacgcaattacagccaaagaaatatggaagattatagagcaagactacatcagactctataaaagtagtcgctcgggaggtaatcaggctgctggtatcaacatcaatgagacgttggggcagattgacttccagttccttgatgctattcgcgatgtcagtcatgacctatacgcaggttataatccgctccttagggatgtactgaatttctttattgattactcagttaagaatgatgtcacaaagacagaggatgagataaaggaacaattaaaagccttaagagatgattttgtccaacagtctaggccattgatgcaaactttacaaaataggttacaggatgggaaaaacgtatttctgaagtacgcacttgatacaggcgcaacatttaatggagccgaaccagattttgatggaacggtgacagagaatgagatgttctctgtattgagaatgtttatcagatacgctgttggtatagaagtgcctgctacatataatgggctagggtataacaatcttatatatatgtcgcttttgcttgcaaagatgcaggcagacggaaacattgcctacatgaaacgcaatgccaaggtactctcattccttgctgtagaggaatgtgaagcacatttgcatccagccatgcagtacaagttcctaaagtttctgcaggacaataattggaatgggcatgtacgtcagatattcatgacctcacattctacccaaattgcctctgcggtaaaactggatgacttaatttgcttaacctcacctgcgttgggacagatcaatgttggctatccacgtgccatatataaagaagagagctctaatgatatggtatccaagcaatatgttcagagatttttggatgcaactaaagcggatatgttctttgccaacagattgatttttgtcgagggcattgcagaggagttgctgctcccagtctttgccaggtatttgaataagaaccttacagatgagcatgtgctagtggtgaatatgggaggtcgctatttcaaccactttttaaagttatttgatacgaaaaatccatataccatcaacaagaagattgtctgcttgactgatattgacccctgtcgaaaaaagaaaggagatgacagaaattatgaagtttgttacccatatgagtacaatatagatacagacaactacgactataagcatcatgctgatacagaagtagatcaatatgtagtccatcctaacattaggttctacaggcaagatgtaacgtatggaaaaacgctggagtatgacctaatgcgtgagaatcccaattgtgaactgttattgactgactctgtgtccaatcgggacgagataaaagcaatgatgacagaactggatgtgaacaagatgatggataaaatgcgaaacagtgaggctaatacacgtataaagtcatcaatagaccaatcggggtgggaggatgaagaaaagagaaaagccttacttgcatcgcgttatttgaactccgtttcaaaaggcagtaatgcgctggaactaaacgtgacacttatggataacctagagaaaccagaagcagaaagaaaagagtttcatgttccccaatatattattgatgcattaaaatggctactatcataa

SEQ ID NO: 73715 - DNA, 1677 bp, Prevotella sp. F0091
atggctactatcataaaatcagaacaaactatacctatagacgaaccatttaaggtgactgctgggcctggtgccggaaagacacattggctgataaatcatatcaagaatgtggtgtcaaatagccacaaacttgatgtggtgaggaaggtggcttgtatcacttataccaacgtgggtatcgatacgattacttcacgtttgaatatggggaatgacgtggttgaggtatgtacaatccatagtttcttgtatgccaatatagtaaagccctatattcatctggtagctaaagaatttgggttggagttgagcaaacttgtggttatagatgactctaattttaagtcagaaggaatagctatatcagtattgaagcttattaataagtcatgggtgaatgtcagaagctatctgcaaggtttgaataatgccacgtggcattattcaaaccttgcatacaacgattataaaccaaggttcccaataaagttcggcaagtggttcgttggcaatgactgctatatggggttcaaaagatggctatggagtagagggtatatgtcttttgatgacattttgtatttttctcagattctgctttcgagataccccaacatatacacattgataaaggctagatacccatatattttcgtggatgaatttcaagatacaataccttttgtgattgacttactagccaagttaggcaatgagggggtaattgtgggagtggttggcgataaagcacaatcaatctatgattttctaggtgctacagtgcagcaatttgacagctttactgttccagaaatgcaggagtatgaaatacgagggaataggcgtagcacgaagcagataatagacttgctgaatattgtcagaactgatttttcgcaagactggctgaatggatcagaaggaatgatgccagaattgcttgtcggtgatatgcttaactgttaccaacagtgtatagaaaagagtggaactgacgaaatacaatcgcttgcctttcaaaacatacttgccaattccatgcgtaaaaagaacggggtgcgagaggtagagaatatattagagatggattttgatagcaatgcagagcgtcagatggtgataaaggcgttgataaaggccgtggaatatacaagaatgaatgacttgcgaaatgcttggcatcagttagatatcatcgatcgcgataggattcaaaccatcgtgcttctaagatacttgctggatggctataaagactacaaagacggaagtctgatggatttctacaattttctggtaaatgatttacatgtcgaaataaccaagattaaaggcacggcaatcagggatttctaccagaaccacacgtacgcagatgctgcccttggagtgaagtattgtgattcaaataacaagcataaaaccatccataagtcaaaaggagaggagtatgataacgtgtttgttgttctgaaagaggaaaaagacttagagttcctgttgtcaccaaacctaaatgacaacaactcacatcgggtatattatgtggctgccagtcgtgcaataaatcgcttgtttatctgtgtaccgacattgagtgcagaaaaacgtatccaactggaaggcatgccaataaacatactccccccccaaaaaaaaataatagccaattag

SEQ ID NO: 73716 - DNA, 1974 bp, Desulfovibrio gigas DSM 1382 = ATCC 19364
atgaagcttgaaaaaattcgcatatgtaacttccggtgcttcgggccaaagccgaaagccatacattttgaggatggtgttaccgcgtttgtcggcggcaacggttctggaaaaaccgcgtgctttttggctctttccaggctgtttggggtgacacaagcccaacgaaccgtgcagcggcgcgattttcatatcggcaaaaattgcacagaattggagtctgatgcaactctgtccattgaggcgatctttggttttccggaacttgaagaaggcaaccccgatgaacgagctgatgctgttccggaatatttccaacaaatggtggcttcagcccctggcgagccgctcaagttgcgaatgcaactccgcgcaacctggattgatgacggcacctatgatggtaatgttgatacagacgtgcgatggataacgaccctcagcgacgagtataagtgggaagattgccccagagttcaggctttcgatcggggagccatccagcttatatatgttccagcgacacgtgatgcatcaagtcaggtagcgaatttgttgaagggccgtctttggcaggcagcccgctggtccgagaagttccggaaacagagttcgtggtatgctgaaaagatacaatggttatttgaaaaagaaaagccattgcggttcataatacaccacctcacggaacggtggcgacaactccacgaggctgacaccgacaccacgccaggcctcagacttgtagacagcaaacttgaggagctggtgcgaaaggtcgagttcatttttatgccagacgaggaagggcgcgagcgcaaaatggctgatctaagcgacggccagcggtcgctgttccacattgccttgactgccgccgcactggaagctgaaaaggaggcctgtagccagcttgctgatgaatgcgcctttgagcacgacaaactgcaccggactcagttgacgcttctggccatcgaggagcctgagaacaacctttctccgtttttcctttcccgcattgttgcacagagcagagagatcggctcaatgccaaacgcccaggtcatgctttcgagtcactcgccagcgatcatgagtcgcatcgagcctgaagaggttcgctacttccgtctcaatcgccataaacggcaggctgtcgtgcgcaagctaagtctcccgaaagataatcaggaggcaagcaagtatgtcagactcgcagtcaaagcctacccggagctctattttgcacgattcgtggtgctgggcgagggagattcggagagacttgtgattcccaaaattgccgaggccatgggggtaccacttgatccatcattcgttccaatagttccgctcggtggtcgttttgtcgatcatttctggaaactgctttcgaagctaggcataccatacgcaacgcttcttgatctggaccttgggcgtcagcatggcggcgcaaaaacggtgcaacgcatcgtagctgccctgcaagaaaatggggttgatttgtcgaaaaatgatcatgtgctctttgggtcggcagaccctgacgccctaggcacattgcatgatcaagagctgctagacaacggccatgactggatcaaggcgctcgccgaggagaacgtttttttctcccatccccttgacctcgattttgcgatgctctccgcctttccagaagcctaccgggttccaaaccctggtgggggagggccgcgcatgggcgaaaaggcggtagctaataagataaagatgtcactgaaggagaatggcaacccggacctctatgacgatagctacgatgaaaaattctcctggtacccgtatctgttcctaagcagaagcaagcctgagacccacattgcagcccttacccgaatttcccccaaggagcttgcacgcaatgcgcctcaggaactcaaacgattgattgccactatccgtcaggcgctcagccttccggaataa

SEQ ID NO: 73717 - DNA, 1848 bp, Desulfovibrio gigas DSM 1382 = ATCC 19364
atgagcctcgtttatcctgctgactggaggcctcagggcgtagaagaccttgagccgggagcctgggaggcccttagggagacctctcggtgcgttctggttaccgcaggagcgggagccggcaagacggaattcctggcccagaaagcggcctacctcttgcaaactggaatttgcccctccccaaagcggattctggcgatcagtttcaagcgcgatgccgctcgaaaccttacaatgcgtttggagaagcgttgtactcccgagcaggcgaggcgtttccattcatttacgttcgacgcgtttgcaaaggggctgcttgatcgcttcagggcagccattccgggagaattccagcctccttctgactatcgcatcgtaatgccgggtcagaaagattatcaggaagcaataaaggaacacaatatcccgtatgtcaatgcacagcagcttgagtcactggtcattacaacagatttgccactcgaaggtgatgacctcaatgtgcgagcggtacgctcgtactggcagtcgcaataccagcgcgaggtcctactttcatttcctatgatcaagcggcttgtgttgttgctcttgaaggagaacgtatttattcgacgtgccttgcagataacctacccagttatttttctcgatgaatttcaggacatcaccgggccacagtatgagttgctccgagcagcatttcatggagcaagcccgaacatgacagctgttggagatgacaagcaacgcattatgggatgggcaggagccatgcccgatgcctttcagaggttttcgacggaccatgatgcatgccgtatccaattgctctgcaactggcgttctcataaagagcttgtccgcattcagcatgtgattgcaaggcaaattgatcagaatgtcgtaactcctgttgcgcgagccaagcgtacggtggggggcgaaatcgccgccatctggcaatttgacacggaggctcaagaggccgagatgctggcatcatggcttgcccgggaagtagagaataacgtcgtggaaccgcacaaaacagcagttcttgttcgaatgcgcgccaaggagatcgaagcaaagctctctctggcatttattcagaaaggcctccgactgagaaacctcgcgcgggatatcggtggtatttccatacaggacgtgttgagcgaggagctcacacaaattttgcttccaattttgcgcctgggaagcaccactcgcagccccgaaaattgggaggccaccgtacgaaaccttcagttcttggaggcaataggctcagaagacgataaggcattgcagaaactgcatcggcgcttggacgccatggttcgcactttgcgggcaaccatgcaaaattgccagccaacggatgtcatcgccgaggccgtggcgcttactgttcttggttctattcgacctgaatcaattcggaatgccttcccgcaatacaatcgccaacaggactttgatcgagtatggggcggaattattacattgcttaaggaatgtgcgtcagttggcacggactggccgacattgctcgacgaattcgaaggtcttggccaggttgtgctgatgacaattcataagagcaaagggctggaattccatacgatgattttctacggtctcgacaatcaaacatggtggagtctaagacaaaaccgcaaggaggagctgagttcattttttgtcgcgttcacgagagctcgacagagagcctttttcacgttctgttcgggacgtggccaaccggtggattggattgagcgactgctgcaaccagtcggtctgcttcgcattaggggacaagagttgattccttaa

SEQ ID NO: 73718 - DNA, 1701 bp, Escherichia coli LY180; identical to SEQ ID NO: 71984

SEQ ID NO: 73719 - DNA, 1626 bp, Escherichia coli LY180; identical to SEQ ID NO: 71985

SEQ ID NO: 73720 - DNA, 2115 bp, Pseudomonas aeruginosa PAO581; identical to SEQ ID NO: 72562

SEQ ID NO: 73721 - DNA, 429 bp, Pseudomonas aeruginosa PAO581; identical to SEQ ID NO: 72561

SEQ ID NO: 73722 - DNA, 1596 bp, Olsenella profusa F0195
atgaaaattacatccatccgcataaacaaccacagcaggattcccaactgcaccatcgatgtcagagacaacttgatactggtaggagcaaatggcagcggaaaaagctcaatcataaggtgcatagatctggcgcttggcaagacaacacagcagctgtattactccatcgacaactctgacttcgaggacgaggagcaaccttttgctgttgaagttaggctagaagggctcagcgaagatgagttgtcgttttttccagatgattacgatgcattagacaactcgttgactgttcgcatggaagctactctggacaaagacgatctcacgattaggcgatactttccaaagggcgctggcgataataatttaaggcgagagcagcttgagagcatcggatggagcatgattccttccgatttttcaaccactcaacttgagccaggtaggaagaccatcgtagacgactacctcaaagaggtggatgcctctggagatgaatcgaaattagctgaggccatcaagtctctcagtgatgcgattgacggatcagatgccttcaatgaagcattgggttcccttgcagatcagcttgaccccgtgctcgacggaggcattacggcaaacaagcttcacttcgtccccgaagccgcaatcaatggggatctgttgaataacgtccggcttcagattgagggcaggtctggaactgctcgccaggcgacagaacagtctgacggcaccaaagcccttatcgccttttccatctttggcctgcttaattcgggcgggatgattgccattgatgagccggaaacccacttgcacccattggcccagagaaacttgatacgcattctgaagagtacggggcggcagcttgtcatagccacgcattctggggttgttgctggcgaattcgaacccgacaacatcgcggttactcgcgaagggttttctcccgtgcagccgaagcgaggtttcctcgcgggtcaagaagatcagaagactcttgcaaggtggtggataagcagcaggattgagcttctgacggcgaaacagattatagcggtcgaggggcaatcggataggatgctgctcgaaaaggtagcagggaacacggggcgtcatcttgaaagagacggtattgaaatcctcgaagccggtggatgcagggagatgccgcatgtcttagaaatctttggagaagacgggttcggcctccagatcagcatcttggttgatgaggacgctgaagaagatatggccaatgcgttaggagccaataaagaagacctagcgtcaaaatttgtttatgtatcaaggcgtgatcttgaggaggagtacgtagcagctattggtgcggatagcctatggaaggcattgggggaatcgagcctgttcacgcaaaacatgctgaatacctgcaccatcttagatgactcgggaaaacccaatgaagatgaacttgcagagttctgcaggcgtaagaaaaataaaattctcagtgctgttgttgcttgcaagttgctagatgaggcctctgcacaacgggtttccagtgtcatcgaggtgctccgaaatgccatctaa

SEQ ID NO: 73723 - DNA, 1728 bp, Olsenella profusa F0195
atgccatctaattcttacggagctactgatgagcagcaggagattttcgattacgagccttatggcatggtgattaccgcgcctgctgggtgcggtaaaaccgaagcgcttgcctacagggcaaaaggcctccttgagcgatacgatttttcagggaacgggagaaggctgcttattgtctccttcaccaatcaagctcgagacaatattagcgagaggcttagaaagtacattgataccaaaacgctaagagaacacgttaccgtatgcaacttccatggtttggccgcacgaatcataaaagcgcacggaggcgttgtgggcatagacaaaacctgggaagttgccggctttgattgggttagaaggaatgctcagacgctgaattgcaataaggaaacgcgagaacaagttgaagccgctttaaaatccgcaaagctcactcacttgtctgatgatgaagtaatgagaagccttcaggaacaggcaaagaatggagcggttggccagcttgcggtggccatggaaagcaaaagggtcgaagcgcgtgtcgtcacctatgacgatcaaatacgaaccgctctgtgggtactgcaggatgataaagtcgcccggctttatcagaaccatttctttgctgcgcttgtggacgagtttcaggacttgaccccccagcaattgcgactggttaaagccctgtgtggagacaacattactttcgccggtgacctcgcgcagagcatcttctcttttgctggagcggatcctgactatacctatcaagagatttctaacagtacgaacaagcagataaagctcttgaaatctttccgttcagcacctgccgtccttaatgcagttaactcgctttcccaaatgacacacagcgagcaacttgtggccgcctttcccaatcattggggtaacagtgggctctcagcatttgcctcctttgataatgagaggactgaagcaagttggattgtcaaaatggcacagaggattttgcaactttgcccaaatcagcgcgttggagtcatcactagagtcggcttcaggataaaaggcgtaaaagatacgctggctgcaaatggaatccagtataccgactggtcgagtggcatattcaggccggaaatcgcgagagcccttcgacatacatgcgatgacctgttaagtagagctacagagggtattagtttcaaaagcaagctagatatctaccgatacatagttgaaagaacaactttgctgcagagcggtacgcatgcggaacttgaagatgcctgctcctggctatttgaccaggtattggaaagagacgctaacctgtcccgggcatctgaaataagggaaagcatttgcgagatgcgaggcgatgagagctttgcgacgcgcaagggcatacattgcttaacgggtcatactggcaaaggacaacagttcgattgggtgttcatagtcgggcttgataaaggctcaattcccttttacaaagcttctaccgatcaagagattggagaagaggcacgagttctctctgtaatgatttcacgtgcaaggattggatttgttacaacttccacggaaatcaatgcatacggatactctagggagccatcatcttttctttcattgcttcaaagtgctccaggttttatctgtgggagcgactgcatagtagattggtgcgccaaagcagattggcaaggcatatcgaaaatatag

SEQ ID NO: 73724 - DNA, 1746 bp, Enterococcus faecalis E12; identical to SEQ ID NO: 73340

SEQ ID NO: 73725 - DNA, 1548 bp, Enterococcus faecalis E12
atggaaatcgtcgatgagcaagtaagaaaagatatcttagctgctagcggtaatattatagtttctgctagtgctgggtcgggtaaaaccacaataatggttaataaaatcctaaaaaaaatgagtgaaatttcagatcataaaacagttgctgcaataacttttacggttaaggctacagaggaaataaaaagaaagtcaaaacaaattggagggaacaataaatttgttgtaatgactaacgactcttttgttgaatatgaaatcataagaccatttttgatagatgctttcggcgaaatgtataataatgattttgtgattagttatgaggattctgtaaaatctggttcttttgataaaggtctaaatatattagaaaagagtaataaactaggaacttatcataacattaaaagaaattttaagtttgaattagcaaaaaaagtattagaacaaagtacagcggctcaagaatattttaaatcaaaatacacaatgatctttttggatgaatatcaagactctgatacagatatgcataatctatttatgtatataaaaaacgtgttattgattgatctttttattgtaggagatggtaaacaagccatatatctatggagaggtgcacagagaaatatttttaatcaactagaaaatgaagggatgcaaagatttgaattagtaactaattttagaagtcattttgaaattgttaattatgctaatcttatgcataatgcttctcagttcagagacgattattctaaagaagtaactcatgttgttcattgcaggaccaatgactatgttagctctattaatgagctttgtgagtccaatatagtggataaaaataaaaatataacaattattgcaaatataaacaatgatgcaaaagatatttctgataatttaaatgcacaaggatttaattttgtttttattcctaaaacaccattagatgacgggtctgaaaatgctaatgtattaaaagtaattgcctgttacttattggatgataactattctgtctttgacatcgctgaagtattgagagtagagcaaaatagaacgttactgaataaaattgatagtttattaaagcctctaaagaaactagtgccattgtcatctaatcaaactaaagacgatattagtatctccttttttgaatctattactaaatttaataactacttagggatgaatataacaaatgatgaaaaagtattattgttagatagtgttacaaacaagtatttctatccagcgtttataaaatctaatgatttgcataaggttatgactgttttcggttcaaaaggcctggaatttaatcaagtgattagttttgctaattactatagcttcaatgatgaaagtaaaaaaaataatcactatgtttgtgtaactagggctgaagaaaaatttgtgatgatggagggagaatttgggaaatatagtgaacaaattggcagaaaattaatagaaagggggatagatagtgaaagtacaaccttcaagttgatagatcatatctaa

SEQ ID NO: 73726 - DNA, 1686 bp, Acidaminococcus sp. BV3L6
ttgaaattcagtgaaatctcaattaaaaatttccgtaactttgaaaatattactataaaattagacaataaaaatgtcttttttggaatgaatgatgtaggaaaaacaaattttctttatgcattgagatatgtatttgatagggatgtcagaaagcaagaattcattgaaactgatttttataaaaagaatacagatgtccctattgagattattgtacaaatagatattagtgatataacggatcctgatagtgaaaaaatacgtgcaaaagtaaaaggcgcattgttgagtgatcaggatatagtatatattaagctgtttgctgaatataatgccgccgaaatgcaaggaactcctttgctttattggggcggtaatttggatgatcttcaagaaatacctcttaaaggatatacttctgaaatcgataatgtttttaatgtggtatatattgatgcatatgtaaatttatacaatctttttagaaaaaatactgctattcttcttaaaaatgatgatattgatgatgaaacttcagtaaaagatattgaaaaattggtaaataaattaaatgataaaatatcatcattatctggaattaaaaattttgaaaaactagtaaatccaaaatataataattttaggaatgatgaaattgagatttcagttaaatcagaacttgctgttaatggtatatattcaaatgttgttccttacataaaggaaaaagggagtgaagatctttatccgacatctggagagggacgtaaaaaattactggtatattcaatatacgatatcttagcaaaacaaaaagaagaaaagaaaataaatctatttcttatagaagaacctgaaaaccatctgcatcgatccatgcagatggcattgtcgcacaggatttttgtagaaagtaaatacaagtacgtttttctaaccacacattcttcatatgttttaatggatatggataacgtgaatcttgtaagagtttataatgaaacaaaaataaattccgcaagctccttttatactgttcctcaagaatttaaaacattaaaaaaacagttaaataaaggtcttattgaggcgatttttgctgatcgagtattattggtcgaaggtccatcagaagagatactttttgacaaagttttatcgactctaaaaccgttttatcaggttaatggtatatttattttggttacaaatggtattgattttaaaccttacatcagcgttttagctaaacttaacataccttactttattaaaacagataatgatttgcggaccacaggacaggattcaagttatagcccgattggcttttttagacttaatcatatacttgaacaagatctcttaccgacagatgctgttgatggaaatgagattgaagttaaacgaagattatatgacttgaataaaaaagtgcttgacgagattagaactgaaaaacatatatatttatccaaggttagtttggaagaggacttggatgaagttttgcatgataaactaattgtttatttaccaaatgcgaatggtgatgttatttcttatctaaaaaaacataaaaaatataatatgattgaacttgtcaataaactaagtcctgaagactgtaataaaatatttaaacactacaatttcgcatgcctggaggaaatttgcaaatga

SEQ ID NO: 73727 - DNA, 1014 bp, Acidaminococcus sp. BV3L6
atgcgatgcatcaatttttttatgtacttatgcaaacaattagatattcatttatttgtggtaggtgatgagaaacaatctatttatatatggcggggagcttatcctcaggcatttagaagtattctggatatgccaaattttagtaagaacaaattgagggaaaattatcgttcttgtcgtcaaatacaaaattactctaatttgttaaatgaagacactcaaagcctttatagccctgaacttgacaattcagcaatcatattattaaaaactacttcaaaaaagtgggctaatcaggtatattcgctgctcaataatgaaaaaagttgtgcattgttaagatttaagaacgatgacgcgaaaacaggggcaaaagaattagaacaggctggaactcattttacttatgtacctaaaacaccaatttcagaaattacaacagatgtagcttggctatacaatgcaattgcacagtattttattctaaaaaaatattctgtctatgacttgatgaatgaaattcctgaagagtcaataggggatagactcgttactaactatcttactagaatgctcaagtctattgaatatgccttaaaaaatgaaaatgatgaagatgttattagagaagtaattgaaatcgcaaaacattttggctatactacaacgtcagaaaaacatatcagagacatgataaaaacaataagggaagaagagtatcatgcagctttttatatggataaactgcaaaatatttctataacatttcattcatcaaaaggattggaatttgaccaggtaattatatttgctggtgactatggattagaaaaagaagatgacatttacaaccactatgttgcagtaacacgtgctaaatcaaaactcataattgttaatattacagattataatgcgtggcgtagtgacagatttagaaataatttaactgcaatatttcaaagatcaggtgtgttaccacaggatttaatgacagtaatagagatgtaa

SEQ ID NO: 73728 - DNA, 1989 bp, Coriobacteriaceae bacterium BV3Ac1
atgcaattatcaaagataaaaataaaaaactacagattgcttattgatgccgaattggaagttgattccaagacaaccttaattgtgggcagaaataacacagccaaaacatcctgcttttcgtgcattggaaaggtactggatggagaagccgtatctttcgatgactatccactattaaggcgagaagatttctatacaaaaattgctctgtttatgaagaaaaagctcacttatgaagacctttgtaagcagattgaagctatctccatagagttcctggtggactattcgttggatgatccggatgataacctaggagctttgtcgccatttatcattgatgtcaatgtggacacaacaactactctaattcgtgcagagtatcgcctaaaaaccaacgaaaaatccctgtggtcgctcttggaaagcagctattataaggatggtacctattcgccgagcgaagaagcccataaggtgcttgctgataatttcggcaaattgtttggattaaccgcatatgctatcaatccaaataatccagaagacaaacaggtaaaaagccaaaaggaattatatgatctgttcccattccatgcaattcctgctgaacgagttcttggcgaagatgacacacataatagttctctcggatcgttaatctccggcttctttgatacgagcgaagcagaactggatccaaatgttgccgcagaaataaaacggttacgctcaatagtggaaaaagccaataaagatgttcaaaaacagagtgatgcaattctaagttctgttgtaaacaattcaattggttttggttatcctaacatagaggaattaaagctcggagttacaacacagctcagcatcgacgatcagatcaagaatcagaccaggttatcttatatatctggcacagcaaacgaaagtttgccgagttctcacaatggccttggttataaaaatctgatcaaaatggagttcctccttgctgcatttgccaaggatattgagaaacgtggtgttgcgtgtattccactgctctttattgaggagccagaatcacatatgcacccacaaatgcagactgcttttgcggcgtatttggaaaagtttcttggaaagctatccactgttcaaatccagacttttttgacctcgcattccgctcatatagctaatactatggagtttgcaaaagttcggtatgcacaaaaatctaacgccggtgtgatttacaagaatttgagcacatttgcacaggccaatcccgataatgtagattttatccggaagtatttaactttgaccaaatgcgatttgttctttgcggataaagctatttttgttgaaggtgcctccgaacggttgctgttgcccgacatgattgagaaatgcgagacgtctggtgagtttggttcctgtaagtatcctttatctacgcagtattatgcactaattgaaatcggtggagcttatgcctataaattcattccgtttattgagtttttaggagtaccatgcctgatcctcactgacttagattctgtagcagaccgaaaaggaagaggcggaaagatcataaaaaagtcggtagtggttagcgaaggcgaaacaacatctaatgaaacaataaaatggtgggttcgaaaaaacaaggggcttccggataatgacgcctcaaaaatcaacctttcagaaatcatttcgatgacggcggatgacaaaaccagaggaaaatgccatatcgagttccaaactaccgaaaaggaactgtgtggacattctttggaagaagcgattcgtaatgtcaatcggaagcattacaatttaggtaatagaacaagcgagaaaaagcttgaatttacgggtaagagtaaaacagattttgcactcgatttgatttacaaatattccgattattgcgttcctgattacataaaatccggattaaaatggttaaatgaccaaagagttcttgagtaa

SEQ ID NO: 73729 - DNA, 1743 bp, Coriobacteriaceae bacterium BV3Ac1
atgggtggagagtatattggtgaaaattacgatcttgcaaaagcagaagctgataaggttgatgcacagattatcgaaatacttaaatcggggcacagtttccgtgttgaagctggtgcgggttctggcaagacttactctttgaatcgagctattgagtggatacaggaacataaatggtctgattacagccgaaaaaaacagaatgtagtctgcatcacctatacaaatgcagcggtagatgtcattgcagaacgacttgcaaaagattcgtttattattccttccacaatccactcttttgcatggaatgccatcaaacaatatcaaagcgttttgattgatgctgtcacaacaaatcctgattatctgccagacgaaggcgattttaatcaagtcaccgaagttgcatatactttgggacatcgctacaaggaaaatggtattcagtatctttatcatgacgacgttctaaagctcttctgcctgcttcttgataacgctaaatttcgccgggtatttgcggataaataccctttgatactgattgatgaataccaggactcctataagccgattattgatcgcttcattgagttttttatagtaaaaggtgttggacctcagttcggatttttcggcgatgcttggcaaaccatctatcagtcaaacaaagcctgtggagaaattgaacacgaaaaaatcgaggtaataaagaagggatcgaatttccgatctgcgccaaagattgttcaacttttaaatgatatccgacctgagttaccgcaaaaatcagccattgatggatttgacggtgaagttttagtgattacgtgtgatgattattcgggagttcgtcgcacagaacgcaatttcaaaaatgaattgcctgcggtcgagttgaggacaagactgaacactatcagagcaaaaattgaacagaacacacccgctgacgaggatcttaaagttctgatgattacgcacaaagttcttgcttcccaacaaggctacgagcaacttttggatatactggatgatgggttgcgcaacaaggaagatccttttcttattttctttgctgatacgatagaaccgatatatcatgcacttgatacttcgaacacccagttgctttttgacacacttggaatcaagcggtatccaattacaaagaaatccgaaaaaaccaaatggaaaatgctgtatgaccagctaacagaagctcgcacacaaaaagcggttgatgttttggaggcaatcattcatagtcaattgatacccattccacccaaggtggatggatggtaccggctctataaggatgctccagaaacaatgtatgcatcagaggctacaattcaacagtttttacagctggattatgcacaatttattgctgttagggattttctatatccagatgcacaattttcaacagaacatggcgtaaagggtgaagaatacgacaatgttgtttttgttatcagcaagggatggaaccaataccaatttgaaacctatgcgccaatgataacaggtcatgcttctattcctaagggcaaagaagcatcgtatgaacgaaaccgtaatcttttctatgtttgttgttcaagacccaaaaagcggttattcttctttgttactgtgccaatagattccacgttcagaacatttttgataactttggtcggtgaagaaaatattcttacttatcggcagtttatggaaatgtctaattaa

SEQ ID NO: 73730 - DNA, 2115 bp, Pseudomonas aeruginosa c7447m
  modified_base (532)..(555): a, c, t, g, unknown or other
  modified_base (1485)..(1494): a, c, t, g, unknown or other
  modified_base (1714)..(1717): a, c, t, g, unknown or other
atgcgaatcaagtttgtggagatttccaatttccgaaagctgaagtctacccatctcgatttagataaaaacacgacgattctggtcggtgccaacaacagcggaaagacctctgcaatgctggcgctgcgcatcttcctactatcacctacgcgcttgaatcttcgcgacgtcacaattgcaaattggaccaagattgatctactggggagcgagtgggaagccggtgcggagcccaccgtcgatctggattcgctgcttccctcgctggatgtctggcttgacgttccgctccgcgagatccagcacgtcgtcgatatcctaccaacgttagattggtccggcgggctgctgggggttcgactagcgtttcgaataaaaaatctcgacaaactcaagagcgaatatatcgcgcaacgaactgcggcgcgggacgcggctatcgttgggccgaacggtgagtcgatcaagattgcagtctggccacgcaaccttacagactttctggagcgtcggctgcgagcacatcttnnnnnnnnnnnnnnnnnnnnnnnnccggctgctgttgttccgccgggaagaagcggcctcgcgacgccgcaaaggctccccgccagcgcacttgcgttcgagcatccaccattcaaaaaactcatcaagattgacgaaatcgccgcgcagcgcgacttcgccgacgctagcagcagtgacggcggtgaagacaagggggaggcgaacaatcgtcggttcaaacgtcgcctctcagaccagttacgctcctattatgatcgccatctcgacccgacgaagacgccatcggacaaggactatgaagcgctcggagcaattcaagcggctgagcgcagttttgacgcgcgacttgaggaaggcttttccgctgcctttcaagagctagaggatctgggttatccaggcatgagtaatcccaagctcaagatctcgacccttcttcggggaacggatgggctcaagcatggatcgtccgtgcagtaccaggttgcagacccttcaggggacggcagcaacaccctccaactaccagaggactattcggggctcgggtatcagaacctgattgccatggtgttcatgttgatgggcttccgcgacgagtggatgcgcgtagagaaagccggcattctcgagggggccgacgtgtcacacgagatacagccactgcacctcgtgctagtagaggaacccgaagcccatcttcatgcacaggtccagcaggtcttcattaacaaggcctatacactactccgaaagcacgccgatctgggtgtcgcggaaaactattgcactcaactgatcgtcagtacgcactcgagtcacgtcgcgcacgaagctgacttcgccaatttacgctattttcggcgccggccggcggccagcatgggggagacgccgaccactacggtggccaatctgtcctacatcttcggtgatgggtacgagacaaannnnnnnnnnaaacgctacctcaaggcgacccactgcgatctcttcttcgcagacggcgtcatcttcgtcgagggacaggcggagcgcatcctggtgcctcacttcatccgccatcattttccagagctgtcgcggcgctacgttacgttgctcgaactcggcggaagtcacgtgcacagcttccgcaatttagtcgacgcgctcggcatcgcgacgctgatcattggcnnnntggatgccacaacggcggttaagattatcgataaaaatatgcgagaaacaactcgttggaagtcggctcgccccgagcagggcaaagctcagcaaaccgcaaactcagttctcaaagattggcaccccgggaaaaagcttattgatgaactcgtcgcgctaccgcccgatggacacatttcaacggctggcggcgactatgagctgtatgtcgcctatcaaaagccagtcaacgtgaagggtgcttccgaagacagcgacctcatcattccgcgaacctttgaggacgccttgatcctggagaatttggcagtcgctggaaagatcgaaggttcgatcacctcggccaaggttcgcggcattgtcgctcaggatctgtccggagatgaggggcggtag

SEQ ID NO: 73731 - DNA, 429 bp, Pseudomonas aeruginosa c7447m; identical to SEQ ID NO: 72561

SEQ ID NO: 73732 - DNA, 2034 bp, Leifsonia aquatica ATCC 14665
atgcgggtgtctcgtatcaaagtgcgtaacttccgtctacttcggaagatagacatcgacctcgatgtacagacaaccgtgctagtcggtcggaataacagcggcaagaccacccttgccgaggcgttcactcgctttctgcagtcctcgacgttgagtttcactgccgcggacttctcggccgaaagttaccaagatttccgcgatgcttggatcgctttcgacgaggggaggaaggaagatgcgagggcactgctccccgaggtgtccctcaccgtagagatctcgtactctgaagagctttctgattacgggcccttggctgccgccatcgttgatcttgacccggattgcaccgatgccacaattcgctttgcgtattcactggagggcggtcgtctcgacgactttttcgagggggtggagagagacccgcagaccggagaagcccccgatgttgaggccgtactatcggtggtccgtgagcgattgccgaggcttttcgagcggtcgatcatcgcaattgatccgaacgatgagtccaatacgcgagaggtaacgcttgccgctgcgcgcagcctcctcaccgtacattttctaagggcgcaacgcggactcgacgatgagaaggaccatcccaaagatctcatcggcaaagtcttccagaacctattcgatgccgcttccaacgcagaagacggaagcccgcaaaagtcgacggcagtcgccctcactgaagcaatatcagacgtcgagttgcagctgggagaccaggtcagcaagatgatggtcgacatcatccccgctctgaagagctttggataccccggccttcatgatccaggtatcgaagcagcaacgaccttggacgtggagcgattgctcgcggatcacaccagcatccgatatcaaggtgtggccggagtatcgctccctgagtcttatagcggtttagggtcgcgcaacttgattctgatgttgctcacgctactgagccactaccgcgattacgcatcgcgaggcaacatgcctggcctccacctcgtgttcatcgaggaaccagaagcgcatcttcacccgcagatgcaggaagtttttatcgagcagctctcctcgatcgcgggcctgttcccgactctcgacgcgcgtatttacccttggtggccccagttcgcggtatcgacccactcctctcacgtcgccaaccgggcggacttctcaagcattcgctacttccgggtcgaagatgccgaggatggttcgcagcgccgtcgcgcggttgtgctggacttgagtgaggctgaggggctagatacagatttcctacaccaatacctgacccttactcgttccgatctgttcttcgctgataaggcgattctggtcgagggaaccagcgagaggctcatcgtgcctgctgctatccgaaactcgcagcacaagctcagcagtcaatacgtcgcgctgatggaggttggaggcgcatacgcacacatcttcttcccgctgctcgatttcctcagacttccggctctcgtaatcaccgacatcgattctgtaggtcccgtagaaggaaaagaacgatacgcggcgacaagtgtgcacgaaggcgtgtcaactagcaatgcaaccatcaaggcctggtttccaggccgcgaggcccaagaacttgccgccttgctcgcagccgcggaaacgggcgcgattatcaagggcaaccggtacctcgcgtttcaagtcccggagcttggcgcagaagcatgcggacgcacatttgaagacgcgttcgtgctagcaaacccatccgccgagggtctcacgctcaccggagacgccaacagcgacgagatgcttgccattgaagccgtgcaggacgcgaaaaaaagtgatttcgctctccgctttgcggtcaaggaaaccggctggcaaacgccacgttacatccagcgtggccttgattggctgctacagcacggtagggagaacgctttcgggagcgatggctcaaacgaaaatggggtggtggttcgatga

SEQ ID NO: 73733 - DNA, 327 bp, Leifsonia aquatica ATCC 14665
gtgaaaggtgcagagttcgacgacgtcatcgtcctcattggccgtgggtgggcaagctacgacttcgcgaggatgatttccggatacgcccgtgagagcgaacgcgagcccaaggagctgcgtagtttcgagcgctcccggaatctcttctacgttgccgcctcgcgagcaaaacacaatcttgcgctgctttttgttcaggagttggacgacgacgccctcgctgtactaacgggctgggtcggccccgagaacgtcgtatccatcgagttcgccgatgagaagaacccaaaaacagaagtctctgctactcccacgttctcctag

SEQ ID NO: 73734 - DNA, 1743 bp, Leptotrichia sp. oral taxon 225 str. F0581
atgaaattaaaaaaattaattataaaaaattttaggaattttaaaaatatagaaatagagttatctaataaaaatgtaatttttggaatgaatgatacaggaaaaacaaatttactttatgctttacgatttttattagatagagatatacgaaaaaatggattcttgaatacagatttttataaaaatgatactagtaaaaaaatagagataatactagaaattgatattagtgatagaaatttagatgatgaaagtagtttttcaaaaaattcaaaattcttaatttctaaaataaaaggagcaagaaattcagatgaaaatttagatagtttttttataaaattagaagcgaattatgatgataacagtttatttggaaatcccgatatgtattggggttcaattttagaaaatttacaaaatataccaagaattggtgaaacgtatgaaattgacaggatttttaaaatgatgtatgttaatccaaatacagatgatttacaaaaaatatttaaaagaaatcggaaattgttatttgatgataaaaatgataatgaaaatgatatggaattagaaaaaagaattgaaagaagtatttctgaaataaacgagaatgtaagtcaattaagtactataaaaaatattcaaaatttattaacagaaaattataaaaaatataagttagaagagctttcgatagaattaaaatcagaaattgtagtcaatggatttatggataatttggtaccttatataaaatggaatgatgatgaaaattattatccgacaagtggtgatggaagaaaaaaaatattatcatatgctttaaataaaataataacagaaaaaaattatgaaaatcaaattgtaatttatttgatagaagaacctgaaaatagtttacataattcaatgcaaatgatgctttcacaacaattattttcacagcctgtttatgattatttttttcttacaactcattctccaaaaatattatatgaaatggatgaaacacagttaattagaattactgataactctaattccaagagtttttcatatttatataaagtacctaaagaatacaaaatattaaagaaaaaattgaataaaggattatcagaatcactattttataatgaggtacttttggttgaaggaccttcagaatatgtactttttgaagctgttttggcagaagttaatcctaattatgaaacattaggaaaatttttgttacaagtaggtggaataaattttaaaccttatacagaactttatgaaaaattacaaataaagtattttataaaaactgataatgatttgaagaaaaaaagaaaatcaaaggaaaataatccaaataaatatgatttaataggttttaatagatgtattgatgtaataaaagaaaagaaattaaaaagtatagagtttacaggaaatgaagaagaattaaaaaataaaaaaatagagatttatgaagaaaatacagaattaatagataaatttatagaaaataatatttatttatcaaaaattgatttagaaaatgatttatatggcataattccagaagaattagataagcatactggaaaaaaagattcagtaaaatggttacaagaacataaattatataatatggttgaatttatagaaagttgtatgaatgaaggtttagcaaaaaaaatcaaggaaaatacccaagtattaaaggagtttgtagataatggaagataa

SEQ ID NO: 73735 - DNA, 877 bp, Leptotrichia sp. oral taxon 225 str. F0581
atggaagataaagagataaatccaattgataaggaagaacgcgataaaattataaaaacagaaggaaatatttgtgtattagcaagtgcaggttctggaaaaacctctatattagtaaaaaaattagaatttgatatagaaaaagaaaaaaatcactataactttgttgcaataacttttacaaataaagcagctacagaattaagagataaaatagtgaaaaaagaaagagtatttattggaacaattgatagttttttagaaaaagaaataatagatatttttattaaaagcattgaagataatattccagaaaaattttattattcttatcaaaaaaaagataaattttgtaattataacgatggcttaaaaaaattaaaagagtacaaaatttttggaacatatgataatgatatacaaaaattagggaagaattttaaatgcgaattggcattaaaattactaaaaaaatctgtaagagtacaagaatatttaaaatataagtacaaaaagatttttatagatgaatatcaagattcggatcaaggaatgcatgagttattttgctattttgctaaagaattaggaataaaattgtttattgtaggagatgacaaacaatcaatttatggatggagaggagctaaggttcaaaattttaaaaatatagtagaaaataatatagaaaaaattagttttaatatttttagattacatcataattttagaagtcatataaatattactttattttctcaaatattatcagaaaaaaatatagaaaaaattgaaaaaacaaatgaaaaagtgattttctataaaaaaagtactggaaataaaaaagaagatatacaagatataataaaaagacaaa

SEQ ID NO: 73736 - DNA, 2064 bp, Staphylococcus aureus subsp. aureus SA957; identical to SEQ ID NO: 72502

SEQ ID NO: 73737 - DNA, 1749 bp, Staphylococcus aureus subsp. aureus SA957; identical to SEQ ID NO: 72503

SEQ ID NO: 73738 - DNA, 1713 bp, Ochrobactrum intermedium 229E
atgtacctttcaagaattacggtagataacttcaggaacttccggtgcctcgatgtctcgctggctggcaacgtcgtcatcgtcggtgagaaccgggtcggcaagtcgaacttgctctatggcctccgtctgatattcgacccgtcgctgccagacagcgctcgagagctgtctctcggcgacttctgggacgggcttgaagaacttgacgaagaaagtcgaatcctggtgtccgtcgagataagggaattcgatgatgacccggatgttctcgctgtgctgacggactaccgtgtgcccggaagcccggacacggtggcactgacgtacgaatatagggcgcgcccccccggactcggccggactccaacgagcgagagggacttccagttctcgtgcttcggcgggagggatccgacacgaaaattcggttatgacgtgcgaagcaggatttccatggatgtccttccggctcttagggatgcggaaggagacttagctgtctggaggcgctctcccccccttagaccgctgatcgagacggcctttggtgcaatcgaccgtgacgagttgcaggaagtcgccgaccagatcgctaccgcaacctctagcctaatggagttcgagcccgtctccaaacttgaggaggccatagcgacgtcgttccgggccatgagcggggagcggcaggacgtcgagccgacgctcggcttctccgccaccgatgcttcgaagctccatcgccaaatcaggctgctgattgactccgggcagagggctgtttccgacgcgagccttggttcggcgaatctcatcttcctgacgctgaagaccatggaactgcgcaacctcattgcaggggacaagcgcgaccattcccttctcgcgatagaggaacccgaagcgcatttgcaccccccccatttgcaaagactcgtctaccgaagcctgttcgaggatgcgagcaggccggatgaggacggcgaagatcctccgctgtcaatcatcatgacgacgcactcgccgcacattgcgagtgtcgctcctgtgaaatcgatcgtcctactccgagaggacggcggagagacagtcggctgttccacggcttcgctggatttgtcgaccgaggaggcggacgacttacagcgctacctggatttcacgcgcgccgaaattttgttcgctcgcggtgtcatcctcgtcgaaggcgatgcggaacgctttctagttccaaggtttgcggaggaactcgcagccgatctggacggtttgggtatcacgatctgctcggtcgccggcacgaacttcacgccctacgcaaagtttcttgaagcgttgaaaatcccgttttccataatcactgatttcgaccctgatggtgatcggggggggcagaagcggacagtcgcgttgtcccggctcctagatggaatgcgtaccaagaagtacgacaaagaatatttcgacgagctcatggagactgatgactggcctcgcttcgatgagggcatcgaagagttcgggggggtcttcaccaacagcgatacgctcgagatggatctcttcaagggcgccttcacggcgtctatcatcgagggcctcagggaaggcaacttcggcaaggaacgaacggcacgcatcgacgcctgggaaaaggacccccacgacagtcaaccggaagcagctactcgctatgatggaggacatcggtaa

SEQ ID NO: 73739 - DNA, 585 bp, Ochrobactrum intermedium 229E
ttgcgctgcgccgcccttgtcggcaatccatggctgcgcgatgcgttgcttgcgaaatttcctgttctcgccgtcgacgaatatcaggatcttggtaccgcactgcaccggatggtgctcggactttgctttcgcaccggaatacgtctgctggcggtcggcgatcccgaccaatcgatctacggcttcactggggcgagaccagaactgctgcagcagctttcgcagcgtgaggacgtggagacggtgagactggcgctgaactatcgaagcggtacacggatcgttaccgtctcggagtatgccctcggagaggtccgcggctaccaggcggcggaaggcgccgccgaaggcacggtctacttccacccgctggatggaagctacgaagaccatgccgcctggctgttctcaacgttgcttcctgaagtggaggtgagaaatcccggccttcagcgcggtaacatcgctgtcctctatgcggcggcgttcatgggcgacgccgtcgccgaagcggctgctgaccatggctgggcattcgtgcgcgctgatgcgaatgcctttattctcggtcgaacagattga

SEQ ID NO: 73740 - DNA, 2064 bp, Peptoclostridium difficile F665; identical to SEQ ID NO: 73604

SEQ ID NO: 73741 - DNA, 1287 bp, Peptoclostridium difficile F665; identical to SEQ ID NO: 73609

SEQ ID NO: 73742 - DNA, 1440 bp, Klebsiella pneumoniae 303K
atgatgattcgttcggccttagacccggcgcagatcatgaacaaccaaaatggggccgtaatacattacgcgttgggggaggatgacggtaatcctaccccaccaacactacccgatagttataacgggcttggatttaagaatctgatctttatggttgttgaattactcgacatccacaaccaatggttagcaatagaagagaatcgaccaccggttcacctgatttttattgaagagccagaagctcatctccacgcacagttacagcaggcttttatacgcaagataatggaccttcttgccatggagagtcaggagcttatgcactacaccactcaagtggtggtgacttctcattcaactcatattctttacgaacgtggttttcggccgatccgttactttcggcggaagcgttcatcaaatatgtcggcaacagatgtgctcaatctctctgttttttatgataatactgatcctgaaattcgagactttcttgagcgttacttgaagctgacccattgtgatttgttttttgccgacggggctgtacttgtagaaggcaatgttgagcggctactgctcccgcaaatgattgctaccgccgcacctagattaaaatcctcttacctaacagtccttgagattggcggtgcttttggctatcgattccaaaaactaattgaatatcttgggcttacgacactcattattactgatctggatagtgtgtactgtacccctccggtacaagatgcaacagaagctcgagcagatgagttagatggtcttgcagaaaatccggctgcaaatgatgatggcgaggaacctgatgatgatgaggaagaacaggccaacacagaaacaccaggaaaggcttgtattgccagtcatcctggagctatgacctctaatcaaacacttcggcagtggttaccgaaatgtgacaccgttgccgctttatgggaagcaactgaggaaatgaaaatacaaagccgcacagctgagtgtgacgctttggttcgtgttgcttaccagtgtcagacaaatgttacatggaaagaggaaacactggcacttgctggccgtactttagaggaagcttttgcacttgaaaatctgtcctggtgtcaagatgtgggctgtaagccactcaagctacgtattgccagagcagtaagtatggatctactgcaactggcccagcgcattcacaagcgcgtgcaatcaaaaagctttagtaaaactgattttgctctgaatttacttcttaaaaaaccggatgaatggtctgtcccaacatacattgctgaaggattaaaatggctcgaagctgaaatagccccgccggaactagaagttgcagaaggtcaggaagaggatgttgaggatatgtccgtcgctttagctgaaacagatggagggagggttgcatga

SEQ ID NO: 73743 - DNA, 1791 bp, Klebsiella pneumoniae 303K
atggtagccggtgctggttcaggtaaaacaacatctctcattaaagccctggcacatttggctgatacccgtggttctgctttacgtcgtgccgggcaaaaaatatcctgtatcacgtatacagaggtagctgttggtgagattgccgctgacgttggtaactcgcagttatttcatatttcaaccattcatagctttctttggtcggtcatccgaccttttcatttagatatcgcaaagtgggtcgtagcgcgaatacatgaaaaaatagctgaaaagcaagcccattatgataagcccagaacacaagctaaaacaaaatctcgtcttgaagatgaaattgcctatctctctgctcaacttgagtgcattgatgatgttgataaatttatctacgggacaggaagtaactatgctaagggtattttaggtcacgatgatattcttaaactcgtccctgcttgtgttgaggctcatccacttttgagaaggattgtagccaagcgctttccatttgtttttgtcgatgaaagtcaggataccgatcctgatgtgatctctgcgcttcgaactattgctaatgacaatcctgacatgtgcataggattttttggtgatccgatgcagaaaatctatatgagcggagctggtgctattccgttaagtgatgggtgggctgaaattacaaaaccagagaatttcagatgtccgacgtctgtacttggtgttatcaattcgattcgtgcttctggggatggtctccaacaaattcgtggtcgaacgactatcgtagatggcgttgaacaaactgtatcaggcacagtgaatcttttcatcttgccttcaaatgtggaacgaagtgcctatctcacatctgtcagacgttaccttgcaaatgaaactagcgatgaacaatggttaagtgatacacgcgaaggtgatgttcgtcttcttgttttggtgcatcgtatggcagctaatcgactggggttcccgaatttatttgctgctcttactgataaagcaccgatgagtttgagtgaaggggtgaacgatgggtcagcttggccgcttcgtccgtttgtccagcatatacttccaatttttgctgcggctcaggcaaacgatcaatttcagattatgtcgattatgcgtagcgagtgtccaaagctggagccgttacgactgcatggtcaagctatggtggcagttttaaatgaaatacaacaaggcatcgatggcctgtttgcactgttagaagaaggatcacaagcaacagttcgggatatattgctacatgttaaagactgcgagctgttacgtcttgacgatcgttttgaaaatcatttaagtgatgaacctgtgaatgatggtaatgatgacttcgaaaatgttcagaactatctaagatgcaatgcccatgaactttgggcataccgccgctacctttcagaggaatcaccttttgccactcatcatggtgtaaaaggtgcacagttcgagcgcgtattggttgttattgatgatgaagaagctcgcttcagccaatattcgtatgggaaatattttcaatacattcccctatccgacaatgatctagccaatcttgaagagggcaaagagtcagtactcgaccgtactcgtcgccttttttatgtctgttgctcccgtgcgctgaaagacttggccgttgtcatctttgttccagatgtcgccgtcgctcaagcggcaatcgttgagcaaaatttattccctgcatcgacaattctagggcagcatgatctaagttag

SEQ ID NO: 73744 - DNA, 2139 bp, Enterobacter sp. MGH 14; identical to SEQ ID NO: 72908

SEQ ID NO: 73745 - DNA, 1800 bp, Enterobacter sp. MGH 14; identical to SEQ ID NO: 72909

SEQ ID NO: 73746 - DNA, 1905 bp, Marinobacter sp. ES-1
atgaaactacagagcatccggctattcagctttcagtcgtttgggccggagcccactgaactgaccctcaacgacatcacctatctgatcggcccgaacggttcaggcaagacggcagcacttcaggcgctgtgccgcttgtttgccttcgatccctcgctacggcgcatccggcggtcagatttccacgttccctatgacgaagaggacgttcctgaagaacggcagctttggatcgaagccgactttatctttcccgaacttgaagatgacgatgatgtcgcaacgatagctcctcatttcggccatatgcggctggactccgccgatggtccaccccgtgtccgatatcgcctggacgccacgatgggcgtggatggtgacatcgaggaaaccctggttcatgtattggatctcgatgccgatggttctcctctcacgacagcacaagttacgcgagcggaacgcaatcatgtgcaggttcactacttacctgcaagacgagatcccgctgatcacatcgcctacagcgccaatgctctgcttggccgcatgctgcgtgccgtaaactgggagaatgagcgagaagaaatcaaaggcttcacagacaaaatcagtgaaagcctcgcgggcaacccatcaatcgcaactctgagcgagagcctgcagacaacctggagcaccttgcataaaggcagcttcttcgccgaccctcaaatcaccttcgtcgcatccgagatcgaagccttattacggcacctgtccgtttcgttttctcctgggcatgacgaagaattggtcgatttttccaggctgagtgatggccagaagtccatgctctatctgtcactggtgctttcggctcaatcaatcgggcgtgcggtgcttgccggtgacgatgataccttcgacccggataagttgcgtcccccggtgtttacgatcgtcgcccttgaagagcctgagaacagtctctcacctcactatttgggaagaatcgtgaatgctctggccactatgacgagtaacgaagatgcccaagccctgatcgccacccatgcaccttccatgcttcggcgagtcaatcctaggcacatacgctatttgcggctcaccagtgagcgaactaccaagaccacacgcattcgcttgccaaaaaggacagatgaagcccacaagtttgtccgcgaagccgttcaagcatatcccgaaatctacttttcccggttggtcatccttggagaaggtgatagcgaggaaatcgttctgcctcgtatcctgcgcgccaaaggtattccagtcgatgagtctgctgtgaccgttgcgcccctgggcggtcgccatgtcaatcacttctggtgcctgctctcggcccttgaaatcccctatctcacattgctcgatttggatgtcgcccgacatcaaggaggatgggggcggttcaaatatgccaatgatcagctattggcataccaccccgaagatgttctgcctaaagatcacaatattcccgcttggaactcagataaatatagggttcgagagtaccctggctatatcgaagcctttgaagagcgtggcgtcttcttctcctatccgatggacctcgacttcgcgatgttactctcgtttcccgatgagtacggtgtcgagcctaatccgccgagtgaggccacggtcaaagccgttctcggcaatagccatttcgacgcggcacagtacgatgacgatgagcgcgcacttttcaagacctatcacaagcgtttcaagctaggcagcaagccagcggcccatatcgatgcactggcccaattgagtgacgaggaacttcgcgacgacatgcctgaatcactagcgcgactggcgaatgcggtaatcgccaagctggaggaattgcctgaatga

SEQ ID NO: 73747 - DNA, 1671 bp, Marinobacter sp. ES-1
atgatcgccgtaggtgattggcaaccggcggatgggctgacgctcgaacccaatgccttgcgtgccgcacgggaaacagagcgttgtcttgcgctgacagccgggccaggtgcaggcaaaacagaaatgcttgcacagcgcgccgactttctgttgcgcacaggaacctgtcgctacccgaaacggatactggccatctcattcaaggtcgatgccagcaaaaacctgaaggagcgcgtgcaacgccgttgtggttccgatctggcagcacgtttcgacagctacaccttccatgctttcgccaagcggatcatcgaccgtttccggccggtgctgaccggacgggatgccctcgacgtcaactaccaaatcggcgaccggagagtgacacgacggcagatcgaattcagcgacctggtgcccctggccatccagatactcaatacatccgtcgtggcccgcaacgccgtccgtcagacctacagcgatgtctttctggacgaattccaggattgcaccgaccagcaatacgcgctggtgaaactcgcgttccagggcacggctatccgtctgacggcagtcggcgacaccaagcaaaagatcatgggatgggcaggtgcgcttgatggcatcttccaaaccttcgcagcggactttgctgctgaaccactcaatatgtatcgcaacttccgctctaagcctcgcctgctgcgtatgcagaacgaaatcattaaggtgatggaccccacctccgtcatgcctgatgaacaactcgcaggtgaggaaggtcagatattcgcatggcaatttccaaatagtcaggaagaagccgagtatctggcagactcaatcaatacatggatcaaccatgagcagcttccaccttcggaaatcgcaatcctgatcgtccggcaacctgacctctatggcgaccacctaattcaagcgttggagcagcggcgcattccctttcgcaatgagcaacaactccaagatatctctgtcgagccagccgcaaggcttatcgtcgattatctgtccattctatatgggcagcgagaaccaaaagcctggattcgattgatggcacaactcatccctttcgctgacgatgatgcacagtccagcgtgcgaagagatttccagaactttattgctggtcagaggaaaagtgtcgtacagagcgtactattaggtgaaccatttgcggactggtgggattttgttcgcgccttcttaagcaaagtgggcatcgagactctgtctgcactttcccatgattacgagtcaaaagcgagactagtgcaagtcgtcaacgacaccaagacccgcgtagatgaactattaaagtcggaacccaatttgcccaaggcactggagcgtttttccgacgatcaggctgtgcgtcttttgaccatccacaagagcaaggggctcgaattcgatacggttgtcattcttggcgttgaaaatcagtctttctggggggaggaagatgcggagcgttgtgctttttttgttggcgtttcccgggccaagaaacggttgatgttgaccgttagtgatcgtcgagacaccccaccatccaaccctcgcagatggaaggaaaacaggacgtctcactctgaatttttaggctatgccatgccttttctcagccttggtcggtag

SEQ ID NO: 73748 - DNA, 1797 bp, Acinetobacter sp. COS3
atgcatttaaaaaatttaataatcaaaaattttagaaattttgaattaattgatattcccttgagcagtaatgtggtgctgctgggggagaatcgtgtaggaaagagtaatttactatttgctatgcgcttagtaatagatcaaacacttccagattcagctagacaattaaaaatatcagatttttgggatggctctgatttatctaaaaagccacaaattgagattcatttggattttacagattttgaaaaagacccttatctaacggcactattaacagattatagacttgcaggtgattataaaactgttcgtttaagctatatatttagatgtaagtctgaggttactagtttaccgacaagtagtgaagattttgagtttattatctgtggcggcggagatgaaaacagggtacttaacaaccaagtaagaagaagaatttctttggatttacttgatgcattacgtgatgcagaaaatcaacttggctcttggagaaactcccctttacgccccctccttgaggatgctgtggcatcgattggatccactgaattaacaaaagtttcaactgacttagaggcagcaaatacgaaaattattgaacaaccttcaattaaagcactgaatgcctctctaagtaaaaaaatcttaagtctttcaggtaaaggacatgatttaaaaacatccctacggttttccaatgctgatccattacgattatttcgatcacttggtatgtatattgatgaaggaaaacgcaatattactgaagcaagtttagggtcagccaatgtcatgttgatggctttgaaactacaagaattttcatggcgtaaagcaagaaatgaaaggaattattctctattatgcatagaagaacctgaagctcatctacatcctcaacttcaacgtgctgtttttaaaaatattttcaaagaaaaagatgcctcgcaagaactcattattactagtcattcaccaacattagcatccattgtgcctttacgttctattgttaatttaaggtcttgcggaactagtacaaaagcattttcattagctcacttaccaataaatgatgatgaaaaagatgatatagaaagatatttaatagccactcgctctgagatactgtttactaaagggattatttttgttgaaggtgatgctgaagaagctttaatcccaagttttgcagaaatattaggatatgacttagatgggctcggtatcactatatgtaatgttgcaggtactaactttaatccatatatcaaattagctgaaggcttaggtataccttttgctgtaatcactgattgggatccactagatggaaaaaagcctgcacttggaagagcaagatgtttaggaatttgggattctcgctgcgaagttaatcctacgcttaaaaaaattgaagaaattgatcgtaaaaactttgaagaaacatgtaaatttgatgagtttagagaaatatgggctaaattcggatgtttcctcaataatgaaacatttgaggttgctatagctcaaacagccaatttaagtaatgtactattagaaattttagatgaacaaggttttggatcaacgcgtacaaaacgtattaatgaatggaaattagatcccaataaaatagatagtgcacagctacttgctatggttaaggatattggtaaagggcgcttaagtggaaaattaaaaaagaaaatatctggtaagaaacttatacaagttcctaaatatattcaggatgcaattgagtatatggtgaaaaatgtctaa

SEQ ID NO: 73749 - DNA, 1782 bp, Acinetobacter sp. COS3
atgtctaatcacactactttaaaaaaagccttagcagaattagagaaaaataaagagcaatttgaagcagtgcattgtaagacgcattgtgtcgttttagctggtcctggtagtgggaaaacaaaaactctcacgacagctattgctcgtactcttaaggaagaagttattgctccaagagctattgcatgtataacttataataatgaatgtgcaatcgaacttgaaactcggttatcaaaactcggggttgatactactggtacaaattttattggtacagtacacagctttgcattaacacaaataataatgccttattctcgttgtgtagaaagcaatatccctcaagactttaaagtggcagatttaaaagaatgccgtatagcgatagaaaatgcctataaaaaaatataccaagattctggggatccctataaacaatgggagtttgctaaagaaaaacgaaatcgtgaactggatcggacactccctatttggaaaggtcataataaagaactagctgaatttattgaggaatatgagcaggaactgagaaaaaaagggcttattgattttgatgatatgcctcttatagcatttagaatgattaaagagaatccatggatttgtgatgctatagaagctcgatttccgattttgtttgtagatgaataccaagatctaggtcatggacttcatgaattggttcaactactctgttttgatggaaatgttcggttatttgcagtgggagatgcagatcaatcaatttatgggtttactggtgcaaatccagaattactgcaaagtttgactctacggcaagatgtccaaacatttcaattaaaatttaattatcgttcaggaacaaaaattgtcaaagcatcttcagcagcacttaatgaaaataggcattatgaaagtcctgaagatactcctgaaggagaaataaaatttcaccccgtaaatggggggttagaagaacaagcttatttcattgtaaataaactattagcagagctaaatagaaagggttttaaaaatgaaaatattgcaattttatatagagctgcttggctaggtgacaaaattgtagaagctttagaagaccagcaattaccatatcatagaactgatggtaattctttaattaaaagaagttcaaagtttgcccgttttattgaagattgcgcaaaatgggtaactgggggatggaaagatgcggaaccaccctttagaaagttacacaaccaagctttaattattgtttatggtcatcactatactaaaaatgaagaacaacaactagcacttcagcttattgattttcttcagaatagtagatctataacagaaactgccaatgaatggttattgcgctttaaccaagaattagtaaagccttggatggcagtttgccgtaataacttgcaagaatgggaaatatgctcagagttattagaaaaaacctcccccacatccaataaagacatgtctcttgatctgtttgctggaaaaactgaaggaactggcagaataatacttactacttttcatagttctaaaggccgtgaatttgatactgtgattctttttggagttaataataatgttatacctagctcaagagacaagacatcccccaaagcattaaaagaaacaagaaggcttttttatgtagcagttacgcgtcctaaaaatacattacacttagtctttcaaaaaaataatcattctgatttcgtagctgatttctctcaaagatgtgaacaagaatag

SEQ ID NO: 73750 - DNA, 1824 bp, Corynebacterium sp. KPL1824
atgttgactgatgccgatgctgctaagggtatgtggttggagagtgctcggattaaggggtttaggtcttgcgagaaaacggaggtggaattttgtcccgatcttacccttttggtcggtgaaaacaacgcgggtaaatctaacatcatcgatgcgcttcgcctagcaacggctccactgagtggaagacgaacgaggttcttcgagattgatgacccttcattcggagctggggtcaacccagacatcgagcttgtttatacagaaggggacgaattccagcaggcattattcatcggagctttggacctacaaagcaagaagattcaccatcatgttcgctatttttcaccgacagatcggtacccgcggggtcggacagaacgcttggcaggactcgttgcgtcacccgatcctgaatcggaggtgcgctcgaagatcaaccatgtgtacctcgagccactgcgtgatgcgaagcgtgagttggattctgccaacgggcggcgcttggggtctgtcttacgctacttgcttgatgagaaggagcgtgaggaattcctgcaaagtgcccatactgccaccgagcagctttccggaagtggtgcaatccaaggggtaagtaagaagattcaggaacacctttcttctcttaccgatgctgtccgagggcaacaggtagcgcttggctttgagaagccttcgctcgatcatcttgcacgaggtttgcgcctcaagatggcggagaaagggatagatgtaactaatctcgcatcgtccggattgggctatgccaacctattattcatgtcgacaattttgcttgagctgcaagaggcaaaccaatcagagctcacccttctcttagtggaggagccggaagcgcatttacatccgcagctccaaggtgttctgcttgatttcctcctcgagcaagccgaagagtccgtaaaatcggcgaaagagggacgtcccgcaggtcgaattcaggttatcacgacgactcattctcccaacttggccagctcggttggtatcgaaaggactgtcgttattcggtcagctaaacgcgataatcgaaggagctcagtcgcgcttgcgctgaagcagatagaattcgcaaacgacaacgatcgtcggaaaatcgatcaatacttggacgtgactcggtctgatctcctgtttactcagagggttatcctagtcgagggaatttctgaggcagtgttgctccccgcgcttgctaggcactgcgtgttcgatagaagcgaccctgaacagttaaaacggcttcgccgcttcaacgccacgccgatcgttaatcttggatcggttgactttcgcccgtatctgacactgctcttgtatgacttcggcgaagggatgcatatcgcagacaaggtggttgtacttacagatgaagacccaactcttgaaggttcagaggctaagagttttaacagagccgaggaactcgagagcattgctacgaagttgaaggccgaagacatcctaacggtgaagacaacagaatataccttggaagccacccttttaaccggtgcgagtgagaacgcccaactcctcaggaaagcattcttacaacagcacccgaagtcacattgcaagtgggatgcaatccaagatgcgcaagaaccaggcagggagatgtaccgcagacttcaatccaagaagggcgccgatggcttggatataagtaaggggcagtttgctcatgacatcgctctcgctatcgctgagcctggagtggttttcaaatgtccaactcagctcaaagaaacgatcgaggcagcagctgaagactga

SEQ ID NO: 73751 - DNA, 1683 bp, Corynebacterium sp. KPL1824
atgagtctcgagttcacatcgtcgcaaaagtcgttaatcgagtcggagtctggcggcttctttgaggcatgtccgggtgcaggtaagacgcaaaccatcgttgaacggtttgcaaggcgtgctgactcggaagactcgcggtgcggtaccgccttggttacctttactaacgccgctgccgaggaagtacagaggagatgcgcccacaaacccaaactacttcaagcaccgaacttcgttggtactatcgatagttttatcaataggttttttgttacgccattctacaaagcggaatacggcaaagctcctaagttttgggattcttggagcagttttgactcggctgatgtggtgataaaaggccggtgtccagtgcctttagatcactttcaattcgacaatgatcgggcaaagctgcggaaaagacacattcaaggctattcacagtctcaaatttgcgagttggagtcgcaggcgtataccaaatggacgcaatttgttaggtcagggcacctcgatgcggacacagcgagactcttggcgagaacagagattgaagaaaacaagtacggaatagtagagctactagctaaacgatttgaggaggttattgtcgacgaagttcaagactgcaactccgtcgatcttctggtactaaagtctctgagagatgcgggaattcgtcttatttctgtcggagacctagaccagtccatctacgagtttagaggtacctcggcgccagaagttagcaatttcttgcagtcgacggatcctcagccccgtatcgatacaaattttcgtagctccccggctatttgcaaagtcgtgaatagtttacgtgcggggtcgacccgcgacacttcagggggagaggtctcgacctacgatgctcccgttcatctcatcggttaccaacatctctcggagatcggaccattggtcgagcgagtgattgatcaatacccggaattggagaaaccggtatttctggcgcacagcacaaataatgcagccctcgctgctggtggtcgtagcaaaggtaagtcgtcaaaaaataaaattgtagcgctagcgaaggcatccagtctgctcttggactcttcttcgacttcggcgaaaaggactaaagcgctccgagaaaccggaattttgctgcagcggctgaatcccgacaagcagctgtctacagctgaggaagaggattatcttgagaatctcaggctgagcaagagttcgtaccatgaactgtgtttgaggctcgttgtgacagtaggaaatccttcagagcagtccagcagcacgtacagaaagaaacttatccaggctgcagaaggagtcgggatttcgctcgatcgtggccgtatgaagacaccaaaggccgatgtctggccctgggttggtacaccggcagccaagcatcaatatgagcattcaacagttcacggtttcaaagggttggaggcaaactcagtcgtcctagtcattccacacgacagccggacgagagacaccattcgtgactggaaagaaggaaaaggctctgaagcgagaagagtcctttatgtaggcgcatcgagggctaaacgattactcattcttgccgtgcacaagaaacacagagaagacgtgaagcaaatcctagagagagatgacgttcctcttgcggtgtctgggtag

SEQ ID NO: 73752 - DNA, 1782 bp, Prevotella sp. BV3P1
atgtatttgagtagtttgcatatcagacagtttagagtatttgatgatattactctctatttcaagaatggaataaatattctgataggagaaaataattcaggtaagactgcaattatagatgctctgcgcatatgtctcggatgtggaaaaccagacaattatatctatattcaagaaagcgatttgcacgtcaattccacagttccaactgaaaacaatacgacaatacaatttgacttgacatttgaatttggagatgctctgattgaaagagaatgtttctatgatttcatatcgcaagataaagaagatccagccaagcaaacaatacaattacatttgaaattcatccaagaaaataatgggaagaaaaaatatttcaaacggatgatatggggtggagataatgaaggacagcaggttccttacgaatctttgcaagaaatcttttatacatatttaagtccactaagagatgctgtaagctgtctacgtccttattcttacgacaataagacatctcaattatttaatcaacttacaaaatacaataaaggagaggaagagattgagttaaatgaagaaagaaaagatttgctcgctaaaaacttgtaccatgtttttgaagatgacgcttcggattggaaacatattctaacaacaggaaaaagtaaggtcaacgcccatcttgaagggacgggaataactcgcaaacatcctaatatagaaatgcgttatgttgggcggaaattttccgatgtggtacgaggtgtcgaattaaaatgtccggtgtacaaaacgatcgaggatggtcaagaacaaaaatattttgaattgtatcaaaatggattgggcgaaaataatcttatttttacgtctgtggtgttaggtgaccttatcaatagatgcgaagataatgcgctggaaatctataatgcattgctggtagaagaacccgaagcacatttgcatccacaatatcagaatacgttttttgaatatctgaatgaactacaaagcaaaggacttcaagtatttgtaacatcgcactctccgacgattacggcgaaatcggatgttaataatatttcggttttacaacgaaaacaaaacatcgtacaatcattttcatttggtaaattaacggaaagtgattatccggctgagagcaaacggcatctgcgaaagtttttagatacaacaaaagcacagttattttttgctaacggtgtattattggtagaaggtgtcgcagaagcgattattataccaattcttgctaaaaaatttctctctgagaaaatagacttgtgtaaaagtggaatcgaattagttaatattggaggggtcgcattcaatcattttgggttattattcaacaatgatgatgagagcaagcgacttttgtcaaaatgtgcgattattacagacagcgatcccgaagaagataaagacaaatccgacagagcgcaaaaagctaaagatttagagggacaaaacctgaaagtatgtttggctccacatacccttgaatatgacttgtttgagcaatcggaacacaacaagagtataatgcgagatgtatatcgaaaaatgcacgctcaaacaaatgatttaagaggtgattttaatgcctctactttaatgaaaaaactcaaatctaataaggataaagcggaatttgccttacaactctgtgatagattagaaactgaagtagcgttcgatgtacctgattatataaaggatgctattttgtttgtagcaccctcagaataa

SEQ ID NO: 73753 - DNA, 1782 bp, Prevotella sp. BV3P1
atggatattcaattatcagcacaacaacaagctgttgttgattgtaacgagccgagaattgtcgtgaaagcttgtccgggaagtggaaagactttctctgtggctgcgcgtatggcaaaacttttacaagagaataatctatcgagacatcaaggaattgcagccatatcttttaccaacaccgcatgtgaggttatacaaaaagaacttaaagagacattcggttgtcgaaatatagattatccttcatttatagggacgattgatagttttataaatacgtacatatttttgccttatgctcatttagtcatgggatgcaattatcgtcctgaaatagtaggaaccacgtttaacaaatggttcgattatgatccgacccaaacaagatatattagaggtaagcttggtgaacgaataattacatctcgtgatgccaactactatttcgatctcatatcgtttgggcttaatgatcaattattgcgattggccccatatcaggcatatcatttcggaaaagcagattgggataatcccaataagaaagatggttcacccaaaaaggttatatctgaattgaaagaaatgaaatggaaacatttcaatgcaggcaaggtcaatcaggcagatgcaatatattttacattcagaatattagataaatatccttcaatagcacaaaatattgttcgtcgattcccgattttaataattgatgaagctcaagacacaacagagttgcaaatggctataattgataaattatctcagtgcggagcagaatctattatgttgattggggatcctgaccaagctatttttgaatggaatactgccaatccacatttatttatggagaaatacaatagtccagattggcattcattagatctgtcggaaaatagacgtagctccgaaaaaatatgtcaattagctaatcatttctctggaaatgaaatgtgttcaatagcaagcgacaaagattacacagacgagccatgtattaaaggtcatctcgacactccagaatcagtcaatcaaattacgaatcatttcatcgaaaaatgcaatgagatgggattggatgaatctgaatatgcagttgtatttcgaggacaaaagtttggcgagacaaactttggattagtaaacaatgataattcatcaagacagaatagtccgtggataaacgggcattacggcgttagagatattgtatatggaaaatatttgattgatcatgggaaatatactgacggactatctcttatagaaaaaggctgctataaaatcacaaagcgagttcggtatgtttcctcaagtactatgcgaagagaaatagcggaagtagggtttagaagacatagagcagagatgtttgattttattcaaaaattaccttcaacgaatgatacactgtctaattggattacgaaacttcaacaaatgggcataaatctaactgttgatttgggaaaggctaatgtccgtattgaatccctttttagaacagtaaatcatcaatttcggcaagaacgaccttacctgaaaacaattcattcggtaaaaggtatgacattagaggctattttagtatttctgtctaaaaaagctgtccacacgaactatacaacgattttgaataatcctgcaaagtattctgttgacaataatgaagaactccgcattgtgtatgttgcatgtacacgacctaagaaattgttatggatagccgttccatcagacgatattgattgttggagaaataaattgttctaa

SEQ ID NO: 73754 - DNA, 1860 bp, Rothia aeria F0184
atgagcatttatctttcgaaagttagtctcgttaattttcgtaactttaagaatgctgttttaagattcaatccaggggttaatacaattattggcgaaaatggtgctggaaagacaaatattttccacgcaatccgtctactcctagatgatactttgcctaatagctactcatactttaccgaaaaagattttaacagaggtattggtgattggaaaggtcactggataataatccgtctagaatttacagaaggattaaataatgaaagtgtgtatagcgaaaaaattatttccttgctcacacacttctgtggtgaaaaaaatccaaatgaaccaaaatcctattcgtgttctttggtttttcgcccaaactataacatccggaaagagctgtttgaagcaaatgggaaagcggaagatatatccagcattttagagggaatctcactcgaagattatgaggttgttcgtttcggaaagggagaatctgacttttttaatggggaagactataaatctatcgttggtaattttgaaaataattattttgctaatcctgacatacaagaagagagttgttggttaggaactaagactactagtatattttcacttcaaagagaatttaatacggcatatatcgacgctctgagggatgttcaacgcttatttaggggtctaaagcgaaatcctctgcgtagtattttagaatctaagagcacgtctatagataagagcgattcgtttgctgaggttgtggatattgctataaatttaaataatcaaataaatatggatcaagacgtgaaaaatcttgcggatgagatatcaggtatctacagagagacggctggaattacatacgcacctggtgatataagcattaagtcacaactgcccacggatgttagcagcctatttcaatcactatcattgtatattgggaatccgacggaattaaataaatattatcaaggatcaatagatgagctgagtcttggtaatgctaacatgctatatatttctctcaagcttttggagtttaaaatccgccaaaatggaaagccaaagaatcgtgctcctattgcaaatatacttttgattgaagagcctgaatcgcatatacatcctcatatccagaaagtaatttttaataatattggggggatgagtgaaactcaagtaatttattcaactcactcaccgcaaatttctgaagttagcaatgtagaaaatgttaatgtaattgttccattggagggggaatcatggatctcctgtaatccaggaaataagctggggaaagataaaatagtccctatcaatagatttcttgatgttacccgatgcaatcttttattctctcgtggggttattcttgttgaaggtgatgctgaggaaataatgattccatatatgattaaaattgtttatggcatttctttggacgagataggaattagtgtaattaataatcgtggaactgagtttgacaatctagcatcaatgtttcatcgtgaccgactgcgtaaaaggtgtgcaattgttacggatttagacggccgattgaataataaatattcttctgatgatgcagctacgcaggggaagaatcgattaaatcatctcaataatgaatataaaaataacgaatatgttgatgtgttttatgcagaatatacctttgaggttgattttgcgcttgaaagcaagaataatagaatgcaattaatccaaatggcagaaaaaaatatgcacatcaaaaatcccggattgatattgccaaaaaatttaggtctaccgataaagataatatcgcaaaggcagctttggacttggttcacaaagatgacttag

SEQ ID NO: 73755 - DNA, 1809 bp, Rothia aeria F0184
atgatggtgggtcaaatgttgaataaattggacaatgaacaagaagctgcaattaatgctgtaggaaacgttttattaattgcatgtccagggagcggaaaaacccatacgcttgtaaacaaagttgcaaaagaactctctgcgatagaaactcaccgcgaatttataattgctattacatatacaaataatgcggcagaagagatgaaaatccgcataaaaaaaatgggaattgacgtaagtcagctttgggttggcacgatacatagtttttgtcttgaatggattttaagaccctactccatgtatacagaatcactgtcggggaaatttgaaattatagatgaaaaaaagcaggaattaattattgagaaatttatgccagaaaatttttccagaaaagatctagacaatgtaaaaaaatttctaaacgattacagggttcataaaattgctggtgaatttctctcgggtggtgatttcaaggatagaaacatggaaaaatgcgttgaaaagtatcgtgagtacctaaataataataatatggttgacttccattctattttagagtattcacttgaaattttaagctgcaacaattttatttcagaaaatcttagtaatatattcccccttatcgcaattgatgaatatcaagatacaaacatcctgcaatatttgatattgtcgaagattgctaagggtggaaaaactagactctttgttgttggtgatcctaatcaaggaatttatacaaatacggaaaatgtaatatttggaaaatctgatttggagagattgatgggaggtgggtttgctgagcatgtattaataaataattatcgttcttcttcaaaaatcgtcgaatattcaaaaaagtacatggttgaacgtgtggacatggtttcaagtggtaatctttgtggatataattcagagattaggtatcttaactatcttgagaaagacatagatgattttgatatatctgagaagattaaggagattgtagaatataatattaatattctaaatatagacccctcggaaatatgtatccttgctccttggtggagtcatttggcgcctctagcccaaagcttgggggataagctcccaaatatttccgtagatggagttagggcgtcagcgttttgggatgttaagaaaaatgtatggtacaaaatctcaaggttggcatttactgagccatctatagaactataccgaaaaagattattttgggctcaagaatttctggaccagattgctaaagattttggatatgtgaacaatctaattgcccctatagatcttttagatgtatcaaatgaaattaggtccattcttgctgaaaaatggattggaaatcaacgtgcagaatcatatctgagagatttctttaaacaaatcatagagtatatggaagtaaaacctccggttttaaacatgctcgaagagtctgtgaacttattttttgaggggttcaggtgtaaggttgaatctgtgaagaatattgatataggttcactcgaagcctgtaaaaaggtttttaatccgggtcagggtataaaaatttcgacaatacatggagttaaaggagaagagtatgacactgtgattctctttgctgctttgaatgggtttatacctcactatacggtgccagcaaataaagcgaaaaataatgccaaaaaactcctatatgttacagcaagtagggcgcgaaaaaatctttggattatatcggaaaaacgagaattttatgggtcttgcaagcttccttgtgaatatgttgaaaagccatga

SEQ ID NO: 73756 - DNA, 2190 bp, Enterococcus faecium BM4538; identical to SEQ ID NO: 71696

SEQ ID NO: 73757 - DNA, 1794 bp, Enterococcus faecium BM4538; identical to SEQ ID NO: 71697

SEQ ID NO: 73758 - DNA, 2190 bp, Enterococcus faecium NEF1; identical to SEQ ID NO: 71696

SEQ ID NO: 73759 - DNA, 1794 bp, Enterococcus faecium NEF1; identical to SEQ ID NO: 71697

SEQ ID NO: 73760 - DNA, 2190 bp, Enterococcus faecium 10/96A; identical to SEQ ID NO: 71982

SEQ ID NO: 73761 - DNA, 1794 bp, Enterococcus faecium 10/96A; identical to SEQ ID NO: 71697

SEQ ID NO: 73762 - DNA, 1779 bp, Fusobacterium nucleatum CTI-5
atgtctgatttttatataaaaaaaatagagattaaaaattttagaaattttgaaaatatttcatttcaaacaaaagaaaaaaatgtaattattgggatgaatgatgtaggaaaaactaatttattatatgcaataaaattggtattcagttataaatttagaaatattgatttactagacagtgattttcataaacaaaatatttctaaaccttttgaaatttttatatctatgcaaatttttgataaagaaaaagaagaaaaaagtgattttacagaaataattctttcagaaataggtaatttaagaaataaggaaaatggtgagcaaaaccttttgaatataaagttagttggagaatatcaaaatggaatatcaatgttttggaatgttagtgaaaaaatgacaaaagatgatatggatgaaattccagcagtaggagcaagtaaaaatagaatagattctatttttgaaatttttgatatcccaccttataatgatatagaaaaaaaattcctagaaattagccgaaaaattgttaataatatggaaataagtgaaacagaaaaagaaaaatatacagaaatagaaaatttacaaaatactttaaaagaaaatatagaagaacttgactcagtaaaaaaaatagatgaagaaataacaaactcattaaaaaaatttaatgtttcctatgaaattaaggtagctacaacattagggttaaaaagaatttatgatgatttaaaaatatttacaaaacaagataatgaagatagaatatatccaacagctggggatggaagaaaaaagacaattcagtatgcaatgtatttatatgaaatagaacaacaacataaaaaaatccctattatattattagaagagcctgaaaatcatttatttttaaggaatcaaattagtttatcaaatactttttttaatagtgattttttttgcaatatatttttatctactcattctccacaattgctttataaaatttcaaatggggttaatataatcagaatagataaaaaaaataatcaagctacttctaatagttcagtttatactttaccagaagaatataatagcttaaaaaatattcttcaaaaggatttatcagaagcacttttttgtaaaaaagttctattagttgagggatattcagaaaaaatattatttgaatatatattagataaaaagataaaagatatagaaagaagagctgaaatttatattttaaatattataggagttggttttaaaagctattatgattttttaaagaaattaaatattgatgtgagattaaaaacagataatgatttaaaaaatacacagataaacatagaaatatcaggtataaaaagaatagcagaaatattaggagttaaagttgaaaataaatttatagaatttttaaaagataaaaaaattaataataagaaagatgaaagtattagtgagaaaaaaaatagaatagatataactagagaagtttataattttgctaaaaagataggaattatttcagaatttgaagaacaaaaatgttatttgtctgaagtagattttgaaaatgacttagcaaaagtagttttaactaatactgaagaacaaaataaaatgattacttttttacaaagaagtaaatgggctcatctttttgaggaaaaatattacaaacaaattttttcagaagaaagcattgaaaaaatagtagaatctgaatattttaaatgtataaaagacttaatcaatgatgaaagagagtaa

SEQ ID NO: 73763 - DNA, 1347 bp, Fusobacterium nucleatum CTI-5
atgaatttttcaaaggaacaaaatgaaattttaaatttaccatttgatcaaaatattattgtaaatgcttgtgctggatctgggaagactacgatactaattgaaagagttaaaagacatttttataatataaaaaaagagtataaaaaaatagtaattttagtttttaataatgctataaaagaagagataagtcttcaaataaaagaaaaaaatttatttcaagtagaagtctcaacatttcataatttttttatacatcatatattgccattttcaaataaaataaagttgaatatgtttaaaaattttgatttaaagtatcgttatgaatgtaaaatagaaaattttgaagaatggaaagcaacatttgaagagaataaaatagttacttcttcaaaagaccctaaaaaagattttttattagaatatatattaaaaatattggaaaataataaaagttgtcaagaatatataaaatcaaaatttgagtgtatgtatattgatgaagcacaagataataatgaaattcaatataaatttatagaaatttttttaacattaggaattaatatttttatggtaggggatccaagtcaatctctttattcttttagaggtgctaattcaaaagtattcttagattatgaaaatagagaagattttatttctaagaaacttaaccaaaattttaggagtcatccatttataaatgaatttgcaaataattatagttttaattttttaagagaacaagatacaataaattttatagaagatgtgtcagaagcagaaaaagaagtcactgaattaaccgtattaagaagtaagggtgaagattgtaaaaaatatgagcaaaaaggttatagttatataaaaacaccaagtatgccatcagaaatagataatgtacaattagttaccttacttctagaagaatatttcactacaaaaaatgctataaaatttttaaaaaaaataacaaatatggaagattcattttttaagtacaaaaataaactaactaacttttttaaaaatcctacaaatgaaaatttaaaaattttaaacaccaatgtattttcaaaaataaattggttattatcagaaacagaaatagattatattgtagaagaaataaaaaatgaaaattttaaggattattataatttatatgaaaaagaaaaaatagttatgactatacatatttccaaaggtcttcaatttgacaatattttaatacataaaaaagatttttataatagaagaggagaactagaaaaagaaaagttttatgtagcttgtacaagagctaaaaagaagctttttattataggagatgattaa

SEQ ID NO: 73764 - DNA, 2076 bp, Fusobacterium nucleatum CTI-3; identical to SEQ ID NO: 72422

SEQ ID NO: 73765 - DNA, 1902 bp, Fusobacterium nucleatum CTI-3; identical to SEQ ID NO: 72423

SEQ ID NO: 73766 - DNA, 2076 bp, Fusobacterium nucleatum CTI-1; identical to SEQ ID NO: 72066

SEQ ID NO: 73767 - DNA, 1902 bp, Fusobacterium nucleatum CTI-1; identical to SEQ ID NO: 72067

SEQ ID NO: 73768 - DNA, 2070 bp, Streptococcus sp. I-G2
atgaagttaacaaaaatggttattaataattttagatcttttggggagtgtcaagcaattaactttaataatcaaactgtactgatagggaataatagttcaggaaagacaagtgtattacaggcattgagtaaattattttcagataaacaaagtgatagaatcattcgaaaaagtgattttcatttaccaaaagggttaagacctggtgaaaacacaagaaatctttttatagaaactatttttgagtttgatgaacttgatggaacggtctatggaccagccattccaacatttttcgagcacttttcagtttctcaagatggtgcaaaaccttttttacgaatcagattagaatcctcctgggaagatgatggaacagttgaaggaagtattgatactcaaatttattatatttcatctgatgaagatactattagagatgaagacaaacatcgtgctcctagaaaggatttggataaaattagggtactttatgtacctgcttcaagaacgcctgagaaggagttgggtaatgcttcaggtagtatgttaagtaggttggtaaatagtataaattggaccgaagatgagataaatgaaattacagataaaattgatgagttgaataacacctttttatctgaaaatggagcattgactcagatcaacaatgagattcagaaatcatgggaattatatcatgaagataaccgtttttctcaagcagagttgattattaattcttctgagatggcggcagcacttagacagattaccttaaaattttcaccaacaaccactgaagaagcatttacagtttcagatctaggagatggactgagatctattttttatttttcacttgttgattcgatacttgatattgagttagaaattaccaaagaccgtgaagaaaatcctgataatccaagatttaagttgattccaccagtactaactatcctagcaatagaagaaccagaaaatcatattgctccacatcacattggaaaactgataaaaaggtttaagcaattaggcaataatgacaactctcaagtaattttaacgtcacattctccagctattgtaaaaagaattgacccagaagatttgaagtatttaagaatagaaaataatgacagagttcttcaaaccattgtttctgatatacagctacctccagctatagatgaatcttataaatatattaaaggagcaattcaagcttatcctgaactatattttgcgaagttaatagttctaggtgaaggcgacagtgaggaactgctattaccaaagttttttgatttacttgggaaagaggtagatagttctcagatttcaattgtccctttagggggcagacatgtcaactatttttggaaattattaaatgctctcagaattcctcatattaccttgttggattttgataatgagagatacggtggcggttggggaagaataaaatatatttctgaatatttgtatgagttgaacacagagttccgagaatggttccgtactcagggacttgatttcagtgagattggagaacgagagtttgaatcaatagatgcaccacgcctgaataattggtttaataaactcgaagaatttaatgtctacttttcatctcctttagatattgatttcttgatgctacaacattataaagacaattatctgaatactttatcctcaatagaaggaccagttgtttcatataatgattcggatggaagtagtaaaaaagtgaaattgagtgatttagactgtcttgatagattgcagttagaaggtttcaacaaacgtaaagaggaagcaataagagctactttaaaagataagagtgggtcaggtgatagttttactgaagaggaaaagaaactcatgatttggtatcaatatttctttttaggtagaggaaaaccaacaactcacatgcaatttttatcatctattagtgataatgaattaaaaagatttctacctcctgtgtttgaaaaaatggttaaacgtgctgaagaattacttggagttattgaacatgatgaagaatga

SEQ ID NO: 73769 - DNA, 1815 bp, Streptococcus sp. I-G2
atgatgaagaatgaagagtggcatcctaaagtagatattaatttagagaaggctgctttaggagctgccaaggatgtgaccaactgtctagtcattgctggaccaggtgctggaaaaactgaattattagctcaaaagttagactatcttttctctacaaataaatgtatttctccgaaaaaaattttagcattaagttttaagacagatgctgcatcaaatttgaaagaaagagtgaaaaaacgttatggggctgaatatgcttctcgatttacctctctaacttattcagcatttgaaaagaggattttagaccaatttagaaatgttcttcctggagagataagaccgtcgaaagattatttgattgaagaaatggaagtcataaaagaggttctttatagaaatggattaaatactactggaatgaggatgaatagcattaaggaaattgcagaaagtattgctttgagtgataatgatccaattataaaaaatgatctgttaaaaggtactcagagtaataagccagtccttttttacagacaaataacaaagttggctactcaaataatagctaataacgaatacgtctgtaaagcacttcgaatgacatatgaatttgtatttttagatgaatttcaggatactacgtatgaccagtataatttattaaaaatatgttttttagattcgacttgtaaattgactgcagtaggtgataataatcaagccattatgagatgggcaggtgcaaagcctgatatttttccagactatattcgagactttaattcaaataaatatcaattattgatgaatcaccgctctgtacctaaacttgtagaatttcaaaaagaggttcatcagatattaaatagtaatcatagatctattcagacaaataattatccagaatttcaagagggtgaaataacattatttgaatttgaaaatgaaagtttagaagctgagttaattgcaaatgatatagaatcaaaaattcaaggaggtatacgaccatcagaaatttgtatcctagcaaaacagaaggttgatgattatagttcaaaattgataactacattaaacagtaaagggattaaagcaagaattgaaaatgaatatcaggagcttttaaaagaccctacttgtaacctattattagatttaatatcatgtagtcaaggaaaacgagatcctttaatttgggaaaatattagtaatttttatggaaatatcaatggaatagatgaatttactgatgatttaattttagcaaaatcctataaggagattgacaatatagttagggatattacttacctaatttcaaattttattcccaatgaagaaagtatgctaaaattaattgattgtattattgaaaaaatagatgaaaaaagaattatttccaatttttcaacatacaatggaaaaagtgacctagatatcattgtcaagaacttttcaaagttattatacatagaatattctcaaacacaaggtgaatggctagatacagtctctagtttcaagggtgaaaactcaattccaattatgactatccataagagtaaaggattagaatatgaggtagtctattttctaggcttggaggattctgcattctggagttttaatgatcaaccggaagaagataaaagtgcgttctttgtcgcactttcaagagcaaaaagtcacttaatattcacatactgtaaattgagaaataatagtccgcaaaataatagaaatattaatgagatatattcattgttgactcaatccaatttagttgatgttattaattaa

SEQ ID NO: 73770 - DNA, 1716 bp, Lactococcus lactis subsp. lactis KLDS 4.0325
atgaaatttcagtcattacaggtaaaaaacttcagaagttttgaagatataagcattgacctatcaaataagaatgtatttttcgggcttaatgatgtcggaaaaacaaatcttctgacagctttgcgatttgtttttgatagagatactcgcagaaatgattttatggactcagactactttgagaagaaaacggaaataccaattgaaattttggttaccgttgatattagtgataacaatgaggacagctctaaattgcgtgcgaggcttagaggagcaattttatctgggcaagacttaatatacatacgattaatagcgaaatatgataactctgaaatggttggagttgctgaactattttggggtggagataaagaaaatcttcaggaaatcaaacctaggggaacccgttttgatattgatgatgtatttaacgttttttacatagattcttatgttgatatggatgttctttttaaacgaaatatcaagaagtttatccaaagtgatacagaggacgacaaggctatcaatgactctataaattctatcgtagatgaactgaacgaaaaaatttcaagcctttctggagtttcagattttgagtcgaagataacccctacttaccaaaaattcaatgatgaaaacatctcaatttcaattaaatctgaaattgcagtaaagggactctattctaatattgtcccttacatgaagaaaaaagacgatgataatatttatccaacggcaggagaaggcagaaaaaagcttgttgtgtactctttatttacacttttagcggagcaagaagcagataaaaaaataaatttatttcttgtagaggagcctgaaaataatcttcataaatctttacagatagagttatctcagattctgtttggtaattctgaaagctatccgtatttatttgtttctactcattctccttatattttgtatgaaatgaacaaagtcactttggtacgaatttttgctgagaggagagtgacaagtaaaagtgctttttataatgtaccttctgactttcaagataataagaaaatgcttaaccgcttgctcgcggaagcaatttttgcgaatagggttttgttagtagaaggaccctctgaacaacttttatttgataaagttctttcagtaatcaaaccctattatgaagttaacggaatgtatattctttcagttaatggcatagggttcaaaagctatcgacctattttgaaaaagttggggatccattgcatcattaaaactgataatgatatccaatggcgagcaaacagcggtcaccatgccctaggattttccagagttaataatctagttaatgggacgcttgctgtaaactggagaactactccccttcctacctctaaggaagaatttataaataactctatcggatatagaaaagagctttataatcttgaacaaaatcttcctgtattaaatagcataagagaagattttcatgtctatttatcaaaagttgatttagaaaatgacttagaccaagtccttcatgaaaatcttgttacttatcttggcgataatccagttaagtatcttcaagcagctaaaaataatcacatggttgagctcattgagaaattaaatgatgaagactgcagagaagtatatgaacattataattttgcttgtctaaaggatttggtagaatggaattaa

SEQ ID NO: 73771 - DNA, 1506 bp, Lactococcus lactis subsp. lactis KLDS 4.0325
atggaattaacagatactcagaaaaaaattgttgacactgcaggcaacttgattgttagagcaagtgcgggcactggaaaaacacatacaatggtcgcaaaaattgcgaaagaaatagacgagaatagggatcatcgtgttattgcagcaatcacttttacaattaaagccgcacgagaaataaaagaaagactatctgttgatactacaggacattttattggtactaataatagttttgcaatcgaagaagttatcaaaccgtttatgaaagatgcctacggtgtacaatttgattgtgagatgacgactgactatagtctaaaatttgataattacgaagaagggttgaatttcatttctgaaaactgcactttaggaagctatgaggataataataagaattttattttcgaactagctctaaaaatacttagaaagtcagaagtagcacgactgtacctgcaagctaaatatttcaaaatttatgttgacgaatatcaggattgtgatacagcaatgaatgaattttttatgtatttgacagattcattgaccattgacttatttattgttggtgatgacaagcaatccttatatacatggagaggtgctaatcctgaagcattcaagagtattattggcaaaagaaatttcgaaaaattttttatggttgataactttcgttcaaataaacagattcaaaactactcaaatctgctttttgaagagacttccagtctctatgatcaacaaaccagcatagagaatattattttgttaaattgtacggaacaagattggattgaaaaaatcaaatgtttttgggatgcagacaaatcttctgctttgttgagattttctaattcaaatgcgaaaagtgctgctgatattttgtgtgcgcatgatatggatttcaaatttattccgaaagctccaattgaagatatttcaaatgacgcaggatggctctattatgcaatagcacaatatttacttgttgatacctattcggtttttgattttatctatgatatcccttcagggacggaggaagactcgaagattaaaagcaagttggagagatacctacagggtttaaagacaaacgttgttgatgaaaatcaatttaaggaaaaagtttcagagcttgctacatttctaggatatggagctcagcctaaagatttatcagctctttatgaaactatttctacagacagatatattgaaacgttcaaatcagataacatcaaacatagggcgatgacattccattcttcaaaagggttgcaatttgatcaagttatcctgtttgttgaggattataatttgcgagatgaggtaagtttctataaccattatgtggcaactacaagggccaaaagcaaactaatttttattagtatcaaagaaaactatggaacaaggctgttctatcaaaatattgctaaaaggttagaagcaagtggattgacattggataaattggttactatctattag

SEQ ID NO: 73772 - DNA, 1785 bp, Pseudomonas aeruginosa CF77
atgcggatttcacgtgtcaggctagtcaatttcgccaatttctcggacgtggatgtcgagaccggcgacagcatcgtcatcgtgggggagaacaaggtcggcaagagcaacttcattcgtgccctgcaactgatcctcgatccagcattgtccgagcgtgaccggcaattggggcttgagcacttttgggacggcctcggcgcagacaagctcggcgaagccatcgaggtgtcggtcgaccttaccgatttcacggacgatccgcgactgatggcccacctcaacgactgcgtgatcgaggctgggccacccatggtggcgcgcttgacctatcgctttcagccgaaggccggactggccgaggagcccgattcgctgagggactacgagtacgtgatcttcggcggcaacgaccccgagatgcgtatcggcggcgcgctccgtcgcatgttgccgttggacgttcaggttgctttgcgtgatgcggagaaggatcttgcgagctggcgtcactcaccgttgcggccgctcatcgaagaccttgcagcgtcgctcgatgaagacgcccgagaggagattcagcagcaggtcgacgaagcccaacaggaacttgccggtcacaacgaggtaatagaggctgcggaacggatcagcgaaaggctggtcgccctcgcgggagcgcagcatgccgtcccgctaggcctcgggctggcgccgacgcgcgtcgatgccctgttgcgcagcttgcggctgctgatcgacaacggagctcgcggcatcggcgacgcaagtctcgggacggcgaacctgatcttcctggcgctcaagagtctcgaactagaccggctggtgtcggacggcgagcgtgaccacaccttcttcgtagtggaagagcccgaggcgcacctgcatccccacgtccagcggctggtgtatcgctacttcctgggcaccggtgcacagggcgaagaggacgtgcctccgctcacgacgattctgaccacgcactcgccgcatatcgccagtgttgcgccgatacggtcgatcgtcctgcttcgtcacgatgcgtcagaggggaagaccgtggcggtctctacggcgaacgctcctttcactcaacgcgacgaggaagacctgcagcgctacattgatgtgacgcgcggcgaaatcttcttttcacggggcgtcattctggtcgagggcgatgcggagcgcttcctcatcccagcattcgcggaagcgctgggtatcccgctcgacatgctgggaatcacggtgtgttcggtgggcggcaccaacttcactccttacgtgaaactcttggggcctcatggcctaaacatcccgcatgtgatcttgaccgaccgtgacccggtcgacggaaagccgccgcgcgtacgtcggcgcctcgccaatgtcctcgatgtggtcgagccgggcgacgatcacggcgagtgggacgtggacgatgtcctggagcgcgccgtggaactcggatacttcgtcaacgagaacacgctggagcctgaactattcgcaggtggtttggccgagtcgatgcaacaggtgatcgaacgagagttgcctttgaagcgggcaagcttggacgatctgcagtcttgggtggacgatccagatgagcttgatgaagaccgtttgctggcgatgattgagcgcattggtaaggggcggtttgcacaggcgcttgcggtgtcggtatcggatgacacgtgcccggactacattcgctctgcgcttgagtacatccgtgatgccgtcgtctag

SEQ ID NO: 73773 - DNA, 1821 bp, Pseudomonas aeruginosa CF77
atgccgtcgtctagtgtcagctccgcctacctggcgcaggccgcagacctagccggcaatcccggccaacaggcggcatacgactcgcaagggcactgcgtggtgctcgccggaccggggagtggcaagacgaagaccttggtgctgaagctcgcacgcatcttggccgaggacgtccgcgcccctcgtggagccgcatgcattacctacagccaggaatgcgcgcgcgaactgactcgccgcctcgaaggcttgggattgcgagaggcaccaaacctgttcattggcacggtgcatggcttttgcctgcgccatctgctgatgccctacgggcgcttggccaaactgccgattccgtttccattggcggtggcaacgcagcgggtgagcgaccgtttgctgaggcagtcgggggacgcgctcttcgggcccaatcatccgtacaaggccatcgatctggggcggcaccgacgctctgttctcgaccgaaacagcgtcatgtggcgcagcgaggaggagcttgccgcttgggcgatcgcctacgaagcggcgttgcgtaacgagggattaatcgactacgacgacatggtcgtcttcggccagcggctgattgtcgagcacgactgggtgctgccattggtccaggcgaagtttccggtgctcgccgtcgacgagtaccaggacttgggcgtcgcgctgcatcggatcgtcaagcgcctggcgttcgatggcggtgttcgcttattcgcggtaggcgatgcggatcagtcaatctatggtttcacgggggccgacggcggcttgctcacggaactggccgcacgcgacgatattgagcgggtccagcttcagctcaattatcgatcaggtaccagaatcgttaacgcctcggagctggcgttgggcgaagcccgcggttatcgggcgaacgacccgacgcgtcaggcgtccatcgcgttcgtgctgcgtcctgggggcttagcggatcaggccgcgcatgccattgcgcagatcattccggcggctctggcggccaagcccggtcggacgcttggtgatatcgcaatcctctacaaggactaccgcgcaggcgacgtcgttgccgaggtggcgacggccagcggactcgactacatccgggtcgacaatgccgcgccttatcgcaaggtgggcctgacgagttgggtcgaggactgcgcagcctggtgcgcaggcggctggcgcatcgggcggccgcagttgcgtggtttgatcgaacgttatctggctttccgccgtgcgcatctggacgagagccaggccaaacgcgaggggcaagtgctgaccgcgcttttatggtccctgcgccaggatgttcaacctgcgcgtgagttcgttgcagcgcttcggaccggtatcctcgatgacctgctggacgcagagagcgcgctcgccgaccagaaggagcagttggaccgtatgacggcggcactcgcggaaggtggcgcattggcctccctggatatcgtgagcctcggggggcgagatgggtcgccagcgcacctcaatctattgaccttacattcggccaagggctgcgagtacgacgtggtcatcatggtcggtctcgatcttgggaacctgccgtggcgcaatgagagtcccgagaaattgcgcgaaagtcgtcgcctcttctacgtgggcctgacccgcgcccgtgacgaggtccacatgctctattcgggctttgtcgatggtcgattcggcccgatgcggcttggacgctccccgttcttggacgagttggagaatcggatgcggaccgccggcttgcagcagtag

SEQ ID NO: 73774 - DNA, 1959 bp, Pseudomonas aeruginosa C48
atgcacatcgagcgtcttggtttggagaactttcgttgcttcggccctcagcaaacccacgttgtcctaggccctagtctcgtagcgtttgtcggtgataacgggactggcaagactgcagtgatgcaggccttgcagcggatgtttggcgtgacgtcagagcagcgacggttacgcaagcaagacttccatatacccttcaatgaagccgaacggcctttggctcgcacgctggtgattgaagccatcgttgcatttccagaattggatgccgacgcggataaccctgcagtaccagcgttcttcaagaacatggcggccgaggaaaacggcaatctcaaggttcgtctgaggttgcaggcaacatggacagacgacggcaccctagatggagcgatcgaagagtcctactgcactgtacagacttttggtgactttgaagaaagtgacctccagcgacttcgtggtccggaccgttcgcgtatccagctcatctacatacctgcgacgcgagatggtgcctcgcaggtaacctcctttatccgcggccgactttggcgcgcaataagttggtcaccggaggtgaaggactcgttgaccgatgcaggtactgccgtgaatcaggcgttctcagccgaggcggccgtaggcagtatcggctctgcagtgactaggcgatggcggcagcttcattcggctggtaccgataccacgccgttttttcggcccgtcgatacccgctggcaggaatttattcggcgagttgaagtggtgttccatcccgccgaagatggacaagaccgcgcacttgaggatctcagcgacggtcaacgctcattgttccatatggccatggcctcagccacgctggatattgaggctcagcttgcggctgataatgcaccagcaggcttcgcgggcgcaggtgttgcgttgccagctctgaccattgttgcccttgaggagccggagaacaatctggctccgttttatctgtctcgcataatcaagcaggtggaagaagtagccgaaggatctaacgcgcaagcgatagtctccagccactcgcccagtatcctcgcaagggtggagccctctgatgtgcggcacttccgactggacttgggaaaccgctgcactgaagtgcgccaaataagtttaccaaccggggacgaagaggcctctaagttcgttcgggaggccgtgcgtgcgtaccctgaaatgtactttgcgcgctacgtgatactcggcgagggtgccactgaagaagtagtcctgcccctgctggctaaggcgatggacttccccatcgatagatcattcgttgctgtcgtgccgctgggtggccgccatgtgaatcacctgtggagattactgggtagtctccaagtaccctttgcaactttgctggatctggattgggggcgcagcggtgggggttttggacgtattaggaccgcgtgtgagcagttgctgaatatcgggtattcaccccagcaggtctttgcagaaattctacgggaaggaggcgcagaacaaaacctggcagaaatttctgctactgacgcctctgatattggcgccctacgccgatggacgcgttggctagagcaatttcaggtgtttttctccgacccgctcgatttggattacgccatgctcaaagcatatccaagagcttatcgggttctcgagccggggatgcgcgggccagccggggcgggggagcctcgagaggcggttctaggcgcagaaggctctccggccttctacgatgctgcagaagatgatgatctgaggtggtataggtatctcttcctaggacgtggaaagcccagcacccacgtgagaatcttgagccgactcacatccgaagacttggtggcggcagtaccggaacctttacagcgtttgttggtgagggttcgcacagccttagtgcaggctgagcagcaatga

SEQ ID NO: 73775 - DNA, 1896 bp, Pseudomonas aeruginosa C48
atgagttggagacctgtcacgcccgaggaatggctacctcgcggcatactgaatcttgagcccaatgcttggatcgccctgcgccgcacacagtccacctctgtggtcgcaggccctggtgctggaaagtcggaatttttggcgcagcgcgcggtttacttactggagactggacagtgcaaagcgccgcagcagattcttgctatctcgttcaaaacggacgcggcggctaatctagcggctcgtgttcgtaagcgctgtcctcctgaactagctggacggtttacttcccttacgtttgacgcgttcacaaaaagtcttgtggatcgcttccaagcagcaattcctgagcattggcgtcctacgcgtccttatgaaataggctttccctctcggagaatggtgcaggaggaattgaaccgcattcgacttatggcgcgaccggaatggcaagccaggattgcgcaattcacggcggagcgatttgaggcagaggtaataggcggcagtcgtctggcagtggacgtgccccagcagcccactacagccgagcaactagctatctatcagtggctgcgacaacagctacatggcgctaatgtatccaggctttcgtttgtgacgttgaatcgactggcggagctgatcattcgagcaaatcccaagattgcgcgcgcccttcgcatgacctatccatacgtgtttgtggacgagttccaggacacgtcgtttgctcagtacgacttcctactctccacgtttgcccagacgggagctgtagtcactgcggtgggcgatcacaaacagcgcattatgggctgggctggtgcacgtcaggatgccttcgagcaatttgaggcggattttgaggcagagcgggtgagcctgctgttcaacttcagatcatcgccggagctggtgcgcgttcagcatttcgtggcgcaggccttggatccgctgtcgccacatatccagtctcaagccgtaggccagttggatagggatgtggttcaggtgtggagatctcgctctacggttgttgaagggcaacggctggcccagtggatatcagcagatatggcagcacgtcaaaaacaaccaagggactatgtgctcctagtgcgtcagcgtcctgatcagtttgaggaggagctgcagccgatatttacggccgctgggttgagtattcgtaatgaaagcaagacgataggtcggacgaatgttcaggatttaatggtagacgaagctgctgccatagctttggcagcgctacggctagctagcggacagcgcagcgcggaggcttggtcaaccttgtcctcggctgtttatgcgattcgcggagtcgacgaagacgacgaggtccaacggtatcgagttgatcaggacatccagagctttctggtcgcactcgggcaaattgtccgagctcgaatacctacggctgagtttgcagcagaaatagcgcaacggatttttgcgttcttggacgtggctgccatgacggccacttatgctgcatatacgcgcaacgacttacttgaagttatggctgaagcgttttcactgcacctacagcagtcagcttctgaaaccacgacttgggccacttgcatcgatcggttcttaggaacgcacgacatctcgatgatgaccgttcacaagagcaaggggctcgagtacgacacagtgttcttcgtaggcctcgacgatcaatcatggtggagtcatacaccgcgaaaccctgaaggcatcgcaacgttcttcgttgcgctatcgagagctaagcagcgagcgatcttccttttctgccagggcagaggaagacgtgatcgggtttcagagctgtatcagctgttgaccgacgcaggtgtagaagaaatcgaggttcgttga

SEQ ID NO: 73776 - DNA, 2337 bp, Pseudomonas aeruginosa C23
atgcatttgaagaagttggccgtccggaatttcaggcggctgcgaaacgttgtaattgatcttgcttccgacatctctatttttgtcggtgccaacaacagcggcaagacatcagtcgggcacgcactccagttattcactggcagtggccgcttcaacattcacgactttagtgccgaactttgggccgacatcgttgcgtttggtgagggcgatggcgaggcgagccttcccacgatggaaatcgacgtttggttcgaaatcggtccggacgatgttcaccgcgtcatcgatcttcttcccagccttgcttgggaaggcaagctggtggggatgcgtgttgcctacgcgcccaccaatcctgcggcgacgcatgcacgctatgtcgaagtgcgccagcgcgtgctcgatgcggtcgctaagggtgaagacggagcacccgccttcgatccctcgccacgtaacctgcgggagttccttcgcgacaggctacatgacgaatatgagctgcgctatttcgtactcgatcccgcgcggttcgatgcgaagatggtcgcagaggctggctatgacccagccactctcaccggacgcgaccggagcggccgtgagatcttgaacggccttctccacattgacttcttgaacgcacagcgccatctctcggacggcccaggtggctctcgcgccgaggatctctcccgtgtactcagtcgcttctacgggcgcaacctcgaacagaaaggcgaagatatcgaagcgttgcgcgccctcgcagcatccgaagtctcgcttaatgagcatctcgaacgagtgttcgaaccgacgctcaagagcttgtcgaagctcggctatccgggcctctcaaacccgcgcatgatgatccgctcggccctcgaccctgcccagatcatgagcggtcgagatggcgcgatcgttcactatgcgttgggagccgatgacgggaagcccgacccgcctaccttgcccgatcggtataacggtcttggcttcaaaaacctcatcttcatggtcgttgagctgctcgacctccacgctcaatggctggcgatcgaggaaaaccgtccgccggtccacctgatcttcatcgaggagcccgaagcgcacctccatgcccagcttcaacaggccttcatacgcaaggtgatggatatcctagcgctcaagggcgaggaccgcacgcactatacgagccaggtcgtcgtcacgacccattcgactcatatcctttacgaacgaggcttccggccgatccgctattttcgtcgaagccgtgcacagaatgtgtcgacctccgatgtgctcaacctctcggttttctacgacagcaccgatccggacatccgaagcttcctcgagcgctatttgaaactcgcgcactgcgatctgttcttcgccgatggcaccgtgctggtcgaaggcaatgtcgaacggctgctattgccgcagatgatcgccaatgccgcgccgcggctgcaatcgacctatctcaccgtcctagagatcggcggagcgttcggctaccgattcaaaacgctgatcgagtttctcggactgacaacgctcatcatcaccgatctcgacagcgtgttcggtccactggggcaggatggcgagggtgcggcacccgctggtcaaccggaagccgcggaaccagccgccgagaacgcgcaggctgccggcgctgacgctgaggacattgacgatgacgaggaggatttgcctgtggctgcggagaagcccgggaaggcgtgcatagccggtcatccgggcgcggcgacgtccaatcagactttgctccaatggctaccgaaatgcgacacggtcgccgccctgtgggaggcgacggctgagcagaagatccaggcgaggacggacgacaatgacgctttggtacgcgttgcctatcagtgccggaccgatgtcacttggggcggagaaaccctggcgctagccgggcgcacgctggaggaagcattcgcactcgaaaatcttgaatggtgtcaggacaagaaccgtaagccgcttcagctccgcatcgccaaggccgacgagaagaacctgaccacgcttgcggaacgcatccacaagcgcgtgcaggctaagagcttcagcaagaccgacttcgcgctcgccttgttagccgaagatccgagcagttggtctgtcccaacctatatcgccgagggcctgagctggcttgagaccgagattgcgccgccggaaccggacgaggaccagccgcatgaggaacagccgcatgaggacgcgccccagggggcaccagtcgccgccggcgacgaggtagcggcatga

SEQ ID NO: 73777 - DNA, 1878 bp, Pseudomonas aeruginosa C23
atgacaagccggatcggcagtcctgacacacaagccgatctagatgttcgagcgtgtctcgatcggatgccgccacgctcgtttgtcatggtcgccggtgcggggtcggggaaaacgacctcgctgatcaaggctatcgcgcacctagccgagacccgcggtcctgccctgcgccgcgccgggcaacaaatcgcctgcatcacatataccgaagtcgccgtcggtgagatttcggccgatgtcggggcctcgccgctattccacatctcgaccatccacagtttcctgtggtcagtcatccggccgttccattcggatatcgcggcttgggtagccacccgcatcgacgagaagatcgcggagcgacgcgcacactacgacaagcctcggactcaggcaaaaacgaaggcccgcctcgaacaggagatcgcagatctcgaagccgatctggctgcgatcagtgaagtagagaagttcgtctacggcaccggcagcagctacgctgaaggcatccttggccatgacgatatcctcaagctcaccccagcctgcgtcgcagcgcatccgctgctgagacaactcgtcgctaagcgctttccctacatcttcgtcgatgagagccaagacaccaatccggaggtcgtcgaggcgttacggcacattgcgggcgaacatcctggcctgtgtgtcgggttcttcggagacccgatgcagaagatctatatgagcggagcaggcactgtcccgctgaacgacggctgggcggagatcacaaagcccgagaacttccggtgcccgacatcggtgctcggggtcatcaatgcaatccgcgcccctggcgacggtcttgagcaggtgcgtggtcggacgataaccgttgatggcatcgagcagccggttgccggtacctccaatctgttcatcctgccggcggacgcggagcggagtgcgcgcctcgcggccattaggcagtggctggccgccgaaaccggcgacggtctgtggctaagcgacgtgcgggaaggcgatgtccgcctgcttgtactggtgcaccgcatggcggccaaccggctcgggttccctaatctgtatgctgcgctcaatgaccgagcccccatgagtctgagtgaagggctgagcgatggcacagcctggccgctccgtccacttgtccagcacatacttccgctcgttgtcgcggcgcaagcgggtgatcggttcacagtgatatcgaccttgcgcagcgaatgcccgaggcttgaaccagcgcggcttcgagggcaagcgacggcccccgttcttacagcgctacagcaagcgctcgacgggcttgtcggtctgttggcagcaggatcgcaggcgactatccgggacgtcttgacgcatgtgcgagataacgagttgctgcgcctcgatgatcgcttcgccatgcatctggttgcagagcctgtggatgacggcagcagcggcttcgagaacgttcaagcctatctggcatgcggtgtcgacgaactctgggcctaccggcgctactttacagaggagtcaccgttcgcgacgcatcatggggtgaagggtgcccaatttgagcgcgtattggtcgtcatcgacgatgaggaagcgggcttccggcagtattcttacgggaagtatctcgggtacgtccccctctcggacaaggacgaagccaacctggcggcaggtgaagagtccgtactcgatcgaacccgccgcctcttctatgtgtgctgctcgcgtgcaacgaaggacctggcagtcgtggcctttgtgcccgatgtcgcagcggctcgcaccgcgatcgtggcgcagaatctattccccgaggccgtaatccgaggtgcggagcatctgggctga

SEQ ID NO: 73778 - DNA, 2337 bp, Pseudomonas aeruginosa C20; identical to SEQ ID NO: 73776

SEQ ID NO: 73779 - DNA, 1878 bp, Pseudomonas aeruginosa C20; identical to SEQ ID NO: 73777

SEQ ID NO: 73780 - DNA, 1707 bp, Pseudomonas aeruginosa BL24
atggaaattgagaaaatttcaatagtcggctttcgaaactatctaaacgccacgataaatttcaacaagagcaccttgataatcggcgcaaacgacagtggcaaaaccaacctagttcacgccatgcgcctgcttctagacaaaagcttgccagaaagcgaattggagccctcagagacagactttcatttcgaaccaggcggtaaacaatccgaaaccatttccatagacattcattttaaagaggtcaaggaagatgccgtattgtccacgctaaagggcagtgtgggggaagatgaaaaatgcgtccttaggtactctgcaaagcgaggtgatctcagctactcactttattgcggcccggatagcgatgagcttgatgagattgctggccgattttacttaaagtatcttaatttaagatatgtgaagtcgcaaagagatctagaaaaatttattagcacagaaaagagacaactcctcaagatctctcaagaaaatcgcaccaaaaaagaggctgaagaagataaagcaaaactacaaactatcgaaaaaagactgaccaccatcaacaagcatgttcgtgaactgcactatgtcaaaggtgctactgacgcggtgaacaacgaactatctaagctttcacataacttatctgcgtactctgtacaccttgattccggcgccatagaaacgcagcagttcatcgataacctcaagcttggagcgagtgcggcaggttcaagagtatcccttgggggagatgggaggaataatcaaattcttctttcactctggaaggcaaaaagcgaacgagaattcgaccctgaaagtgaagtggttttttattgcatcgaagagccggaagcacatcttcacccccatcagcaaagaaaactagccgactatctcatatctgaactacccgggcagaccttcattacaagtcactccccacagatcaccgcaagattctctcctgagtcaatcgttcacgttaaatcaaagtccggaaaaagctatgctgcaagcaatggatgttcgaaatgtatcaatactgcatgggacaagcttggctatcggatgagcattctccctgcggaggctttctttgccaaaagcgtattcctcgtagaaggcccatccgagcaactgttttatacagagctagccaaagccctagaaatagatcttgattattacaatatctccatccttagtgttgatggagttcagttcaaggtttatgccagcattttaaacgcaatggaaatcccctggacaatcagaacagataacgacatctcggacatcacgaaaaacaagaagccgtacaagaacctggctggtattaaccggtgtctaaccctagcaggtctaaaaaagatagatcacgcgccggccaccacgactcacgccgatcttatgaagaatgggcactggagtgggtgctcaagaaaggttaataaaaagggaatttttctatccaagatagacctagagcacgacttatcagaagaaatgccggacgagttactcaattattctgctcgccctaacctacctttggccatagcctacctacaggataagaaggctattaggatgcgggaatttcttagcaagtacagcgaaaggctggtaaacatagggcacggagaaatcgcacgcgctctgctccattgcttagaacaggcaaaggagtga

SEQ ID NO: 73781 - DNA, 1641 bp, Pseudomonas aeruginosa BL24
atgatcaaattaaccaagcaacaaataaccgcgatagatcattcggggaacctgattatcacagcctgccctggcagtggaaaaacaacagtaatatcagaaaaaatcagaaacgaactcgaagatctgaaaaggcatcaaggcgttatagccattacctttacacgaaaagccagcaaggaattggcgcgccggtgtaatcgtggtggcaaagaaaccaaatcaagcttctttggaaccattgatgcattctgcctctcggagatcatatttcccttttccaagttcatttttggctccagccctgataatttggtgccaaagttcaagaatgaactatcagaggaagaaatctcaataataattgagaccgcaaaccagcttggtgagcttggcgcggagaacatagatgattacatgccggcactcaaggaattgtacgatttggggtgtatctatttcccaagcataccctttttggccagccacatagtgaaaaattccaaatcttgccgtaattacttgaaagctcggtacacaacggcttacatagatgagtatcaagactcatcttcagcacaacatgatttattcctcttattactagatatcggaattcgaggcgtttgcgttggcgatattcagcaatcaatttatggctggcgaaaaagcagtcctgagtttttaaagcaactcattaatttgcccacctttaatcaccttacagtatcaaccaaccatagatgccatccttcaatttcaaattatgcaaatcgcctatttgatgaagacttcgaggttgagcagggtgaagaacttcgagtgtatcaatgtgaagtggagggagccgaactagatgtcgctttaaagcttaacaacatcataccgagtattataaaaaaataccctgtcaagaatctctcggatgtggcagttcttgtccgctacaataaaggtctggagcgaataagagagaagctagctatcccttgcaagatatacacagaggatgacctcagtggaattgagtcaaaaacctcccagctatgggttatgctgctcgaattcaaattcgacaaaagcatgctggtagatgacatagtgaatttatacaacccagccggcgatatccgtcgcgaccgattgaaagcgcttagggatgcagttaagagtgttagaaccgttgcgctcgaagatcttgcagacacgcttttagcagcatctcaattgttacttgacatcccggccactaaatttgaagtaaacgcacttaggaagataataaatgaccctgaattgttaaaccaatacctgccggctactgacgatcaagtccagtgcatgactcttcataaatccaaaggccttgaattcgatattgtcatccatcttgatttagtcgaatgggtctttcccaagcgcgtgccaggcgcaaactacaatgatcgagtttacccagatttagagcaggatttgaatttgcactacgtgggtatcactagagccaagaatgcatgcgtactaattcacactacacagaggatcaactcacttggggcggttaaacgagcagacccatctgcttttttgagcttacccggccttgatgagctatacaaaatagttgataggaaatggtag

SEQ ID NO: 73782 - DNA, 1905 bp, Pseudomonas aeruginosa BL17; identical to SEQ ID NO: 72778

SEQ ID NO: 73783 - DNA, 1551 bp, Pseudomonas aeruginosa BL17
atgcttgcgcagcgtgcagatttccttctacgcacaggagcctgccgctatcccaaacgaattctggctatctcgttcaaggtggacgccagtagcaacctgaaagagcgggtaaagcgccgctgtggctctgagctggcctcgcggtttgacagctacacctttcacgcttttgccaagcgcattatcgaccgcttccggcccgtgctaacgggtgagtacgcgttggatgctgggtacaaaattgctgatcgaaaaccaggaccctcgcggagtctgatcgagtttgccgacctggttccgctggccatccagattcttcagaaatcagaaatggcacgtaatgccatccgccagacctacagcgatgtctttctggatgagttccaggactgcaccaatctgcagtacgagcttctgaaactcgcctttcaagacaccagcattcgccttaccgccgtgggcgataccaaacaaaagatcatgggctgggcgggtgctctggacggtatcttccaaaccttttcagccgattttgcagcgacaccgctgaacatgtaccgcaactttcgttcgaagccgcgcctgctgcgcctgcagaacgaaatcatccgggtgctcgaccctgcgtcagtcatgcccgatgagcagcttgtcggcgatgagggcgaggtattcgcttggcgcttcgaagacagccgtaaggaagctgagtatctagcggacttgattgatggctggataaagaccgaacagctaccgcccgcggaaatcgcgattctcatttccaaacagctcgatctttacgctgaccatctcatggtggcactggaggcgcgcggcattcctttccgcaatgagcagcagatgcaggacatcacggtcgagcccgccgcccgcttgatcgtggactatttatcttgcctctacggccaacgcgagccaaaagcctggattcggctaatgaatcaactggttcctttcgcggatgaggacattcagtcgaatgctcgcaaggatcttgatcgactaatcaagcaacaacggaaagaagcggctattgctgacctggtcgcggagccttcttctggctggtgggagtttgttcgagtcttcttgaagcaaatcagtctcgaaaccctcgtggcgctgtcgccggactatgagtcccatgaacggctcaaagaggtcgtccgaaacaccaggacgcgcatcgaagagttgctcaagctggagccagacttgcctaaagccctggagcgtttttcagacgaccaagcggtacgaattctgaccatccacaagagcaaaggtcttgagttcgattcggtcatcatcatggccgtcgaaaacgaaatcttctttggcaatcaggctgaaaaccgctgcgcatattttgtcggggtttcacgcgccaagaggcgactagttcttacccatgcagatcagagggagcgccctgctggctatacgaaacgttgggatacgcatcgttctgcccaaactgaatattttggctacgccataccgtttttgagccaacagcaatga

SEQ ID NO: 73784 - DNA, 1905 bp, Pseudomonas aeruginosa BL14; identical to SEQ ID NO: 72778

SEQ ID NO: 73785 - DNA, 1551 bp, Pseudomonas aeruginosa BL14; identical to SEQ ID NO: 73783

SEQ ID NO: 73786 - DNA, 2310 bp, Pseudomonas aeruginosa BL13
atgccagaagcggttgtcgccacgccggtagctggaagcatcacccttcgactcctagagctttgtcagttccggcggcttggcaaggtccagctagatatcgataagaaaactactattcttgtcggagccaacaatagcggcaaaacatcggttcttgcagcgctacgccacttcctttcagatggctctcgcttcggcgctttcgatatcagtctgtcgcagtggccgaagttgcgagcgcttggtaaagcttgggaattgctgaaggaaaacccgtcgacagtgattggatccgaagagcaatggatcgagcagcttggagtcattcactcggctatgccgacgttggacctatggttcgatgcggaggctggcatgttccactatgtcgccccgtttctctcaaaattcagctggaaaggaggggccgttggggtacggttgcgtctggagcccgctgcaagcgttgacgagttgaagcagctggcttgggcataccacaccgcgcgactgccggtgaaggatatgggggcggattcgcttgcctggcccattgacctcctcgacttttggttgcgcgagccacaaaggttgggtcaagtccgagcatacaaattagatgcagacaaaaatccactggacgggctcgagacctatgccgctcagactctgccggcagacgccagtccaattgagcgcaaaaatctacagaaattgatacatgttgacttcgtagcagcgcagcggggtcttggaggtgaggaagctgattctcgatctgcttctggcccccatcgtgtcggcatgttctccaatcaacttctcaagtttgctcgacaacacctaaatattgctacaacaggtcatgggcatcgcgcagaccttattaaggcggtcgcggaggcacagcaggaactggacaagaaaattcacgaggcgatcgctccgtcggtggaagaggtcagagaactcggatacccagggctgcacgatccccaagaaattcgcttccgcacgcgcatacagacagctgatttgctcgaccatggtactgcagtccaatacagcatgcagaaggactcactagaagagcttcttcccgagtactccataggccttggataccaaaatctccaatcgctcagctatcaactggtttctttcaaagcggctcgactcaagcctgaaaaaggtgccccggtacccgttcatctagtattggttgaggagcctgaggcgcatcttcatgttcaagtgcagcgtatcttcccagataaggctcacaagctgatcagcccgaacgaaaaagaagcgtcaggacttaaaagccagttaattatcagtactcactccagccatctcgcgcacgcagagagttttgatcgattacgatacgtccgtcgcatagcaaagagcgcagaaaatcccatgccgaccactgaggtggttaatcttgggaaaattttcggtgatgaccaaaagacccgtcaattcgcagagcggtatttccgcgttcagcatactgaccttttgtttgccaatgctgcaatcttcgttgaaggcgttgctgagcgcatgctggtcccgcttttcatcgaacgagattttgaagttctcaacagccgctatctgtcgttcctagacatcggcggtagtcacgctcatcggcttaagcctctcgtggaaaagcttcgcattcccacggtcatcatcaccgacgtcgaccccgttgaggagaaagctgggaagccgacgaaggatggtgagccgaccaccactctagttgcagtggctaatactggccaagccgggctgcaatgcgggaacccgacgctgcgcggttggcatccgaaactgcagcagctcgaagatttcaaaaacccagtagaggtacaacttgtttggagcgaagtctctgaatgtttagtgcgcttcgcctggcaactgcccgtggctgaagcgggcgaccattggcctagcacctttgaagactcacttattctcaagaacattccttggttcaaaggtcttatggatgagaaggtcgacggctatggcaacaaaattaagccgcccaaaggcgcactcggctccgtagctcgacgcgttgccgaccatgaaaatatttcggatttggtcgcatctctacacaaactcatgcacggctcattcaataaaggagacttcgctgcaagcatctttgagatgattgcggcggccgaaccaattgcttgccctaagtacattgcggatgccttagaatggcttcaaaaacaattggatcccaatccggagttgctgccatga

SEQ ID NO: 73787 - DNA, 1947 bp, Pseudomonas aeruginosa BL13; identical to SEQ ID NO: 72305

SEQ ID NO: 73788 - DNA, 1905 bp, Pseudomonas aeruginosa BL08; identical to SEQ ID NO: 72778

SEQ ID NO: 73789 - DNA, 1551 bp, Pseudomonas aeruginosa BL08; identical to SEQ ID NO: 73783

SEQ ID NO: 73790 - DNA, 2397 bp, Pseudomonas aeruginosa BL05
atgaagctacaggcatatcggctgcagaactatcgccgactgcgcgacgtcgtcattgagcttgacgacgagatttccatcttcgttggcgccaacaacagcggcaagacgtctgccgtgcaaggcttgtactcgatgctccgtggcgaagcgaagaagttcgaactcttcgacttcagcgcggcgctgtgggccgagatcgacgccgtcggcaggacgcctccaggcgatgaggacgcgcccaagcagttgccgtccattcttttggatctctggttccgcgtcggtgaagacgacctcgccactgcaatgtcgcttcttccgagcacggagtgggacggtaagtgcgtcggaatccgggtggcgttcgagcctcgggacgcccatgcgctcgtccggaagttccatgaactgcatgaaaaggccaacaacgctgcgaccgcactgatggccaggcgcagtgcagccgcggaggcaggcgcggaaaatggggctgcggtggtggcggatcccggcgagtacaagccctggccggaaagtctgacgaagtacctctccaaggagttgagcaaggaatatacgttccgctactacgtactcgatgagcgcgcatttgtcggctatcaggcaaaggaggtcgattatgagccgctgcccctaggcaacgagcccggtggcgccgccattctcaagtctctagtgagggtggacttcctgcgtgcgcagcgacaccttgatgacccggacgctggcagctccgaccgcgccgagagcttgtcgcgacgtctgagccgtttctatcaccgtaatctggagaagcgtggcgacgaccatgcagcgctcaaagcgctcgatacctcggagaaagaactgaacttccacctggaggaagtcttcagcgacaccctcaagcgcctcgccaaactcggctatccaggcgtcaataaccccgagatcgtgattcgggcggccttggatccgaccaccgtcctgggacaggatgccaaggttcactacgtggttcctggtgcggtcaccgcgcaactgcccgacagctacaacggtttggggttcaagaacctagtctatatggtggttgaactcctcgacctgcacgagcagtggaaagccgaggaagacaaacgggcgccactgcatctggtcttcattgaagagcctgaggcgcatctgcacgcgcagatccagcaggtcttcatcaggaacgtattgcgcctccttgaggatgccaacgatcacgcgacgtttttccacacgcagctcgttgtcaccacgcactccccacacatcctctatgagcgtgggttctctcccatcaggtacttccgccgtgtcagcgaccagctggaccataacaccgaggtaaagaacctttcgctcttcaagacgggcgcggccgacgctccagcgcgcgaattcttgcagcggtatctgaaacttacacactgcgatctcttcttttctgatgcggttatcttggtggagggcaatgtcgagcgcctgctcttgccagccatgatcgagtcggcggccaagcgcctgcgttcctccgccctgaccatccttgaagtcggtggcgcgttcgcgcatcggttccaggaattgatcgccttcgttggactcactacgctggtcatcacggatctggacagcgtaacggtcaagacggatgccgccgagcaagatgcaggaggaggcggtaacgtcgacggagataacgaggacgacgacctgaagcccttcgagctcgaagacgacgacgaagcagcaccgggcggcaagaagaagtccaagaagcgtggcagcacctgccatgctcacgtggagggtgccgtcacgtccaatcaaacccttatcagctggatccctaagaagcggtcggtggccgaactctgggaagccacggcggagcaaaagacgctatcgcttgccgagggggccagcgctgaggttcgggtggcctatcaaaccaaggttatggtgacggtgggtgccactacctcccagctctgcggccgcacccttgaggaggccttcggtcttgagaactctgactggtgtcaggctgaggctaaccgggcggtcggactcaagctgaagcgcgcaccaaacagccctgaggaactggctgagaagttacacgccagggtgatcggcaagaacttcgacaagactcgctttgcgctagaggtcctcgcaagcgggccgctcaactgctggaaggtccccacatacatcgcggagggcttagcctggctcgaagccaaagtggcccacgagattgaggcggacgcggctattaccaccgaggtcgcgacaattgagccgactgtagccggttttgtcaccgtcattgcagacacggggcagatggcatga

SEQ ID NO: 73791 - DNA, 1932 bp, Pseudomonas aeruginosa BL05
atgagcaggcgaattgatagcccggacaccgacgccgaccgcgagatccacgcgtgtattgcagcgacacctccgcagccgttcgtggtccgcgccggtgcaggttccggcaagaccacctccctcatcaaggcgctggactgggtgatctcagagcacggcgtctgcatgcgggcgaaaaagcagaaggtcgcctgcatcacatataccgacctcgccgccaaagaaatcttggcggatgttaacgacgacccgctggtccatgtctcgaccatccacagcttctactggtctattaccaagacgtttcaggcggacattaaggtttggctacagaacgacatccgcaggcggatctccgagctggaagaagagttcaagaactacagctcgcgggtttggcagactacacgcgacaggaacaaggctgaccaggagcgttatgtccgaaacctggaggttattgctggcgtcaagactttcaactacggcgtgggcagtgattatgcgaatggcatcctcggccacgaggacatccttcagctcgccgacttcctgctgcaaaatcgcccgctgttccgacgggtcgtagcgctgaacttcccgtttgtgttcatcgacgagagtcaggacacgttcccgagcgtggtgaagtccttcaaggaagtggaagcccagatgcggcgcaagttctgtctcggtttctttggcgacccgatgcaggcgatcttcatgagaggggcgggggatatcccgcttgaggaccattggcgggccatcacgaaaccagagaattttcgctgtgccaagcagatccttgacgtcgccaacgccgtgcgcgcgcagggcgacggcatggagcaagtccgcgggctgcacgaaagggttgatggagatctcaagccggtggagggctcggcccggatgttcgtcctgccgaacacgctgaaccgaattgaggccctggcaagagtccgggcgtggagtgcggctacaaacaacgacgagggttggacgaccccagacatcgcgctcaagattcttgtcatcgtgcaccgcatggccgcaaaccggctcggcttcggtggcatctactcggcgctgaacgataagacatcagagggcatgaagcaggggatgcaggatggcaccggctggcccgttcgacccttcctaagttttgcgctaccgatcgttgccgccgtgaaggccggcaacgagttcgcggcgatgaacctgctccggaagttcagcccgcgtctggcaccacgggctcttaccggccgacgtgccgcgactgtattgcgagaactgcacgctgctatatcgagacttgtcgccatgctggacgaggcagggaccaccattggtgacatagcactccatctctgtgacacaggtcttttcgagttcgacgatcgctatgcgcgtgttcttggatttgtcagggatgttgctgacgctgctcaggagcccgaggctgctgatgcagttccggcagaaggactatcctcggacgcggcaatggccgagttcttcaagtgctctgcacaagagctttggccctatgagcgctatgtctcagaaggctctccctatgctacacagcacggtgtgaagggagcgcagttcgaacgcgtcatggtggtgatggatgaggaggaaagcgactaccgaacgtacaactacgagcgtgtcttcgcgagtgctgaggcccgtgctgcagatcgtgcacgagcactgggcggtgatgaaaacacttggagccgaacgctgcgactgctttacgtctgctgcactcgcgcccagcgggggctagtactaacgttctttgtcgccgatccggcggccaccctggaaaacgtcgtggcgagcggaatcttgccgcgaagcgcagtctttacgcaggaagtgttagttggatggccatag

SEQ ID NO: 73792 - DNA, 1788 bp, Pseudomonas aeruginosa BL04
atgagggtttctcgggtcaggttgatcaatttcgccaatttctcggatgttgatgtcgagacgggggaaagtatcgtcatcgtgggagagaacaaggttggcaagagcaatttcattcgcggcctgcagttgatccttgatccgggcttgtctgaacgcgatcgacaactggggcttgaacatttctgggacggacttggcgaagacaaggttggtgcgaccattgaggtctctgtggatctaacggacttcacaaacgatccccggctgatggctcacctcaacgattgcgtgattgatcctggcccacccatggtggcccgactcacctaccgcttccagcctaaggcgggcctggggcgcgccccggaatcgttgaaggactatgagtatgtgatcttcggtggcaacgatcccgaaatgcgtatcggcggcgcacttcgccggatgttgccaatagatgttcaggtagccctgcgtgacgctgagaaggaccttgcgagctggcgcaattcgccattgaggccgctcattgaggatcttgccgcatcgttggatgatgacgcccgtgaggagattcaggatcaggtcgaccaagcacagcgagagctggctggacacgaggaagtggtagcgacagcagaacggatcagcgaacggctgatcgccatcgctggggggcaacatgccgttccggtatcgctcggacttgcaccaactagagtcgacgcgttgctgcgcagcctgcggctgctgatcgacaatggagtacgcggagtcggcgatgccagtttaggaaccgcgaacctgatcttcctggcgctgaagagtctcgaactggaccgcctcgtttccgatggagagcgcgaccacaccttcttcgtagtcgaggagcccgaagcgcacctgcacccgcacgtgcagcgtctaatctatcgttacttccttggcacgggggcggaagatggtgaggaacagccaccgcttacgacaatcctcacaacccactcgccacatatcgcaagcgttgcgccgatcagatctattgtcctgctgcgccatgacacagcggaaggcaagactgtcgcggtctcgacagcaaacgcacctttcacgcagcgggatgaagaggatcttcagcgttacattgacgtcactcgcggcgagattttcttttctcggggggtgattctggtcgaaggcgacgccgagcgcttcatcgttcccgcgtttgccgaggtactcgatattcccctcgatatgcttggaatcactgtgtgctcggtgggggggactaacttcaccccgtatgtgaagctactgggccctgaaggactcaacattccccatgtgatcctgacggaccgggatccaaccaatggtaatcatccattggttcgcaggcggcttatcaatgtccttgacgtgattgagggcggtgtcgatcacgaaaacttggatgcggatgaagtgatcgagcttgccgagcagtacggatacttcgtcaacgagaacacgttggagcccgaactatttgcaggtggactggcgcaggacatgcaggaggtaattcgggaggaactgccgcgattaaggagagaaactctgaatgccttgcagcagtgggtggacgatcctgatcaggttgatgaagactggctgctcagattgatcgagaggatcggaaaggggaggtttgcgcaggcacttgcaccgtcggtgtcacaggacgtttgtccggcttacattcgttccgctctggagcatatccgcgatgccgtcgcgtaa

SEQ ID NO: 73793 - DNA, 1815 bp, Pseudomonas aeruginosa BL04
atgccgtcgcgtaacgtcggtacagcctacctggcgcaggctgccgaactggctgggaatccgggtcagttggcagcctacaactctcaaggacattgtgtggtactagccggtcccgggagcggtaagaccaagacactcgtcctaaagctcgcccgcatcctagccgaagacgtcgaggcccctcgtggcgttgcgtgcatcacatatagccaggagtgcgctcgcgaactcgctcgccgaattgaaagcttgggacttcagcaggcacctaatcttttcattggtacggtccatgggttctgtctgcgtcatctcttgatgccgtatggacgcctggccggcctgcccatatctttcccactttcggtggccactcaacgagtcagtgatcggttgttgaagcaaactggagatgcgcttttcggccagaaccatccgtacaaagttattgaccttgggcggcatcgccgttccgtgctcaatcgaaatagcgtcgcttggcgtagcgaggaggaactcgctgcctgggccgaggcctacgaggccgctctgcgcgacgaggggctgattgactacgatgacatggttgtcttcggccaacgtctgatcgccgagcacgactgggtactacctctggttcaggcaaaattccccgtgctcgcggtggatgagtaccaggatttaggtgtagcactgcatcgcatcgtcaaacgccttgccttcgacgggggtgtccgacttttcgctgtcggggatgcggatcagtcgatatatggatttacgggagctgatggcgcgttgctcatggaattggcggctcgcagagacattgagcctgtccagcttcaattaaattaccgttctggtgcagggatcgtgactgcgtcagagatggcgcttggagaagcccgaggctatcaagcgagcgatcctgcgcgacaaacgaccatcgaatttgtcctgcgcccgggtggtatggcggaccaggctgcgcacgccgtcgcgcagatcattccggcggccttagcctccaagccgggacgaacactgggcgatatcgcgatcctatacaaagactatcgcgcaggcgatatcgtggctgaagctgtggcaaccggcggtctcgattacatccgtgtggataccgcagcaccttaccgcaaggttgccctaacaagttgggtagaagactgtgcggcgtggtgcgcgggtggctggcgtgtcggacgcccacaattgcgtggactactcgaccgctatcgcgcatttcatcgggcgagcttggacgattcacaggccaagcgcgaagagcaagagctaaccgccttgctatgggagctgcgcgctgaccagcaacctgcgcgagaatttgttgcttcgctgcgcaacggtgtagtggatcatctgctggcggctgaattggcgctcgctgatcagaaggagcaactggatcgcatgacggcagcgctcgccgaaggcggtgcactggcttcgctagacatcactagtttgggcggtcgggacggttcgcccgatcacctgaatctgctgacactgcattccgcaaagggctgtgagtacgacgtcgtcatcatggttggactcgacctcggaaatctgccgtggcgcaatgaaactccagagaagttgcgcgaaagtcgccggctcttctatgtgggactcacacgtgctcgcgacgaggtccacatgctgtattcgggcttcgttgatggccgctatggccctatgcgctttgggcgctcgccattccttgatgagctggaggcgcgaatgcgtgccgctggcatttga

SEQ ID NO: 73794 - DNA, 2181 bp, Pseudomonas aeruginosa BL04
atggaagggtttggggtgcctcgtcaacagaacgaggaatctatgcacgtatccaagctcagcctggtcaactacagaaactttgccaatacaaaactactattccaaaaaggtatcaacacaattattggcgaaaacggatcaggtaaaaccaacctgtttcgagcgatcaggctactgcttgatgacaacatgatccgctccgcctaccggcttgattcaactgactttcatcgcggtttggaacgatggcaagggcattggatcattattagcctggagttcgaggagatttcggcggatgaagcagtccaagccttgttcctgcatgggacggccggcatcgatgatgaggcaatcggtaaggccacctacagcctcatcttccgcccaaagaaagagatcaggcttcgcctttctcagttagacgatggcgaccacgctggtctcgctgcgatcctgaatgctgtcactctagacgactacgaaaccatcttcacgggccgaagcgacgctgacttcaacgatgaagccttctacaaagaggtggttggtgactttgaaaacgcccgattcaacgaagaaatcgaatttcccgccatcggcgccaagattccaagtgtgctatcggtttccagggagatttccttcactttcgttcaagcgctgcgagatgttgtatcggagtttcacaacaacaggaccaatccgctgttgtcacttttgaagggcaagagcggtgatattgatcctgtggcattccaagcgattaccgatggggtgaaagcattgaatgactcgattgaggcgttaccggacgtacaagtagtccgagccgatatacgagacaccatcaaggacgcagcgggcgaggcttactcgccctcatctctttcaattaagtctgatttgccagatgaagctgacaaactgttccagtcgctcaagctgtttgttggcgagtcaggagaaggccacgaagggcctatccacgaattgagcctgggcggcgcgaacctgatcttcctcacattaaaactgttggaattcaagtatcaaaaagccaagcaatcaatcgccaacttcctgctaattgaagagccggaggcccacattcacacacacatccagaagacgctctttgacaagcttcaatacgacgacacacaaattatctactcgacccattcgactcatatttcagaggtaagtaatgttcagaacgtgaacattctcggaaaagagcgtggtcgatgcgaggcctaccagcccgccactggtttgactccggaggaagtcggtaatatccagcgctatctggatgctgttcgcagcaacctgctattcgccaaaagcgtcgttcttgtagagggcgatgcggaagaaatcctgatcccgattttgatcaagaaggtgcttggcgtcagcctggatgaactcggcatcagcttggtcaacatccgaagcaccggctttcagaacgtcgcagttctattccacgatgatcgaatccgaaagcgatgcagcatcgtcaccgatctcgacaagtccatcattgacacaacgcccgtcgctggcgactctgaaagactgctccggcgcaagaaaaaatatcaagcatctcaggataaaggaatcgccagaaaggcgctgctggatgagtcgttcaaagataatccatgggtttcgccgttctttgctcctcacacctttgaggtcgattttgtcgcggccgggaacgctcgtaaggtggtgggtattcttcctgatgtctacacggatgccccaaccatcgtgacagccaaggcagagctggagtctgctgacattgcgcgatttggccaaagagcgctgactatggcggacaactatgggaagggatggtttgccattttgcttgggaaaaagatcgatccggaaacggccatcccggagtacattctggacgccatcgccttcgcgcatccgatagtcacaaaggaagtttggttcaacgtactgagctatcgcgtgagctatattgacgagaatgagatttttactgcacctgcggttttcaccgaattcagggaaaaacttttagcctttagaaaaggtgagattgatttcgttagcatccgaaacgaaatgctggccaccttccccgacgatcgtatcaacgacgtccttaaggtcttctag

SEQ ID NO: 73795 - DNA, 1800 bp, Pseudomonas aeruginosa BL04
atgtttatgtggagcaaaggcgacctgaatccggagcaggaagctgccatattgcagcctgggagcgcatttctcattgcctgtcccggtagcggaaagactcgcacgctgacttataagattgcctacgagttgtccaggctggagtcgaataagcaatttgttgttgcgatcacctatacgcaccgtgctgccgacgagatccatgagcgcatcgagagtcttggggtggatacatcccgactatggataggaacaatccactcgttttgccttgaatggatattgaaaccatacggtatctatcacgaggcattgggtcgaggcttccgagtgatcgatcaacatgagcgtgagaaaattctcgaggccttgtgcaagccttaccagaagccaaagatcaccttctgggattgcgaattctatttcaccgaagccggttatgtactttcctgcccgcaggcttggaaacacaacggcctgcacgagatattgggtagatacttcgaggttctacgagaaaatcggcaaatcgactttgaactcatcctcttctatgcttaccaactaatttcccgccgtcctgcaatcagcactctcttggggcagttgttttctttcttattggtcgatgagtatcaagacactaagcgaattcagtattcaatcatcactgctatcttgaaagccggccaaggcgcaaccaaagctttcattgtcggcgatcccaatcaggcgatttatcagtcactcggcggatacccgattgcgtttggggatttcaaggcaatggccggcatcgacattgaggagcgcgaactgtcgaggaactatcgctcttctgagcgcatcattgactacttcggaaatttcaatgttcatgcgactcgtatcgaagcagcatccgtcgataagacttaccagagtcttgtttctttcgacgagacagtaagcaagacggacttggaagctgagttgatccgacttatccgattcaacatcgagtccatcggaatcgcaccccatgaggtgtgtgtgctcgcaccacagtggacgcaccttgcaagcatgacacgtcgcctggtagcgagcatgccagagtattcgttcgatggtcccggcatggttccctttgcgcgtgacacagagaatttttggtaccggctctcgaagattgcacttacgcaggcgtcgccggcaatgtatgtccgcagactccgctgggccggcgatatcctgaatgacctagaggcggccggggcgagcgtgtccaaattcactcggaaatccctgttaagggaatgcaacgcgatcaagatagatgaaacggatgggctcacctatctccgcacgttctttgaaatgctatttgccaacttggctatcgactttcgtcttttctcgctgcttcaagagcatcacacagcctttttcggtagttcgcaagctagaattgatcgtctaaagagcgagggcagcgaattcattggagacatcgagacgtttagaaaggtatttcagagccggacaggcataactatttcaacaattcacggcgtgaagggggcagaatttgatgcggtgatcgcctatgccttgctggaagacatggtgccgcattttaatgacccgaacggccaagaaagtgcgatgaaactgctatatgtcataggatcacgcgcaaggaagaacttgcacctaatttcggaacggggtcgcattcgccagtacactggtgaagaatatcaagcgactcggcaactcgtatcctgcaagttttcatacgaccaggccaagtga

SEQ ID NO: 73796 - DNA, 2337 bp, Pseudomonas aeruginosa BL02; identical to SEQ ID NO: 73776

SEQ ID NO: 73797 - DNA, 1878 bp, Pseudomonas aeruginosa BL02; identical to SEQ ID NO: 73777

SEQ ID NO: 73798 - DNA, 2424 bp, Pseudomonas aeruginosa BWHPSA027; identical to SEQ ID NO: 71738

SEQ ID NO: 73799 - DNA, 1932 bp, Pseudomonas aeruginosa BWHPSA027; identical to SEQ ID NO: 71739

SEQ ID NO: 73800 - DNA, 2139 bp, Pseudomonas aeruginosa BWHPSA025
atgtatatctccaagctcagtctgattaactatagaaacttttctaatacgaagttgctgttcaacaaaggcaccaacaccattattggtgagaatggttccggaaaaacaaatctgttccgggccatcaggctcttgcttgatgacaatatgcttcgttccgcctaccgactcgataaaacggacttccaccggggcttggggcgatggcaagggcactggatcattatcagcctcgaattcgaagagatttcagcagacgaagcagttcaggctttattccgacatggcgcaggtctcattgacgaagaggccacgggcaaggctacctataaccttgtctttcgcccgaagaaggaaatcaggttgcgcctctcccagttggctgaaggcgatcacgctggcctggacgccatcctgaatccagtcaccattgaagattacgaaacaattttcacgggccgcagcgaagccgacttcaacgatgaagccttctacaaggaggttgtcggagacttcgagaatgcgaaatttaacgaggaaacagagtttcggtgcatcggcgccaagattcccagtgtgctttctgtttcgaaggaaatctcttttaccttcgtgcaggcattgagggacgtcgtagcggagtttcacaataacagaaccaacccgctattgactttgctcaagggcaagagcggtgacattgatccagtgctgttcgccgctatcaccgatagggtgaagaatctcaacgattcgattgaggcgcttccggacgtgcaatatgtgcgaaccgacattcgcggcactatcaaggatgccgcgggcgaggcgtactcgccttcctccttgtcgataaaatctgatctgcctgacgaggcggacaagctattccagtcgctcaaactgtttatcggtgagtcaggcgaagatcatgaaggccctattcacgatctgagcctgggcggcgctaatcttatctttcttaccctcaaattgctggagtttaagtatcggaaggctagacagtcgattgcgaactttttattgatcgaggaacccgaagctcatatccacacgcacattcagaagacgttgttcgataggctcaattacgacgacacgcagatcatatattcgactcattcgacgcatatatcggaagtgagcaatgttcagaatgtgaacatactcggcagagatgaaggtcgatgcgaagcgtatcaacccgccacgggcctgggaaccgaagagatcggcaacattcagcgctaccttgacgccgtgcgaagtaatctactgtttgccaagagcgtcatcttggtggaaggcgatgcagaggaaatcctgattccgatcttggtcaagaacgtgttaggcgtcagtctggatgaacttggcatcagcctcatcaatatccgaagcacaggtttccagaacgtggccgtcctatttcatgatgaccgtatccgtaagcgttgcagcatcgtaaccgacctcgataaatctatcatcgatactgcacctgaggcgggcgacagcgatgcagtgttgcgacgaaagaataagtaccaagcttctcaggaaaaaggtcttgttcggaaagcgcaattggaagctctttgcaacgagaatccttggatttctcctttctttgctccgcacactttcgaggttgatttcgttacggcaggcaatgcccacaaggtaatagcggtacttcctgacgtttacaaagatgctccgaccatagcaagggctaaaggaaatcttgaatcagcggatatcacccagtatggccagcggatactgactatggcagacagccaaggtaaaggatggtttgccatattgctagggaagaaggttgatccacaaaccgccattccgagatacatactcgatgcaatagcctttgcccatcccgtcgtcaaaagggaagtttggttcaacgtcttgagctatcgcttgagacacatagagaaggagggtctatttacagcgccggaggtctttgctgaattcagagccaaattgcaggcgtttaaggatggtggcattgatttcgtcgacatcaagaacgagatgttcgtccagttcactgacgatcgcatcaacgatgttcttgaggtcttctag

SEQ ID NO: 73801 - DNA, 1797 bp, Pseudomonas aeruginosa BWHPSA025
atgttcacttgggatgaaggggatctaaatcctgagcaggaagccgccattcgggaacctggcagcgtgtttctcattgcatgcccgggtagcggaaaaaccagaacactcacgtacaagatcgctcatgaattgtcgaagcttgaatcgagcaagaaattcattgtagccatcacctatacgcatcgcgcggcagacgagatccatgaacgcatcgagagtctcggagtagatacatcccaactctggattggaacaattcactctttttgtctcgaatggatactgaagccctacggcatctatcacgaggcgctggatcgtggcttccgcgtgatcgacctgcacgagcgcgagaaggtcttagataacctgtgtaaaccgtatcagaagcctaggattaccttctgggattgcgaattttactttactgaagccggctatgtgatttcttgtccgcaagattggaagcatgcggggctcaacgaaattctaggccaatatttcgactacctccgggaaacccggcaaattgactttgaactcatcctctattactcctaccagttgatcgccacacacccttcgatcagtactattctcggccaattattctctttcgtgatggtcgatgagtaccaggacacgaagcgaattcagtattccatcatcgcatccattctgaaggctggtcagggaacgaaagcgttcatcgtcggcgaccctaatcaagccatctatgagtcgctcggcggatatccaatcgctttcgatgagttccagtcgatggcagatatcgagttgaagaagcttgatctgtccaagaattaccgctcctccgaacgcatcatcacctacttcgggaactacaacgtatacaacacccgcattgaggctgcgtccaacgacaaagcctatcccagcttgatttcgttcaatgactctgtgaccaaggacggcttggaagcagaattgattcgcctcatccggttcaacgtcgagaccattggcatcgcaccgcacgaggtctgcatccttgcacctcagtggatgcacttggcaagcatgactcgccgcttagtcgcgagcatgcccgagtatgcgtttgatggccctggcatggttcctttcgcgcgagacccggataatttttggtacaagctttcaagaatcgcactcacgcaagcgtctccagggatgtatgtacgcagactccgttgggcaggcgaggttctccatgacttagagggggccggcgcaagtgtatctctgctcacgaggaagagcttgttgagggagtgcaacgccattacggttgatgagacggatggactgtcgtatctccaagccttcttcgatgcactgttttcgagcctggctatcgacttccgtgcattcgtgctgctgcgtgagcattacgaggcgttctttgaaagttcacaggctaggatcgacaaattaaagaaagaaggcacagagatgattggagacatcgccaccttcaggaaggtatttcagagtcggactggcattacgatatcaactatccatggcataaagggagctgagtttgacgcagtcatcgcgtacgctttgttggagaatatgcttccaaacagaaatgatccgaatgggcaagacagcgcaatgaagcttttgtacgtcatcggttctcgtgcgcggaaaaaccttcatctaatctctgagcgtcagcgcatcgacaaattcgcccgcgcagaatatcaagcgactcaaaaacttgttgaatgcaggtttggatacgacctaatcccatag

SEQ ID NO: 73802 - DNA, 2139 bp, Pseudomonas aeruginosa BWHPSA024
atgcatatttctaaattgacgctggtcaactaccgaaactttaagaatacgacccttcagtttcacaagggcgtgaacaccatcatcggcgagaatggctcaggtaagtcgaacatactgcgagcgatccgccttcttctagacgacacaatggtgcgcgcggcttaccgcttggatgaatcggatttcagccgctcactcggtcaatggcagggccattggatcatcatcagcatggaattcgaggagatcagcaccgacgaatcagtgcaggcactgttcctacacggcactgccacgctggaagatacgccacttcgcaaggcgacttataacctgattttccggcccaagaaagaaatccggttgaagctggctgaccttgatctttttgacgctgaccagctcgcagagatccgcgacacgattacgatcgacgactacgaaacgattttcacggggcggagctgggttgactttagcgatcccgatgtgtacaaggccttcgttggcgacttcgatctgtgttgcttcaactcggagacggaattcccggacatcggatcgaaggtgcccggattcctctccgttaccaaagaggtatcgctgactttcattcaagcactgcgtgacgttgttgccgagtttcataacaaccgtaccaaccctttgcttaccctgctcaagagcaaaagtggggagatcaaccccgccacgatgcaaccgattactgagttggttcgcgaactcaatacatctatcgaggatctggatgatgtgcagtcggttcgcaaccatattcgcgagaccatcaaggacgctgcgggcgaaacctactcgccggcgtcactttcgatcaaatctgatttgcccgaggatgccgataagcttttccagtctctacggcttttcgtgggcgaatcagaagaagggtacgagggtgccattcatgaattgagcctgggaggggccaacctcatctacctgacgctcaagcttctggagttcaagtaccagcgcgaaaaactggccatggccaacttcctactaatcgaggagccggaagcgcacatccatacccacatccaaaaaaccctgttcgaccgtatcgcatatagcgatgcgcagatcatttacaccacccattccactcacatctccgaagtgagcaatgtcagtaacgtcaacattctgggacgtcacggctccttctgtgaggcctaccagccagctgcaggccttgagcccgtccaggtcaccagcatccagcgttatcttgatgcggtacgtagcaatctactcttcgccaagagtgtgattctcgtcgaaggtgatgtggaagaaatcctgataccgatactcatcaagcaggtgctgggattaagcgttgatgaactgggcattagcgtcattaacatccgcagtacgggcttcaaaaatgttgcagtcctgttccacgacctgcgcatccgaaagcggtgcgctatcgtcaccgacctcgatcaggcctttttcgacatcacaccactacccaccgatgcccctcctacggtagcgaaaaaagccaaagcggccggttcgcagaggtcaggcttggagcgaaaagctgatctggatgggttcattaccggcaacccttggcttgcggccttctacgccaaacataccttcgaggtcgagtttgtctctgccggcaaccatgaggcagttgttcagactgtcccgaaagtctacacggacgatgcaacgatcaagcaagccaaggcggagctccaatccggagagttagggcaaatgggaagccgaacgctgacgatggccaagcaagagggcaagggatggttcgccatattgcttgccgagtatctcaccactcagattcagatccctgcctacatcttgcaagctattcattttgcacacggccccttctcccactccctgattggcagaatcctccagcatcgcgccgaatgcctgttcagttcctggccttcgttcgctactcagaagaaggatttcctgcttgaggtagagcgctttcagcgaaacgagatcaacctgcaggccctcaaaacagcagccttactcatgataccgggggacgccatcaatgactttctagcggagatgacgtga

SEQ ID NO: 73803 - DNA, 1782 bp, Pseudomonas aeruginosa BWHPSA024
atgttcacctgggatccccaagatcttaatagtgagcaatcagcggccgtcgtagagccctcgagtgttttccttattgcatgccctggcagcggcaagacgcgaaccctgacctacaaaattgcctacgagctgtctcgacgcactgacaagcggatcgttgtagccattacctacactcatcgcgctgccgatgagatccaagagcgtatcgaggacctagggatcgacacctccgggctatggatcggcacgatccatgctttctgcctggagtggatcatcaagccctacggcatttacagccccgcgctcgcccacggctaccgcgtcatcgacacacatgatcgcgaactcctgctgggaagactttgcgagccatatcgaggtgtcacccactgggattgcgattactacgttaccgaagcggggtatcaccttggctgtcctgacactcgaaagcacgacgcaatacacaaggtgctagcggagtactttaaagaacttacagcgagtcgacagatcgacttcgagcagattctgtggcatgcccataccctgatgcgagatcaggtgcacatcgcagttctgctctctcgagtgttttcccatgttctcgtggatgagtatcaggacaccaaaaagatccagtacagccttgtgacgtccatacttcgcgcaggccgtgggcagactaaggcgttcatcgttggcgacccgaaccaagctatctacggctcacttggtgggtacgcgatgccagtggcagattttcgcgcccaggctgggattccgattaaggaaatggcactcagccgtaactatcgatccagcgagcgaatcattagctacttctcgaatttcaacgtgcatgcgacaagtatcaaaagcgcgggcaaacatgccgcgtttcccagcctggtgacctacaaccaggaagtagcacatagcgatgtgcatgacgagctggttagattgattcagttgagtctcgccgccggcaattcacccgaaaatatctgcgtcctaggaccatggtggattctgctggcctcgacaactcgcaagctggtgacgatgctacctgaccagcaattcgatggtccgggcctagttccttttagcaacgatcctgataacttctggttcaaggtctccaagatcttgctgacagagtcctctccgaatctgctcgctcgacgaatgcgctgggcaaatgacgtgatcaaagacctcgacgatttcggcgtcgacaccacacgactgacgccacgcatgctgttgcgggagtgcaacgcactcgaaatcgatgaatcggatggactccgttacctgaaccaggccttcaccgacctattcgagcgtctcaacatcccccaagaaagctttcttccactcccgtcactccgggaggctttcttcagaagctcggcagcgagaattgagaggttgcagagcgctggggcgagctacatcaatcaagtgtcattcttcaagaaagtgttccgtgagcggaccggcataacggtttccaccatccatggggtcaagggggccgagttcgatgttgtcatcgcctttggcctgttggaaggaatggtgccgcacttcaatgaagcgaatgggcacgttgccgcgagcaagctcctctatgtattgagctcacgtgctcgcaaacatcttcacttgatctcagagacgggacgaccgcgaggacggtatggggtctattccccgaccgagtcactcgcggcttgccacttcatctacgactcgaactag

SEQ ID NO: 73804 - DNA, 2337 bp, Pseudomonas aeruginosa BWHPSA023; identical to SEQ ID NO: 73776

SEQ ID NO: 73805 - DNA, 1878 bp, Pseudomonas aeruginosa BWHPSA023; identical to SEQ ID NO: 73777

SEQ ID NO: 73806 - DNA, 1881 bp, Pseudomonas aeruginosa BWHPSA018
gtgtatctcgctgagctgaccataaaaaacttccgcaagctgcgggaagccacgctgaaatttcagcctgggttgaatgtattggtggggccgaacaacgttggaaaaagcgctgtagtggatgcgctgcggacattgctggctgggcatgacgagccctatccccgtctcgatgtgtcggaccggcaccgcccggccgaaggcgacccggctggcgacattaccttccattttgtcttccgcgatctaagccacgacgatgaagcggattttatcgcggcacttaagcctgctgctgacaagaccatggaagcccatatccatatccactataccgacgcagaccctacaggacgtttcagggtgaaacgttggtgcggtgatcaccaggacgtggcccttacttcagacatgatggaaaaccttcggggcgtttatctccagcctctgagggatgccgctcagggacttcgacccagccgcaacagccaattggcacgtctgcttcacctccttacggatgaggctggccgcgacgcgatcaacgaagcattaaaggaactggacgaaaagctccaacagaccgaagcgatccagaacacccataccgcgatttcgtccagacacggcctgatgatgggcgatcaattggcacaaacactcgctgttgggcttagcgcgacggactttcagcggttatctgctcggctttccctcacggctcaatcaatggaaattgagcagaatggcctgggtttcaacaacctgatttttatggcggtagtgctgagtgagctggccaagaatccggacgccgcgtatcgcagcctgattgttgaagagccggaagcccatttgcatcctcaactgcagcgcgtgttgttgcgctatcttgcgggcgtgccaacgagcgaaggtgaaaaggcagtgcagctgttcgtcaccagtcactcccccaattttgccagtaactccaagctcgaatccctggtgtgtttggtagagaacgatgctggcgtagagaccttcttcccgcgcgacatcaaattcggtaagggcaaacgcgaaaagcttgagcgttacctggacgtgacccgtgccgagttattttttgctcgccgggtcatttttgtggaaggcgccgccgaactcatgctcgtcgatgcccttgccaagctcatggggcttgatctgcgagagttcggagtcagcctgatcagtgttgagggactgaatttcgattccttcctacccctgttcggtgaaaacggacttcggattcccgttgccgtcgtaaccgacgccgatcctttcgaggaggaagaggctcaggatcctacggaacgtccgctggatgtaggagacatcgaagacattctcgctgaggccgcgtacctcgaagaaacagatgcccctgacgctgaagatccattggctgagcctgcgaagaaaaagaagaagctcaaacggaaagaagtctatccgtcgttgggcgacgaagtgaggctgtcgagcaacacccttaagatgaaggaattggaagacgctttcgtcaaagtgttccacggtttgaaaacactggaatacgacttggcattgcttgaggcgaaccgtgacccgatgctcaaggccttagctgaccctcacccgatcatttcggcagcgctacgcaagatcgtcgaggttcagccagacaacactgcgaaggcgaagacactgttttgcggcatgttcgagcgtaaagcgagtagcggtaatctgcaaaagggtcggtttgcccaggctttggctgaacagattgccagcacgccaacgtgcgaagtgcctgactatctccgcaaagcgattgagcatgtctgccagggagtgatcaaaccatga

SEQ ID NO: 73807 - DNA, 1719 bp, Pseudomonas aeruginosa BWHPSA018
atgaagctctccgatgagcagaaagacataatcaatgcgcctctagagcctatcgctgtcacggcctgcgcaggtagcggcaagacagcaacagcgatcaggcgcctgattgccgtccggcaaaaaatggaaaacagccgaggtcgagttgtccttttgtctttctcgaatgttgcggtcaataccttcaacaaaggctacgcccagcttgcttcaaacctaccagatgacgccaaccgcaaacgcgtggaagtggacacgctcgatggtttcttcacccagcatgtactgcgcccccatgcttaccggacaatgtcctcaggccaggctgcgtatcttgtgtccggtacagagccgttcctggctaactttaaatactggcctgaggaaggacgtccaacctccattaaggacgtcaaagtgggcctggagcatgggaacttctacttctttactggtacccacgatgatttggtgaggctcgatactgccaaggcatcagatacgatcaagcgtctgggccgcatcggggcctacacgcacgagcttggccggtattgggtataccgtactttgatagggcaacctgcagttttgcgagcgcttgccgtccgctacccgcagattttggtcgatgaggcccaggacttgggcaccgtgcaccaggccattttggaattgctcatcaaggctggagttcaagtctcgctcatcggtgacgttaaccaggggatttacggcttcgcaggagctgacggttcattcctgagcacctattacaaccgtgcaggggtgaataattacaagctcacgcgcaattatcgctcactgcctccaatcatcagcatcgctaattcgctctgtggccgcgaggatgaagccgatcgggagcctgaaaacggaggggcgtacttcgtcgggtacaacgactccgagcttcctaagctttttgaatcgttcaaagcgcaaattgatgacctaggcatgcaatatcaagatgcggtgatactcagtcgggggagtgaccgggcggtagtactttccggcaaagccgctccccccggtcaaggtacggttgctctgttcaccgaagcagcattgctccgagaccagcagggccgctatcaagagtgctttaagctagtatgccgagcggtggtgggtttgatggagcagccgccgcatggtctcagcacccatctccagggttccccgcaggatgtatcgttgcttgggcttagacggttactgtggagcttcatccgcaacgctgaggccgggctaccttcatctactctattggccaaaaccgagtggcaccccaaattactgaccaatatcaaaaagcttctcgcgacgaccgaagggctatatggcttgaaggccgcggacaagctgggcaacaagctggctaaaaccggattgttggatcttcccctgactggtgcggtggaggagaaagatcggagcccaggaatcagggtagaaaccatccatcaggtgaagggcgagtctatcggtgcggttctgtacgtagccaaaaaaccgaacgtcgacgccttgcttgccggcacccttaccgaagaaggtcgcatcggatatgtcgctgtgaccagagctcggaacctgttctggctggccgtacctcatacctgcctgaaagcactgcgcccaaatctgattgccgctggtttcgaagagtttcctgcccgtaggtag

SEQ ID NO: 73808 - DNA, 1707 bp, Pseudomonas aeruginosa BWHPSA017; identical to SEQ ID NO: 73780

SEQ ID NO: 73809 - DNA, 1641 bp, Pseudomonas aeruginosa BWHPSA017; identical to SEQ ID NO: 73781

SEQ ID NO: 73810 - DNA, 1944 bp, Pseudomonas aeruginosa BWHPSA009
atgaaaatccagcgaatcacagctcaaaactttcgaatgctgaagaactcaaaattggaccttcagtcaagcctgtcactgctcataggaaggaacaatagcggcaaaacttcacttcttatcctctttgaaaaattctacagcaacaattgcaactttacatttgacgatttccccctcgatcaccgcaacgaactactaaatataacggagagtacggatgaaaatagcctagccatacgaatgcttttggaaatcgaatactctgagaccgacgacttaaaccacctatcgcactttatacttgacctggacgacacttcaaactctataaagatattgtttgagtgcacaattgacaaaaaaacgcttctcaaagacttagaggaatcaagcgctgaaaaaagccgatacattagaaaatacatcggagattaccttcgaacccatatctatgctttagataacgaagagagcatatttgactcaagagagaaattagtccccagagaattaaaaaaggtaaaggaacttataaatttcgaaataatccatgcgaaacgggatgttgcaagttcagagggcggcaagaaaatactttccaaactgaccactcaatacttcaacaagaagaatagcgaaccttctttattcgacccaataaatgacctaatcattgacatggatgaaagcctagaacaggcttacatgacattttttgaaaaattcctagaaagctcaaaaaacttcctaacaatagacaatataaaagtaatatccaaccttgaaagcaatgagatattagaaaacagctctcaagttgtttacggagcaaatcaaagctttttacctgaaacgtttaacggcttaggccacatgaatatcctctatttacttttaacaatagagataaaaaaagaatcattcataaaaaatcacaggcagataaacctgttattcatagaagaacccgaggcccacacgcatcctcagatgcagtatattttctccaacaagatcaagtcattgcttgccgaaatagaaaaccttcaaacagtcatcactacccactcctcacacatagtatcgcagtgcgacttcaaagatatacgatatttcaaatgtgcaaattcacaagtggaaataataaacttccactcagagttaaaacttaagcactcaaacgacctcgactcctttaatttcatcgagcaatacctaacactgggatcatgtgagcttttcttcgccagcaaagttatatttatcgaagggatttcagaaagaatattatggccatatttcgtggatgcctttgacgctaaaaacaaaggaacagcaaattacacgcctatttcatcacaaaatataacaatacttgaggcaggagctaacgcaaaagcattccagcctttcctagaattacttgaaataaaaacccttataataaccgacatcgacacaacaagatacgagaaaaccaacgacgaaaaaaaaggagtctacgtggcatgcccagttttacacggaacccacaccagcaacgcaactataaaatattacctgtctgcgccggagcataaagaagaagacaaattcaaagaatggtttgaaaaattcatcaataacgaaattaaagaaaaaaacagcttcattaaagtctgctatcaaaaatcagaagaaggctaccacggtcgaagcttcgaagacgctttttataatctaaacaaagaaaccataaaaaaatatattgaaaatctatctggaacacaaaatatagacaagatagaaacttattcagacccttatgagaccatagaaaaaatagtttcaaagaaatccacctttgcctcttcgctactataccttgcattaacaaatcacgaaatcaattggaaaacccctcaatacatcaaggatggcctagagtggatatcacaatga

SEQ ID NO: 73811 - DNA, 1983 bp, Pseudomonas aeruginosa BWHPSA009
atgactccgtacgacgaaattcaagttgcaattgagagtaaaacaaacttcgtcttacagggcggtgcaggcagtggaaaaactgaaacattaaaagtcacgctagaatacatatcaacacacgccccaacaaaaagagtagcatgtataactcacaccaacttggcagcagaagaaatagccagccgagttacaggggagcattacataggaacaattcactccttccttgccagcctaataaaagactacaaaaaaaacataaaggaaattatagacattctattcatactaaaaaaaacatatgaatataaaaaaaccgagggagaagcggcgcataaaagctataaaaaggcgtatgaaaaatatcaaacaaggctatatagcctaaaaaaagaaaaaatagataagtgcatagacaaaaggcaattcgacaaagatcctgataattacacacatgaactgaatgcaaaaattgacgacctaaacctatatataagaaaaagaatcgaatccactccgacacaggcaataaattacaacgaatcaccgttcgatagtcttgatgacttaagttacggacatgatggactgattcagctatctgcagaattaataaaacgacatagaaagctacgacgaatcctatccgatagatatgactatatattcatcgacgaataccaagacacatcacccattattattgattcactactgacaaaattcggtgaaagatcaccagtattcggtctctttggtgactcaatgcaaggaatctatgaggatggtataggtgacgtaaacgagtatataaaaaaagcgattctaagaaaaatcaagaaacccgacaactatcgatgctcagaacaagttattcgcttcatcaatcgattccgaactgatgacctacaacaagaactagcattaaaaaaagtagagggaaatttagagtcagtagaaaatcgacaaggattaaccaaacttttctacatagtcatcgataacaaaccgcactctcgcagctcggcagaagagaagtctagctatatcaacacaatccatagcctcatcgaaactgcaaaaggagaaatggttggccccttcagaattctcatgttaactaacaaggcaattgccgaaaaggcagggttcggaaagttatatgaaattttctctaaccgctttggccgcaacctaaaggatcaacttgaaaaaactcttaacacacttcaattcaatgaaatatttaaccttataaagaacaaggaagacaataaaacctgggcaacaatagagaacatcaaaaagtccggctatcggctcgatagcgcagcgtcgaaaaaaaccttatccgcatcaataaaaaaacttaccgaccccatgctttcagcaaatgaagcgatttctaatttactttcattaagaattctttccgaagcgccgtcccgagcaagattcataacaaacagcaacattttccttgaaagcttaaataaaaactccaaataccaggatttcaaactcctatatactaaaggacataacactttcgcaaaaatacaaaaagagaacttcgacattgacgagtacgaattcaatgaacttgagaaggacctgaccaaagaaatttttatacaatcattgcttgcagacagtttaaagctatctgaaatagtcaactattttcgatatctaaatgaagaatctgaatacatcacgatacacaaaacaaaaggaaccggaattaagaataccatcgtagtatttgaagagtttttttggcaagactacaagttcaatgaaattttcacagaaaagcattttccagaaatatctcccacaagtaaaaaaattctatatgtggctacctctcgaaccatttcaaatctttattgcatacgtgcaatatcatcttctgaaaaagaagatattggaaagttctttgatgtgtcgcaggagataacaattgaccagatttaa

SEQ ID NO: 73812 - DNA, 1905 bp, Pseudomonas aeruginosa BWHPSA006; identical to SEQ ID NO: 72778

SEQ ID NO: 73813 - DNA, 1551 bp, Pseudomonas aeruginosa BWHPSA006; identical to SEQ ID NO: 73783

SEQ ID NO: 73814 - DNA, 2139 bp, Pseudomonas aeruginosa BWHPSA005; identical to SEQ ID NO: 73802

SEQ ID NO: 73815 - DNA, 1782 bp, Pseudomonas aeruginosa BWHPSA005; identical to SEQ ID NO: 73803

SEQ ID NO: 73816 - DNA, 1707 bp, Pseudomonas aeruginosa BWHPSA003; identical to SEQ ID NO: 73780

SEQ ID NO: 73817 - DNA, 1641 bp, Pseudomonas aeruginosa BWHPSA003; identical to SEQ ID NO: 73781

SEQ ID NO: 73818 - DNA, 1839 bp, Pseudomonas aeruginosa 6077
atgcgtgtagcccggatagaaatagagaacttcaggggcataaaacaggcgaagctgttatttcccaagcatggcgttcttatcggcgacaacaataccggaaagacaacgatcctggaggccctggatctcgttcttgggccggatcgcctcaatcgccaacccgcaattgacgagcatgacttcttcggaggcatttatgctcaaatgcccgacgcccctccggaaaacggtggagccgacggcgctgctccgcccgagcctggtgaagaagtcgcagaggactcggcaccggactcggcaccgaaaatcgtcatagaggcgacgatcgccgacctgactgacgagcagaaggggaaatttggagattacatcgaattctgggactcggctgtggacaagttctacgaggcgcccaatcctgccggcgttgatgctgcttcgatcacagaggcactccgcgttactttccatggttggtacgacaaagaagaggatgacttcgagggtgccacctacttcacccgcagcctcaccgaaggcgacaagcccgacccgttttccaggaagcacaagcagctttgtggcttcctatacctccgctccattcgcaccggctcgcgagcccttagcctagaacgcggcagcttgctcgacatcattctgcgcttgaaagaggtccggccgcagatgtgggaggctactctcaccacactttccaatattgtggtcgccagcgatccagcgctgggcatctcccctgtattagagagtatcaacacggcgctgaagaaatatgtccccaaagaatggggggttgagcctcatctcaaggtgtcgaatctcactcgcgaacacctaagaaaggttattacagccttcatcgccaccggcgacggcatgcatgcggcaccgttctaccggcaaggtacaggcacgatcaacatgcttgtcctggcaatgctgtcccagatcgccgagagcaagcagaacgtcatatttgccatggaggaacctgaaacagctatacctccctatgcgcagaaacggatcattcacgaagtacgcaaactggcatcccaagccctctttacgtcccattcgccctatgtgctagaggagttcgagacggatgaaaccgttgtgctcgctcgtgacgcttcgggccggatggggcaaagggctattgcgctgcccgacaatgtgaaaccgaagcgctacaggcaggagtttcgcacccgcttctgtgaaggtttacttgctcgccgcgttcttctggcggaaggaccaactgagtattcagcgttcccggtggtgtgccgacgcctcgcagagaccaatccaaagagctatctctccctcgaagcgctcgggatatgtacagttgacgcagacggcgagaaaaacgtccccggcatggcgcagctctacaaagctctggggaagcgaacctttgcgatttgcgacaagcaagaggaagcaaacaaggcactaattgaggcacaggtcgaactgctgctcatgcacgacgaaaagggctttgaggatttggtcctgaaaggcacaacggaagaggccctgaagcgatttgcaaagcagttggactggccaacacacttggcgcagaaatacccggatccggaagcacaggcggaagctgcactgagagattacttcttttggtcgaagggcaactggggcactgccgactttcttgctcaatgcagcgaagaagagattccggagtggcttcgtgatgccgcgctgaaattgaaagcggcttgtacgcccgctcacgctgaagcagacgcggaagctggtgccgatggaactgactga

SEQ ID NO: 73819 - DNA, 1815 bp, Pseudomonas aeruginosa 6077
atggaactgactgagggtcaactgaatgtaatggagtcggatgggcacctgcttgtcacaggtggacctgggtcgggtaagacaaccatctccatcatcaaggcgtcccagatcgcggagcaacatgttcgcccaggtcagaaaattctgtttctcagcttcgcgcgtgcgactgtttcccgcgtggtggaggccatcgaatacgaacagaagatcccggccgccacgaaaaatttcatcgacgtcgatacctatcatgcattcttctggcgcaccttaaagacacatggctatctgataggcctgccccgtagattagggattctcaccccacccaatgaggccatcgctctctcgggggtcaggtcgggcttcccagccagaaatctcacggatgaacagaaggaagccaagaaagctgctgaagcggcggagcgtatccgtctggcaacgaacgaggggcggatttgcttcgacctcttcgctccgtatgtgggggatattctgcatggtagcgagcgcatccggcgtctcatcgcaaccatgtatccggtcatcattcttgacgagtttcaggacaccaacggcgcgcaatggcgcgtggttcaggcgttgggcaagtcgtgcaggctgatcgccctcgccgacccagagcaacgaatttacgactggataggtgccgatcccgcacgccttgatcatttccgggatgcattcgccccaacggcggttgacctcagtaccgacaatcacagaagcgcagggacggaaattgccatttttggcaatgacctactcaccggtgaatttcgccagcaagaatacaagggtgtctcgtttgatgtctttgacccgttttccggtccagcgatgaccaagctggtgacaacaatctatgcggctcgccagcgtttgatgactcaaggcattgacaactggtctctggcgattcttgttccgaccaagaaattgacgcgcctggtgtctgacgctttgcgtcaccctccggccgggatgacggaggtgtttcacacggcaaccatcgagatggaggccgcgatccttggagctgaagtcattggccttttgatgcaaccttccggagatagtcgtcacttcgcgcagttcattgacctattgtgcaactacttccaaggcaaagatgggagtgagccgacgcaaggggcgttgaaggaggctgcgagcatccggggcgcttatgaagagttgttggcaagccgtgctaatggcaaagccatccgcaggaacagtatcctcgtcaacgtgttgacggtatacgatcaggttcgcgcccttgtcttgacgggcgatccagacaaggattggcgcgctgtgcggcgcgttctggaagatggtgcatgcaaacgcctgaaagagatcgcggaggaggttcgaaacatccgcctactggaccgaggtactcaacttcgccaacaactttctcaggattggcgagacaacggatatcgcaatgcgctggcgatcattcgacaagccttcgtccaagagcacttttctacgagcgctaagcccgaatccggcgttgtcgtgatgaacatgcacaaagcgaaggggaaacagttcgacgaggtaatcatttttgaaggttggccgaagcgggcaaaagggaagatcgtcgcaaacacagaccgcattgtgcgcttcaactccagagatcaaatcaatgaccaagcacgacagaactttcgggtcagtgtcacgagagggaggcggcagacgacgatcttgacgcctaaaggcgatccttgcgtgttgctcgttggtgaggcgtga

SEQ ID NO: 73820 - DNA, 1905 bp, Pseudomonas aeruginosa 6077; identical to SEQ ID NO: 72778

SEQ ID NO: 73821 - DNA, 1551 bp, Pseudomonas aeruginosa 6077; identical to SEQ ID NO: 73783

SEQ ID NO: 73822 - DNA, 1905 bp, Pseudomonas aeruginosa U2504; identical to SEQ ID NO: 72778

SEQ ID NO: 73823 - DNA, 1551 bp, Pseudomonas aeruginosa U2504; identical to SEQ ID NO: 73783

SEQ ID NO: 73824 - DNA, 1905 bp, Pseudomonas aeruginosa JJ692; identical to SEQ ID NO: 72778

SEQ ID NO: 73825 - DNA, 1551 bp, Pseudomonas aeruginosa JJ692; identical to SEQ ID NO: 73783

SEQ ID NO: 73826 - DNA, 1785 bp, Pseudomonas aeruginosa CF18; identical to SEQ ID NO: 71894

SEQ ID NO: 73827 - DNA, 1815 bp, Pseudomonas aeruginosa CF18
atgccgtcgcgtaacgtcggtacagcctacctggcgcaggctgccgagttggctggaaatccagggcagttggcagcttacaactctcaaggacattgtgtggtactcgctggtcccgggagcggtaagaccaagacactcgtcctaaagctcgcccgcatcctggccgaagacgtcgaggcccctcgtggcgttgcgtgcatcacttatagccaggagtgcgctcgcgaactcgctcgccgaattgaaaacttgggacttcagcaggcacctaatcttttcattggtacggtccatgggttctgtctgcgtcatctcttgatgccgtatggacgcctggccggcctgcccatatctttcccactttcggtagccactcaacgagtcagtgatcggttgttgaagcaaactggagatgcgcttttcggccagaaccatccgtacaaagttattgacctcgggcggcatcgccgttccgtgctcaatcgaaatagcgtcgcttggcgtagcgaggaggaactcgctgcctgggccgaggcctacgaggccgctctgcgcgacgaggggctgattgactacgatgacatggttgtcttcggccagcgtttgatcgccgagcacgactgggtactacctctggttcaggcaaaattccccgtgctcgcggtggatgagtaccaggatttaggcgtggcactgcatcgcatcgtcaaacgccttgccttcgacgggggtgtccgacttttcgctgtcggggatgcggatcagtcgatatatggatttacgggagctgatggcgcgttgctcatggaattggcggctcgcagagacattgagcctgtccagcttcaattaaattaccgttctggtgcagggatcgtgactgcgtcagagatggcgcttggagaagcccgaggctatcaagcgagcgatcctgcgcgacaaacgaccatcgaatttgtcctgcgcccgggtggtatggcggaccaggctgcgcacgccgtcgcgcagatcattccggcggccttagcctccaagccgggacgaacactgggcgatatcgcgatcctatacaaagactatcgcgcaggcgatatcgtggctgaagctgtggcaaccggtggtctcgatcacatccgtgtggataccgcagcaccttaccgcaaggttgccctaacaagttgggtagaagattgtgcggcgtggtgcgcgggtggctggcgtgttggacgcccacaattgcgtggactactcgaccgctatcgcgcatttcatcgggcgagcttggacgattcacaggccaagcgcgaagagcaagagctaaccgccttgctatgggagctgcgtgctgaccagcaacctgcgcgagaatttgttgcttcgctgcgcaacggtgtagtggatcatctgctggcggctgaattggcgctcgctgatcagaaggagcaactggatcgcatgacggcagcgctcgctgaaggcggtgcactggcttcgctagacatcacgagtttgggcggtcgggacggttcgcccgatcacctgaatctgctgacactgcattccgcaaagggctgtgagtacgacgtcgtcatcatggttggactcgacctcggaaatctgccgtggcgcaatgaaactccagagaagttgcgcgaaagtcgccggctcttctatgtgggactcacacgtgctcgcgacgaggtccacatgctgtattcgggcttcgttgatggccgctatggccctatgcgctttgggcgctcgccattccttgatgagctggaggcgcgaatgcgtgccgctggcatttga

SEQ ID NO: 73828 - DNA, 1944 bp, Pseudomonas aeruginosa 62; identical to SEQ ID NO: 73810

SEQ ID NO: 73829 - DNA, 1983 bp, Pseudomonas aeruginosa 62; identical to SEQ ID NO: 73811

SEQ ID NO: 73830 - DNA, 2115 bp, Pseudomonas aeruginosa PAO1-VE2; identical to SEQ ID NO: 72562

SEQ ID NO: 73831 - DNA, 429 bp, Pseudomonas aeruginosa PAO1-VE2; identical to SEQ ID NO: 72561

SEQ ID NO: 73832 - DNA, 2115 bp, Pseudomonas aeruginosa PAO1-VE13; identical to SEQ ID NO: 72562

SEQ ID NO: 73833 - DNA, 429 bp, Pseudomonas aeruginosa PAO1-VE13; identical to SEQ ID NO: 72561

SEQ ID NO: 73834 - DNA, 2085 bp, Klebsiella pneumoniae 909957
atgagaattgagaaagtaaaggtcgaaggtttccgactcctccaggatgttgagatcatgctggaagatagctcgactgtggtagtcggtcgaaacaatagcggaaagacttctctcaccgatatctttgatcgcttcattggccaaagtggagctcgcttccggctggaggacttctccgcagcttcacggacaaaattcttcgaagcaaaaaatctaagggaaagtggagcaaaacctgaagatgtgctggcagcgtttccaatgatcgccctcacgctgacattcgcgtacgacgccgccgcacccaatctaggccccctggctccatttgtcatcgacttggatgtcacatgcacaaaggcattggtgcgtgtggagtataagcctatcttagaaacgctccccatcctgttcgacatcgctgcgcccgcggaaggcgtagataaaaacgctcatttcctcagatcattgcgtgacacgattcccaaggcatattccataaacgtcagcgccattgatccgacggatcaaaccaatcgacgtgtttttgaaggagtctctgctctttcggctctcgtccaatgtaattttgtccgagcacagcgcaccctcgaccacgctagccaaggcgacgctgacgtgatcggaaaattgctgagcacgcttttcaagacagcctcggcaccaacagccgccgccgccgatcaagaactggcagcgaagctgaagacttccgtggaagagatcgaacgcggcgttcaaggggactttgacgcaatgcttaagaagctccttccgacgatggaggttctgggcttcccgagtctcaatgacgccgagctaaggccagaaacgtcgctcaacgtcgaggcgcttctgtcggaccacacaagggtagtatacgcgggcgcagacggagttcaccttcccgaaggctacaacggtctagggacgcgaaatctcatttatatgctcttgcagctggagagctaccacaagatctatcgcgcaaagccaacccgccccgtcacgcacctaattttcatcgaagaaccagaagctcacctacatcctcagatgcaagaagtgttcatcaatcaactgaacatcgcaatcaaaaaactctctgccacgtatccgcacgagcccacgtggaaagtacagtttttgatcacgacacattcaccgcacgtggcgaatgctgcctcattcgaggccgtacgttatttcttgaacgaggcacccaaaacgccgaatgcgcggcgaactaaggtcaaggacttcaagaaggggatggcaaatatatcggctgatgaccaggacttcctccatcaatacatgaccttaaccaagtgtgacctctactttgccgacaaggcaattatggtagagggaaccactgagcgacttctgatgccgcgactgtgctgtctcgtggacaagtcactagacgacaaacacaagctggccaggcagtacgtaacctgcgttgaggtcggtggtgcgtattctcatatcttttaccccttgctggacatccttgaactcaagacgctagttgtcacggatttggattccaccaaaccaattgagaaagagaataagaagggaaaagttattactacgtgggagaagtgccctgtagctgaaggtcagcgcacatcaaatgccgcaatcaaggattggttccgcccacccaacaccaaggatgcagacggctggcagatctcgccgggtgagttgcttgtaaaatctgcaaaagaaaagatcagtggttgccgccgcatcgcgtatcagattccagaggtccccgaagcagccagctgcgcgcgaagttatgaagacgcgctcgtcctcgccaacccggatcgattcgaatggcctaaggagcaagacgaggccaccgaagcatgggacatcgcaaaggggctcgcgaaagcagataccgctttgcggttcgcgattcgcgaaaaggagtggaaggtgccgcgatatatcgaggaaggtctcgtgtggctatccgagccaccaccacctccagaacaagccctagaagtgaaaaacgccttggtggtcgcatga

SEQ ID NO: 73835 - DNA, 1734 bp, Klebsiella pneumoniae 909957
atgacaggccaagttaaaaatcccgctcttgaggcagcgcaacaggctcagacgaaaatcaacgaagcccttgacgcaggccgcagctttaggctcgaagccggcgcaggtgcaggcaaaacctattctctggtcacagcgataaaaaggctgatcgcggagcgcgggcctgcgcttgttcaatccagacaaaaagttgcctgcatcaccttcactgaggtggctcggaatgagatcgcgcaggaaattgaggaacatcccgcaatcctggtcgacacaatccatgggttctcctgggcttttttacgccagtttcagaaagctctgagagacagcctggctgagatggaggagcgaaaggagaagatcgagaaaggcggcggagtcgatataaaaccagtggtctacgacttcggcttttttggggtcgatgcagacaaaataacgcttagccacgacgatatcccagaactgatggcgaagctcctataccaagagaaattcaggcgcatcttaagtcaacagtttccagtgattttcattgatgagtatcaggacacgcatcgccagttcatggagtcaatcacggacaactttctaagatccgcaacaggtcctcttgtgggactctttggagatcactggcaaaccatttatcgaagtgagtatgagctggcgcagtatcccatcgaagagatcgccaaaggctcaaacttccggtctgtgccagccatcgtagacgtactaaacaacctgcgccctgaattacagcagtctgttcatgacccggaagcaaagggagaagcaagattctttcacaccaactcctaccgtggcgatcggacaagtgacaggcattccaaaggggatctaccaccagacttggcgcgaaaaagccgagaagcgttgacgcagcgccttcaggccgaaggatgggagatgagcaaaacgaaggtccttatgctcactcacaacgtcttggctgcggagcaaggctatccaaatatcgcagagatctttagcgggcgcaccgaccttttcgcgaaaaaagaagatcctacgatcaagttcttcgccgaagttgtcgagccgatgtgcgcggcttatgcctcttcccgctatggagaaatgttcaaattacttggttctggtcccgcgattgtcaaacacgaggacaaggcgaattggcgtcgggatatggatgctctccagaagctacgggcagagggcacaatcggccaagttgtcgattttttgcgatcaactaagcgaccatccccccccgaccgcgtcctgcggcgtgaggacgagcttaaagcactagatggcaccccaatccccaaggagtcttcctcgctgcaacgttacagtaagcttcgggacgttccatattgggaagtcatcgaggtagtcaagttcattgagaagcaaacctcctttgcaacacagcacagcgtcaaaggtgccgagtttgaaaacgtcctggtcgtattgggcggcggctggaatcactataactggccacaacttcttgaattgattaacaccaaggcgttgaatgccaagaacactaagggcttctaccgcgcccgcaatctcttttacgtgtccatatctcgcccgatgacccgtctcgctgtgcttgcgacccaaactcttcctgcccccgcgctccaagcagtcaaccatctattcggggccggtaacgtcgaagaacttaaagtgatgacgtga

SEQ ID NO: 73836 - DNA, 2190 bp, Staphylococcus aureus subsp. aureus Z172; identical to SEQ ID NO: 71904

SEQ ID NO: 73837 - DNA, 1794 bp, Staphylococcus aureus subsp. aureus Z172; identical to SEQ ID NO: 71697

SEQ ID NO: 73838 - DNA, 2109 bp, Acinetobacter gyllenbergii NIPH 230; identical to SEQ ID NO: 73238

SEQ ID NO: 73839 - DNA, 1605 bp, Acinetobacter gyllenbergii NIPH 230
atgagtgagattctaaacaatccagcaataattgctgctcaagtagctgaagcaaaaattaatgcagctataaaagaagggagaagctttcggctagaagctggtgcaggtgcagggaaaacattttctttagttcatgccctaaaatcaattattaaagaacgtggtacatcactaatgcaagcaggtaaaaaagtagcttgtattacttataccgaagttgcaagaaatgagattgctcaggaaattgaagatcatccagcaattttagtcgatactatccatggattctcatgggcttttatgcgccaatttcaaaaagctataagagagattcttattgaagatcatttaagaaaagaaaaagttgaacaaggtggtggcattggatctaaatcagtggaatatgagttgggcttctttggtgttaatgatcagaaaattacactgagtcatgatgatattccaatgatgatggccaaattactaagtaaagaaaagtttaggcaaatatttagcaatcagtttccagtagtttttattgatgaatatcaagatacaaatcgccaatttatggaggctattacagagtatttcttaaaaccaaaagtgggtccgctgtttggtctttttggggatcattggcagactatttatggtaatgaatatgggttagcagagtatccaattgaagagattgctaaaggatcaaattttcgatcagttccagcaattgtaaatatattgaataatttaagaccagacttaccgcaagctgtaagcttaccagatgcaaaaggtgaggctagattctttcatacaaattcttatagggggacacggactaatgagaggcattcaaaagaggatttgccaatagatatagctcgatctactcgtgcaagtttgatacagagactaaaaaatgagggttgggatattgaaaaaactaaaatattgatgttaagccataatgttttagcttctgaacaaggatatcctcaattaattaaagtgtttgaaggacgtaatgatcaatttgctaaaaaagaagacccagtaataaaattttttgcagaaatagttgaaccaatgagtgccaactatggcttatcaaattatggagagatgtttaaaatctttggctcaaagccagcaataactaagcatgaagataaatcttgttggcgccgagatatggatcaattattaaaactaaggcaagaagggacaatagggcaagttatagaccatttaaagcatacaaaacgtccatctcctccagacagagtacttagacgagacgatgagcttatttcatttaggaactcgcctgacacggaaatgtcttcaaaactattacgttataataaattaagagaaatcccatataaggaagtaattgaggttacaaagtttattgaaaagcagactccatttgcaacgcagcatagtgttaagggcgctgagtttgagaatgtattagtgattttaggtggcggatggaataattataagtggccacagctctttgagttgcttgagactaaaaagttgactacggcaaacttcgatggttttgggactgttctaaattttgtgtaa

SEQ ID NO: 73840 - DNA, 2313 bp, Acinetobacter gyllenbergii NIPH 230
gtgcatcttcattcgtatcgtcttaagaattttcgacgcctgaaagacactcatattgagctagctgatgacatatcgatatttgtaggatctaataacagcggaaaaacttcagcaacacaggctatccagtcatttattatgggtggaaaggatcgttttagcctttatgatttcagctcatcttgttggagactcttcgacgaggctggaggtgttaacctgagtgagccagttactggaggtttttcacttccaagcatagagcttgatctctggttcgaagtagctgcgtcagacctctatctagtgattccccttcttccgagtacagcatgggaaggtactaaagttggcatacgggtttcgcttgcagcaagaaatccagttaacctgatccagaattaccaagaagttaagactaaaggtacacaacaggtcgcggaactgccgccagggtcacaatatgcaccttggcctcgctccttgactgactatcttcagcgcgagctcaggagcgagtatgaactgcgttactttattttggatcgaactcaatttgatgaaagttttcaagagattggagactatattccagaagaattaggtggagagccaggtgggggcacaatcctaaaatctcttattcatattgacagtttgggggctcaacgacatttggctgatcctaatccagaagctggcgggagatcagaagatttatcaaagcgtttaagccgtttctacaagcgtaatcttaatcaaagacaagaagatcacacagctctcaaagctttgtttgagtctgaacaggcacttaacatccacctagatggggtatttaagccgatgcttgatcggctcgcaaagctgggctatccaggcatcaataacccgcgattgaaaattatgtcggcactcgacccagcccacgtcatgagccaagacgcacgtgtccactatcagattggagatggtgaagaggctaccacactccctgatagttacaacgggctcggattcaagaatctaatttatatggtagtggagattctggatgcccaagcaagatgggtgatgatggacaatcgtcctccattgcacctgattttcgtggaggaaccagaggcccatttgcatgctcagctccagcaggccttcattcgaaatgtgcttgaacttctgcatatagaagacgacgatgatagtattttcggtagtcaaatggtgataacaactcactctccacatattctatatgaacgaggattcaagccaatacgctacttccgccgtaagaaaattggcaacgaacagatgaccgaggtcataaacttatctgccttttatcagacccaaccagatgatcgggattttttagaacgatatttaaagctaactcattgtgatctcttcttctcagatgcagctattcttgttgaaggtaatgttgaacgattgctattacctataatgattcagaagacggccaagactcttcgatcagcttgcctatgtattttggaggttggaggggcttttggccatcgtttccagtcgctgatagagtttcttggtctaacgacactgattgttactgatattgatagtgttgcgcttgtggtgccagaatccgtaaccgaagatgatgacgaggaagtagaggaatttgaggtccctgttgatggtatagtgggagtcactgtgaaggcccagaacaatggtcaaaatcctgttggtggacgggagggaacccactctcaaaggaaatatggtaaggcttgcttacccagtgaactaggggcagcgacatcgaatcaaaccctcataaaatggcttcctggtaagctaacaattgatgacttgcataacgcttccgaacaagaaaaaattcatgagcttgaagatggtgcaaaggttcgtgttgcttatcagacagaacgagcagtcacatggaatggcactactgaaaacctttgtggacgtacacttgaggaggacttcggtcttgaaaacgcagagtggtctcaagcaacagcgagaaagcctcttggtctgattgtgcaagggggagccgttgatcccaaagagcttgccagaggcctccataagaaagtttcgcgtaaaagtttcgataagacgaagtttgcactcgctctactcacagaaaatgaagctcagtggaatgttccgaaatatattcaagacggccttgtttggttgagggatgaagtacgtattgaacttgagactgtactacccgaaatagttcataatgccgaagcagtcgtaataggtgaacaacatgagtag

SEQ ID NO: 73841 - DNA, 1932 bp, Acinetobacter gyllenbergii NIPH 230
atgagtagccgagcaagtaaacccgacactcaggcggacctagatctgcgaacctgccttagtgagattccaccacgcagtttcataatgaaagctggtgctggttctggaaaaaccacctcactcattaaaggactgtcgtcggctattcaaatacatggtgagagattgagaaaatcccgtcagcgtattgcctgtattacatacactgagatcgctgctggagaaatatggagggatgtcagcaatgatccgatggttcatgtttcaacaattcatagcttcatgtggctactagctaaaccatttcaaaaagatattcgtatttgggtgtctggacgcatagctgagaaaattgaggcacttgaacataaacaggctacctatggtcctagagttcaacagcgtacaaaagataaagatacccgagacctagagcgtcttcacaggcagtcgggtcgtattagtgcggtcaaaggttttcgatacggaacaggtagcgattatattaaggggattttagggcacgacgatattttgaggcttgttccttaccttatagctgagcgccctctatttcgaactctacttgcacatcaatttcccttcgtatttgtagacgagagtcaagacactacggcagaggtcatagaggcattaaagattgtcgaacgtgagcctggcatttcaatttgtctcggtttctttggtgatccaatgcaacgaatttatgccacgggaagtggtttggttgaagcagcgcaaaattgggctgatattcccaaaccagaaaactttcgatgttcagccaaggttttgaatctcgccaacgctattaggcgcgatggtgatgaccttgttcaggtttcaggcgaacgtcttggccctgagggcatcgtgtcaattcctgaaggttcggctcacctttttattttgccggcggatgataggcgagatgcaaatttggttcgagttcgtgactggatggcggcgcaaactgatgatattcactggagacttaatgagcatgatcaggttaaacttcttgtcattgttcaccagatggccgcgaagcgcttaggattcggtgaactttttacggcactcaactctaaggcaccgacagcgttcaaagatggttttctggatggttctgcgtggcctcttacgccgttcgttaaattcttgattccaatagctgttgcccataggcaagatcagcaactcgaagtaatgcgacttatccgacagtattccccccttcttgagaaagacactctagttggggtgaatgtcgcagaaaggcttaaaatacttggagagcttgtggtttcaattgcagaaggtatagctggaaattcaaatgtcactattggtgaacttttgaagcaagtgtatgccacaggtttattaatccttgatcaccggctggcatcttacttagaccctgaagcgcctttacctgcctcgcctgtagaagaggtgggcgatgacaatgagcaagaagacgatgattctgagaaagaaatcgcctcaatggatgcttttttagcgtgtcccgctaaacaacttctaccgtatcagacctacatctcggagcgctcacccttttggactcagcaaggcattaaaggagctgaatttgatagagttttagtcgtgttagacgatgcggaaagtacgcatttccagttttcatatgagaagtacttgggtcttaaagaactttcggatacagaccgaagaaacatcgaggctggtgaagaaacaactgtggatcgaacacgccgtcttttctatgtgagctgtacaagagctctaaaagatttggcagtagtactttacacaactgaccctagacaagctgaggcacatattcgtactctacaacttttcgaagatgacgccattcatactgacctaatcttttaa

SEQ ID NO: 73842 - DNA, 2073 bp, Escherichia coli 908519; identical to SEQ ID NO: 72136

SEQ ID NO: 73843 - DNA, 1734 bp, Escherichia coli 908519
atgtctgagatccattcgcccgccgaagctgctagccagcgagctttggaatctatgtatgcttgcctcagtgaaggacgaagcttccggctggaagctggcgctggtgcgggtaaaacgtattcccttattaaggcacttcgattcttgattgagcgaaataaggatttatttgaaaaacgtagccagcaaattgcctgcatcacctttactaacgtggcgaaggatgaaatcgtcgcgcgaacagatcgaagccccatcgttttttgtgataccaatcatgcgttctgttggtcgttaataagcagctttcaaaaaccgttgagagaactgattgaaacaatgccaacatgggcagaaaagctcgaagaagttggtggaagccttgggaatcgtagtattgagtataatcttggacatcgctctattcgcgaccatcgtataactcttcatcatgacgatgttctttctttaactatctcactcatggagcacgaaaaattccgtagagtgattgcagaacgctttccaatcattctggtcgatgagtaccaggacactgataaaaactggattgaggcaattaaacggcattttcttggacaagctagagcacctttatttggttttttcggcgatcattggcaaaaaatctatggtggtggatgtggaaagctggaacatcaggacgtggttgaaataggtaaagaagccaattttcgttcggacaagataattgttgatgcccttaatcgtatgagacctgagctaccgcagtgtgttaaagatcccgaagctacaggtttagtacgcgttttccatacaaacaattggcaaggagttcgtcaaaaaggcgtgcactggagtggtgatttaccattatgtgaaggccaggctactctggaacgagttaaaacaacgttggagcaggatggttgggtcttttctcccaatcacaccaaaattctcatgttgacccatcgacttttagccaatcagcagggctattcaaatatagtggcagcgtttaaatacaatgaatccttcacgaaaaaggaacatgaacatatagccttttttgtagacaaactggaacccgcctgtgatgcctttaccgctcgtaagtatggagagatgtttaatgcgcttagcggtattacaccactgttgcgtagacattcagataaggtgagttggcacaatgtaatgacgcaacttattgctctccgcgaaaccggtacaattggcgacgtaattgagttcatccgtgctcaacggaagccaagacttccagataaggttgaaaaatttgagcaggagttactccattttgacagaacggctgatgttgaaatgccccgaagattaaaagaacttgaaaagctgaaaaatattccctattcggaggtcagatcacttcgccgttatcttgatggatattctccattcgaaactaaacatggtgtgaaaggtgctgaatttgagaatgtcctggttgttgttgggcgtgggtggaaccagtataacttcggagaaatgttggaattcgctggagcccaaacgattccagtcgataagcaagactcatttgaacgaaaccgaaatttgttttacgtcgcttgttccagaccccaaaagcgccttgcgatccttttcaaccaagctttgtcacctgcggcactgacaacacttggaaattggtttggagcagagactataataccagcaccgtag

SEQ ID NO: 73844 - DNA, 2133 bp, Klebsiella pneumoniae BIDMC 25
atgtttatcaagaccctctcggtaagaaattttagaaattttaaggcagcgtctctttccttcaaaaaagaatgcgtcaatacaattgtaggtgaaaattcatcggggaaaacaaatgtctttgaggcgatgagacttatacttgacgataccttgccatattataagcgatatcttgtagaaaatgactttcatcgagggctagggacagcgtttggtcattgggttataattagtttggagtttgatgaaataggtggggatgaagagtcagagttactatgtcaattaaatactaccgttaatggtggtggaacagggcgaataacttatatttacagaccgcaactttacatcagagaacaacttttcaatttaaatgatattgaagatgttgatgcgcgtagaagcgcatataacatactgaaagaacaatattctattgataagaccacgtatgaatccttagtgttatgccaaggcacagcagattttagcgatgatggattatactctcatgtggttggtgattttaatgattatttattccctgatccaaagttagagcggattgatttaattggtaatagacaacgtgggtataatattcaggataatatcagttgtacttatgctcgtgctttgagagatgtggtaagtgaacttaagaataatcgattcaacccattccaaaagcttttagaatatgtttctaaaggaattgataatgatgacgcattgagcgaaaacatcaaaaacgtgaataacagaatatcatcgattgaagaggttaagaggctttctgagggcatattattatcaataaccaatgctgttggtaccacttactcgccagttttgaatgttacatctgaattgccctgtgagctaaaagagttggtaaaggttcttcaactcaaggctggcgactctctttgtgaaggatatgtatcagagctatcagagatgagtctcgggggtgctaatttaatatatttagctttaaaattgtatgagtacgaagaaggtatcagtaaaaacctcttagctaattttttaataattgaagagcctgaggctcatattcatacgcacatacaaaaatctttatttagcaatctgaaaaataataaaacgcaagtttttatatctactcattcaactcatatatcatcagtatcaaatatatccactacaaatgtgcttgtaaaaaatggtcttgaaacaatttcttgctctccatctaacggattggaaaaagagagaattaatcgcattgagagattccttgatgccataagaacagatatcctctttgccaagaatgttatcctaattgaaggtgatgctgaagaaatattaatacctcatctcgttaaaaatagtttcggtattacacttgatgaacttggcatatccttgatatctgtgcggggtactgggtttgaattactatcatctttatttcactcagaccgaattaaaaagaaatgtgcaattttgaccgatgatgacataaatttgtatggagataataagcctgattatttatctcaagatgattataataaagctgtaaaatcagcagagtctggtgtcgctcgtaaagtaattctggatgaaatagttagaaataacgtttttattcgtgcctatttttctaagtatactttcgaaattgatttagtgctatcaggcgccgtaagatactttgatgcgatagccgctgaatcatttgagaaaagagcatattacacaccataccaagaagcattccaatcctctgatagacaaaaaataggctgctacgctttaaagttagctaataagcataaaaaaggttggtttgcaatgatgcttgttgacaagcttgatgcagattttcctatctctaaggcactctgtcagtcgttagggttcactggtgattttaataaattcactctagcaaagatggttcgatatcgtagtgaggttattaagaatagagatgggtctgatttattaaataatatattgggacaggatgatttatcatttattatagataacatagatgctgctttggacatatttaaaacacattaccctaacgatcctttaacttctttgcttgaggttcatcatggataa

SEQ ID NO: 73845 - DNA, 1677 bp, Klebsiella pneumoniae BIDMC 25
atggataatcaaaagagacaattaattaatattaaagacaatctattggtcagcgcctgccctggggctggtaaaacaaaactattgattggtatgttagaggacaatttatatcgaaacgaaggttttcgttggcatattgtgttaactcacactaacgcagcagctgatgagatctctagcaggatagataatctaagtatagaggtagatagagtttggtgcgggactattcattctttccttttagagtgggttgttaaaaagtatgctggagctatatcaagattaaaagatggattttctttactttcagaatataaacaaagaaaaataatccagagcatagaaagtgataaaaaactaggagtaagaatacgttataattgtgatgagcaaggtaacgcatttgtggaaccttattgccattcgttagatgataagcacaaagagttacttgtaattcaggagtataataccttcaagcaaaataatagactgattgattttgatgatattattaagcttggcgtagaatttcttgaaaacaatcaaaacatatgtgagcatctttccaagttaattggtaatatttatttagatgaatcacaagatacaagtctgattcagcttaaagcattgtcatatataaccagatataatcgcgcctcagtatttattgttggtgacaatgaccaagccatttatcaagatcttggcgtttctataaaggataaatatataattaaatctgtactgcaattatctgaactaaagcatgaaactttgtctggatgctatcgatcttctgaattactggtgaaatattacaagaaatattcttcttcgcgaaatgatgttacttctctgcgtgaatttgaggggaagcctccaataatcaaagatatttctcaagatgaattgccacaaagagtgtttaatttaataaatcaataccaaacaaaatataatagcgtttccggtattgctattatagggcctgataagtactatcttatggcgctaataaatactttatatgacctttcagaaaacttcgtttatgattttcaatcaacaaaccccctatattgtgctaggaatactgtattttacgagttgataagtttggttcttttggatgtaaatgttattaactaccaaagaagaagttctcttgcaaggaaaattgttgattctgttcctgaattgagtcatttgacgccattacaacttaagcgtgatttaaaggagtttcagtcagtaaaaaataattttatattgtggttgagggagttatatgattttttagaaatgaagtatcaaaaatccattaaacttgagacagattacaaaatatgtaatgcagcggcttctgtggcaaaaatcagggctggcatgggcgcaattagtaagatgattaataaagacaaaaatgttgtctctgtatctactatacatggttcgaagggtgaggaatatgattatgtaatctctattgggtatcatgatcaggtggtgcctcatcaatcatcttttgaaaaaggaaatgaatatgctcgcgatattgctaatagattaatgtacgtggctttttctagagctaaggattatatgaatatatttatagatgatcgaagaaaagttagtcctttctttattagagaacctgactaa

SEQ ID NO: 73846 - DNA, 1962 bp, Klebsiella pneumoniae BIDMC 22
atgaaaatagagaagataaagctacagaattttcgttgtttcgggcatgaggtggtcgagctaaattttgaggaagaactgacaatacttgtcggcggaaacggctccggaaagacggcagtgctgcaagctgtgtcccggttgtttggtacatcatcagcgcagcggtcggtacagcgtcgagattttcacatacctcttggccggcaggagctgcagtctggcgacagtctgtttgtcgaagcggtacttgccttccctgaactggaagagcaagacgctactcctcttgatgccgttccggagttctttaatcagatggcggcttccggtgagggagagccccttaaggcccggatacgactacaagcaacatggacggatgacggtacgccggaaggagcaattgaggaggatatacgctggataagagccctggatgataattttgaatgggatgactgttccaggattcaggctgtagagcgctcttcaatccagtttatttacttaccggcaaatcgtgatgcgacgactcaagtgaccgcccttctaaaagggcggttatggcaggctgccaaatggtcgacggcatttagggatgcaagctatgttaatgccggtcagatccagagcagtttcgaagaagaggagccgtcgaagtttctgctggagcgtctttcgaagcgttggcaacaggtgcatgaagccgatacagacagtaaaccgcgtttaaggctcatcgagaaccgttttgaggagcttgttcgtaaagccgaatttacttttacgcctgatgaagaaggtcaggagcgtcatttgtccgagctgagtgacggtcagcgctctctgttccatatcgctcttacagcggcaacgctcgaaaccgagcgggaagctttttctttgcctgctgatgacagctcatttgaacaggataagttacgccgtattcacctgacgattcttgccatcgaagaaccagaaaacagcctgtcaacgttctttttatctcgcatcatcaagcaggcgagagagattggcgcactgccttccgctcaggttctgctatctagccattccccagctatcctgagccggatagagccggaggaagtgagatattttcgtatggaccggagcgctcggcgctcatcgatccgagaactgactctgcctgaagatgatgttgaggcaagcgtttatgtcaggctggctgtaaaggcataccccgaactttattttgcgcgatttgtaatcctaggtgagggagactcagagcgagtcgttattccgaaaattgcggaagagatgggggtttcccttgatccatcattcgttcccgtcgttccgctcggtggacggttcgtagcgcatttctggcggctgctgaatgatcttgagattccacatgccacattgctcgatcttgatctggggcgccgacatggtggggtgaataccatgagaagctgccttcagaatttggccgatatcgggagtaattttgggagcgccaatggagctaatgttgctcagcttaccgaccaacagctttataatgaaggcctgcaaggtcaatggcttcaagcattcaggagggaaggtgttttcttttcctatcccattgatctcgattttgccatgttgcacgcctttccaaccgcttatcaggttgccaatccaggtggcaatggtcctcagagtagtgctgttgctattcaagccaaaaaggtcagtacgctgaaaacaggtggtaatcctgccttgtataccgcgcattatgatgacgctttcaaatggtatccgtatttgttcctgagccgcagtaagcctgaaactcaccttgcggctttttcccgtatcgcggaaggtggtgttgctgcgtccgctcctgtagagctcagggcgctcattgagtacgttacggataagcttaatctgtcaggagagagtgaatga

SEQ ID NO: 73847 - DNA, 1866 bp, Klebsiella pneumoniae BIDMC 22
atgacccgcgtaagcagagacgactgggtacctcagggtgtcggtggtctggaagggagagcgtgggaggctttacgtgaaaccgatagcagcatccttgtgacagctggtgccggtgccggaaaaactgagtttctggcacagaaggcgtcctatcttctgcagacaggtatttgtccggcacccaaacgtattctggccatcagctttaaaaaagatgccgcccaaaacctcgccgaaagggttgcaaagcgttgcccgagagatcaggcgcggcgctttgattcgataacttttgatgcctttaccaaggggcttctggaccggtttcgtccggctttacctgagccgttcaatgcgcccggtacgtatcagattgttaatccgtttcgtagggattatgacgattttattgagcgacatggctatcacggagtgagtgctcaacagcttgagagaagactgcttctgacagacctgccaattgacttgtcaaatggatctgaagtacatcgtgcgttagcagattactggcatgaacaattcttcgggggcgacgagatatctctatccttcccgatgataaacaggcttgtaaaactgctgcttcaggaaaattcatatattcgcagggctttacaggcaacatatcccatcgtctttcttgatgaataccaggataccacctatgcccagtatgacatgctactaacggcattcgatggtagcgatgctgtctttacggcagtcggcgatgataagcagcgtatcatgggatgggcgggagccatgaacgacgcctttgaccagtttgaaaacgactttgctgccagacgcataacactgctttctaactggcggtcacatgtggatctggttcgtattcagcacgagattgcccgccggatagacgatagtgtggaagaagtgcaggcacaaggaacccgtgaaatcgaaggtgaggtttctgctatctggcaattccggagcgcagatgacgagaacaattatctggctgaatgggtgagcggtgaggttcagtcagagcgtgttgcaccacatgatgtagcgattctgatcagaatgcgggcagatcaggttgagggtgaaatagccccttcttttgcggcacgaggtctcaggatcagaaatgcggcccggtcagtcggtgaaattcagatacaggatctgcttggtgaagagctgacctgtatatttgttcctttactccgcctgggagcgacggagcgaagcccggaaaactgggagcagacccagcagaactatctgtttttggaggctgccgatccggataacgatctcacgcaggaacgattgctggttaaacttgaagcattcgtccgtaaattaaggacagagctagcacagcgccagcctagtccggattcggcggaagagattgcagacatggttcttgaatttgtcgggacccctaggcttcggcaatcctttcccgcttaccagcgtgcaagagattttgagagggtgtggagtggatttgtcacactcctgaaagagtgtgcagaacacagcagcagctggacggaggcgctggatgagttcgaaggtattggccaggtagctttgatgaccgtccataaaagcaaaggtcttgagttccatacgatgatattttatgggctcgacaatcagacttggtggagccttacgccgcaacggggtgaagagctaaacactttttttgttgcctttaccagagcaaagcagcgtgcgtttttctcccagtgcgttgagcgagggcatgctattggctggatacagcaattattggccccggcgggagtcgaaaccatagatggtacgactatattgggtactacgtga

SEQ ID NO: 73848 - DNA, 1785 bp, Enterobacter cloacae UCICRE 5; identical to SEQ ID NO: 73688

SEQ ID NO: 73849 - DNA, 1818 bp, Enterobacter cloacae UCICRE 5; identical to SEQ ID NO: 73689

SEQ ID NO: 73850 - DNA, 2133 bp, Klebsiella pneumoniae UCICRE 4
atgtttattaagaccctctcggtaagaaattttagaaattttaaggcaacgtctctttccttcaaaaaagaatgcgtcaatacaattgtaggtgaaaattcatcggggaaaacaaatgtctttgaggcgatgagacttatacttgacgataccttgccatattataagcgatatcttgtagaaaatgactttcatcgagggttagggacagcgtttggtcattgggttataattagtttggagtttgatgaaataggtggggatgaagagtcagagttactatgtcaattaaatactaccgttaatggtggtgggacagggcgaataacttatatttacagaccgcagttttacatcagagaacaacttttcaatttaaatgatattgaagatgttgatgagcgtatacgcgcatataacatactgaaagaacaatattcgattgataagaccacgtatgaatccttagtgttatgtcaaggtacagcggattttagcgatgatggattatactctcatgtggttggtgattttaatgattttttattccctgacccaaagttagagcggattgatttaataggtaatagacaacgtgggtataatattcaggataatatcagttgtacttatgctcgtgctttgagagatgtggtaagtgaacttaagaataatcgattcaacccattccaaaagcttttagaatatgtttctaaaggaattgataatgatgacgcattgagcgaaaacatcaagaacgtgaatgacagaatatcatcgattgaagaggttaagaggctttctgagggcatattattatcaataactaatgctgttggtaccacttactcgccagttttgaatgttacatctgaattgccctgtgagctaaaagagttggtaaaggttcttcaactcaaggcaggcgactctctttgtgaaggatatgtatcagagctatcagagatgagtcttggtggcgctaatttaatatatttagctttgaaattgtatgagtacgaagaaggtatcagtaaaaacctcttagctaattttttaataattgaagagcctgaggctcatattcatacgcacatacaaaaatctttatttagcaatctgaaaaataataaaacgcaagtttttatatctactcattcaactcatatatcatcagtatcaaatatatccactacaaatgtgcttgtaaaaaatggtcttgaaacaatttcttgctctccatctaacggattggaaaaagagaaaattaatcgcattgaaagattccttgatgccataagaacagatattctctttgccaagaatgttattctaattgaaggtgatgctgaagaaatattaatacctcatctcgttaaaaatagtttcggcattacacttgacgaacttggtatatccttgatatctgtgcggggtactgggtttgaattactatcatctttatttcactcagaccgaattaaaaagaaatgtgcaattttgaccgatgacgacataaatttgtatggagataataagcctgattatttatctcaagatgattataataaagctgtgaactcagcagagtctggtgtcgctcgtaaagtaattttggatgaaatagttagaaataacgcttttattcgtgcctatttttctaagtatactttcgaaattgatttagtgctatcaggcgccgtaagatactttgatgcgatagccgctgagtcatttgagaaaaaagcatattacacaccataccaagaagcattccaatcctctgatagacaaaaaataggctgctacgctttaaagttagctaataagcataaaaaaggttggtttgcaatgatgcttgttgacaagcttgatgcagattttcctatccctaaggcactctgtcagtcgttagggttcactggcgattttaataaatttactctagctaagatggttcgatatcgtagtgaggttattaagaataaagatgggtctgatttattaaataatatattgggacaggatgatttagcatttattatagataacatagatgctgctttggacatatttaaagcacattaccctaacgatcctttaacttctttgcttgaggttcatcatggatga

SEQ ID NO: 73851 - DNA, 1677 bp, Klebsiella pneumoniae UCICRE 4
atggatgatcaaaagaggcaattaattaatattaaagacaatctattggtcagcgcctgccctggggctggtaaaacgaaactattgattggtatgttagaggataacttatatcgaaatgaaggttttcgttggcatattgtgttaactcacactaacgcagcagctgatgagatctctggcaggatagataatctaagtatagaggtagatagagtttggtgcgggactattcattcttttcttttagagtgggttgttaaaaagtatgctggagctatatcaagattaaaagatggattttctttactttcagaatataaacaaagaaaaataatccagagcatagaaagtgaaaaaaagctaggagtgagaatacgttataattgtgatgagcaaggtaacgcatttgtagaaccttattgccattcgttagatgataagcacaaggagttacttgtaattcaggagtataatgccttcaaggaaaataatagactgattgattttgatgatattattaagcttagtgtggaatttcttgaaaacaatcaaaacatatgcgagcatctttccaagttaatcggtaatatttatttggatgaatcacaagatacaagtctgattcagcttaaagcattgtcatatataactaggtataatcgcgtctcagtatttattgttggtgataatgaccaggctatttatcaagatcttggcgtttctataaaggataaagatataattaaatctgagctgcaattatctgaattaaagcatgaaactttgtctggatgctatcgatcttctgaattactggttaaatattataagaaatattctgcttcgagaaatgatgttacttctctgcgtgaatttgaggggaagtctccaataatcaaagatatttctcaagatgaattgccacaaagggtgtttaatttaataaatcaataccaagcaaaatacaatagcgtttccggtattgctattatagggcctgataagtactatcttatggcactaataaatgctttatatgacctttcagaaaacttcgtttatgattttcaatcaacaaatcccctatattgtgctaggaatactgtattttacgagttgataagtttggttgttttggatgtaaatgttattaactaccaaagaagaagttctcttgcaaggaaaattgttgattccgttcctgaattgagtcatttgacaccattacaacttaagcgtgatttaaaggagtttcagtcagtaaaaaataattttatattgtggttgagggagttatatgattttttagaaataaagtatcaaaaatccattaaacttgagacagattacaaaatatgtaatgcagcggcttctgtggcaaaaatcagggctggtatgggcgcaattagtaagatgattaacaaagacaaaaatgttgtctctgtatctactatacatggttcgaagggtgaggaatatgattatgtaatctctattgggtatcatgatcaggtggtgcctcatcaatcatcttttgaaaaaggaaatgaatatgctcgcgatattgctaatagattaatgtacgtggctttttctagagctaaggattatatgaatatatttatagatgatcgaagaaaagttagtcctttctttattagagagcctgactaa

SEQ ID NO: 73852 - DNA, 900 bp, Enterobacter cloacae UCICRE 3
atgtatttatcaaaactcggaatccgcaactttagaaattttgaggcggctgatattcccctagcaggtaatgttgtgttattgggggaaaatcgtgtcggtaaaagtaatctgcttttcgcaattcgactggttattgatcccactctgcctgattcagccaggcagcttaagctgtcagatttctgggatggctgcgaccttgaatcaaaccctcaaattgaggtgcaccttgaattcgccgatttcgacagtgacccttccctctcagctctgttgaccgattttcgcatcgcagaggatcctgccgtagcaaggttgagctacatttttcgtaaaaaggaagaagtcgatggggctccacgttcgggtgaggactgtgagtttattgtttttggcggaggtcaggaatcgcgagccattcctggacgcgtcaggcggcggatctccattgatatgctggacgcgttacgcgatgcagaagcacaacttgcttcttggcgaaactctccgctacgccccttattggaaaatgcattctcttcactgagccgagccgatttggatcgcgtagcaactgagcttcaggcagcaacggaaaccatggagaagttcccatcaattaaggatctcgaagattctcttcgtggtggcattcttgacctggctggaactgctcacgatttagatgtccgcctccgttttgcgcctgctgacccgctcagattgatgcgttctatctctatgttcattgatgatggaaagagaggcattattgaagcgagcctaggttctgcgaacgtggctctgatatcactcaagctagcagagtttgcatggcgacgtgaaaagaatgaacgtaatttctccctgctttgtattgaagaacggctttgttga

SEQ ID NO: 73853 - DNA, 1782 bp, Enterobacter cloacae UCICRE 3
atgtctgaccgccgcgcactttcagaggctctgaatgagctattgccgaacagagagcagtacgctgcggccacataccccggccactgcgtagttattgctgggccaggcagcgggaaaaccaaaacacttacgactgccatggcacgtgccctgattgaagaggtcgctgacccccgaggcgtggcctgtattacctacaacaatgaatgcgtttctgaacttgaaggacgtctggcatgctttaacgtcagtggcgatgagcggaactttattggcaccgtgcatagctttgcattaaatcaggttttaatcccctactcacgatgtataccgggtttgctgccggatgattttcgtgtggcgaccagagatgagagtcgcgcggctgttgaagtggcttaccaagctagattcggatccgtcggagatcctcatgcacggtggaaatttgcagaagagaaacgacgccgggatgtgaaccgactcctaccggcttggcggaataacaatccggagctggcagattttattgaaggttatgaggcagaacttcggcgcttaggactgattgactttgatgatatgccactcatcgcttttcgtattattagcgagcatgaatgggtacgtaatgctatccgatcgcgctatcctgttttgtttgtagatgaatatcaggatcttgggcacgctcttcatgagctggttctgctgctgtgctttaacggtggaatacgattatttgcggtcggtgatgcagatcagtccatttacggatttaatggtgcaaatccagggctactggatagtcttgtttcacgggcagatgtaagaccgttccgtcttcgcttcaactatcgatctggcgcgaaaattatcagggcatcactaggggcgctgggagaagaccgcgattatgttggccccgatggtaatccagagggggagttaggattccatgggattaatggcgattatgacgcacaggcgcattttatcgctcatgatctaattccttcgttgtttgaaagagggtttcaccctgaacgcatcggggttctttaccgggcagcctggcttggcgataaagttgcggatgagttcaaggccagaaatattgccataatacgtgctgacagtaatgctctcattaagcgcaattctcgtcttgcccgtttcatcgaagcctgcagtcagtgggtaactgggggatggaaagaagcctctccactatttaacctcttactgggtcaggcgctctttcttgtttatggccgccgcgcaagccgtgctgaagaacaattactgaccgtacagctcatcacttttttacgaaacggaattgataaagcggaaagtgctcacgagtggctgagacgtttaaatgatgagctcatcaccggctggatggctatctcacagaacactcagcaggaatgggatgtcatctctgagttactgaaacgaaccgatcccctcaggggactggatgtggctctggatatattcgctgggaaagtagaaggaactggacgcatcacccttagcactcttcatagtgcaaaaggccgagaatttgatgtagccataatgtttggggtaaataaatatgacttcccgagtaagcgagatctaacttcagataatgcccttcgcgaggcccgtcgcctcttttatgtaggcgttactcgtccccgaaaagagctgcacatggtttatgaaaagggtaaacattcaccttggattgccgaactgtattatcgcagccagcagacatag

SEQ ID NO: 73854 - DNA, 2139 bp, Klebsiella pneumoniae UCICRE 2
atgtatatttccaaactgaccctggtgaattacaaaaacttcaagaacacgtctctgcggtttcacaagggagtgaacaccattatcggggaaaacggctcagggaaatctaacatcctgcgagctattcgcctcctgcttgacgacaatatggtgcgttctgcttatcgtctggaagagggcgatttcagccgatcactcgaccaatggcaggggcactggatcatcatcagcatggagtttgacgagatcaccactgatgaatccgttcaggcactctttctccacggtacggctcccttggacgatgggccaatacataaggccacatataatctcattttccgacccaaaaaagacatcaggttgaagctggcagccttagaattgtttgattttaaggaactctcggagattcgtgacgcaatcaccatcgatgattacgaaacgcttttcactggacggagcagtgctgatttcggaaatccagcggtataccgaagtatcgttggagattttgatatatgtgatttctcatcagagacggagtttccggaaatcggggcaaaggtgccgggcttcctttcagttacgaaagaggtctcgctgacttttatccaggccttgcgcgatgttgtttctgagtttcacaacaatcgcactaaccctttactcactttgctgaagagcaagagtggagatatcaatccactaacgatggaaccaatctccgagatggtccgcggacttaatgcctcaatcgaaggacttgaggatgttcagtcagttcgcaatcatattcgtgagaccattaaggacgccgcaggtgaaacttactcccctgcttcactctcaatcaagtcagatctccctgaagaagcagataaactttttcagtccctgcgactattcgttggtgaatcagaagaagggttcgaaggtgcaattcatgagctgagccttggcggtgccaacctaatatacctgactctcaaactactggagttcaagtaccagcgagaaaagctagccatggccaatttccttttgattgaagagccggaagcgcatatccatactcatattcaaaaaacgctgttcgatcgcatcgcatatagcgatgcgcagatcatttacaccacgcactcaactcacatctccgaagtcagtaatgtaagcaatgtaaacatactgggccgtcacggagcgttttgcgaggcctatcagcctgccagaggtctagatcccacccaaatcaatagcatccagcgttatttggacgcggtgcgtagtaatctcctcttcgccaaaagcgtgatactcgttgagggggatgtggaggagatactgataccaatactgattaagcttgtactgggcgtaagcgttgacgagttgggcatcagtgtcatcaacattcgtagcacaggattcaagaatgttgcggttctcttccatgacctacgtattaagaaacgatgcgccatcatcactgatttggataaggccttctttaatatcaccgtacaggcaactgataatgccattgtggcaaagataaaggcaaaagctgcgggatctcagaaagccggtttagaacggcaggccgatttgacagagttcacggcagaaaatccatggattgaaaccttttacgccaaacacaccttcgaggtcgactttgtcgcagccggcaaccaagaggctatcgtccagaccattccgaaggtttacaaggatcagggaaccagggaagaggcgaagcagcaactcaagtccggagacctgcaacaaatgggtagtcgtacgctgacaatggctcggcaagagggtaaggggtggttcgcgcttttgctcgctgaatacctcactccccaagtccagatacctgaatacatcatacaggccatccattttgcacatggcaaatttccgcgttcccttattgtcagaattctccagtatcgcgctgaataccgatatggagcagatgtggcaaatctgccagcgaaacaattatttcttcaggagataaatcgttttgcgcaaggagatattggcctggctgagttcaggataacaattggacgtttattaccgggagaccccattattgtattcttagggaagttgcaatga

SEQ ID NO: 73855 - DNA, 1785 bp, Klebsiella pneumoniae UCICRE 2
atgaggttcgttttggatccaagtgacctcaatcctgaacaggcggcagcagtgacagagccatcgagcatttttctgatcgcttgcccgggtagcggaaaaacgcgcaccctgacctacaaaattgcctatgaactctctcgtcgaactgataagcggatggttgttgccattacctacacccaccgtgcagccgatgagatccaagaacgtattgaggatttgggcgttgatacttctgggctatggattggtaccatccatgccttttgcctggagtggatccttaagccatatggcatttattcgcctgaactagcgcgtggttaccgcgttatcgacccgtacgatcgtgagcgtctgctggagaggctgtgcgctcagtataaaggtatcactcactgggattgtgactactacgttactgaaacgggttatcaacttggctgtgtcgatacgagaaaacatcctattattcaaaacgttttgaaggaatattttaaagagctttcatcaagccgacagatcgacttcgaacttatcctttggtatgcgtactgcttgatgcgggacagacctcctatcgcagtactgctctctcgcgtgttttcccacatcctcgtggatgagtatcaggataccaaacagattcagtactctattttgacgtcgatacttcgcgctggaaggggggagaccaaaatactcatcgttggtgatccgaatcaagcaatctatggctcactgggtggctacgctatgccattagatgaattccgtgcgcaagccggaatcccgataaaggagtttgcgctcagcctaaactatcgctccagtgagcgaatcatcagctatttttcgaactacagcgtacatgctagcaaaatcaccggtgctggcaaagatgctaaatttcccagccggattacctataatcaaaaggttacacgcagcaatgttcatgatgagattgtaaggctgattcggaagagtctagacaacggctactcacccgaaaacatctgcgtcctcgctccacagtgggttttgcttgcctccacgactcgaaaactagttgcaatgttgcctgatcagcaatttgatggcccaggcctcatacctttcagtaataacttcgataatttctggttcaaggtttccaaggttttactgacggattcttccccagcattacttatcaggcgactgcgttgggcaaacgaagtaataaaagatcttgatagtttcggcgttgatactaagacactgacaccgagaatcttgctgcgggagagtaacgcgctcacggtcaatgagttggacggactccgctacctggaccaggccttcaccgagctgctcaagaggctcaatatttctccggaaattcatcctgcgctcttgactcatcgagaggcttttttcagcagctcagctgcgcgaatagagcgtctgcaaaaggaaggggcgacatacatcaatcaaatatccgtcttcaaaaaagtctttcgcgaaagaagcggcatcactgtctccaccattcatggtgtcaagggtgccgagttcgacgtcgtcatcgcctttggattattggagggcatggtaccgcacttcaatgaagtaaatggacatgttgccgcaagcaagctcctctatgtattgagctctcgtgctcgaaaaaatcttcatttaatctcggagtcagaacgtcagagaggaagatacagtagctattccgcgaccgaattactcgcggcctgcatctttaattatgacgaggagtaa

SEQ ID NO: 73856 - DNA, 1701 bp, Klebsiella oxytoca MGH 42
ttggaaatatcatctctgaaactcaaaggttttagaaactttaaagatgcacatatcaattttaactcaaatactctggtcatcggtgccaatgatgttggcaaaagtaatatgttgcattcgctaagaatgctattagataaaagtttatcagattcagaaattgaacctaacgaatttgactttcatttagataatggaaagtcatgtgaagaatttgaaattattattcattttaaagatatcaatgaagatgcagtactttcaattttgaaagggaatgtcagtgactcaggtgaatcgttcattaagtatattgcacaaaaatccgatctcagctataaactttttattggtgagtctttagagtctttacaagaaattaactctcgctattatcttaaatttgttaatttaaaatatattcaatcacaacgagatttagagaggtttattcgtaaagaaaaaagacaactattaaaaatcgcacagcaatcattgaactctgaagaaagagaagaagatgacgatttgttaggagagataagtttagatttacagtctattaatgataaaatatctcaacttatatatgtagaaagagctacaagagatgtcaacgatgagctaaaaaaactagcgcatcattactcagaatattctgtgcaactagatactggagcaattggaataaatgactttattgacaatctacaacttggagctaatacaaatggttctaatgtcatgcttggaggagacgggcgaaacaatcaaatattattagcattatggaaagcgaaaagtattaaggagcatgatatcgagaatgaggttatcttctatgttatcgaagagcctgaagcacacctacatccccaccaacaaagaaaactggctgattatttgatagcagaacttccaggtcaaacgatcatttcatcccattcgccacaaatagctgtaaactttgaacccggctcagtaataaggttgcttgaccgggctggacacacagtagccgcaagtgaagggtgttctaaacatatttcagatggctgggaagggatgagctatcggatgagtatattgccagcagaatcgtttttttcaaatggagttttcttaatcgaagggccatcagaagttttattttaccattctttagccgaaaatttaaacatagatcttgattatttaaacatttcactggtttcggtggacggaatatcatttaaaatttacgtcgctatactagatgctttagagatcccatgggtaatgcgaacggataacgatatatctaaacttaaagatcaagacaagtggcaatattcaggtataaaccgatgtttagatatagccggtttggaaaagtttgaacatagcgacatacaaatagtacctatcgatactttgaccaacggtgattggaaaacagtttctgaagaaataaataaatgcgggatatatttatccaaaattgatttagaaactgatctagtagaagaattaagcgcaccaattttaaacgctttaggtaagaaaaatgaccaaagtgcgatagaatacttacaaaagaaaaaagcattaagaatgcgtgaacttcttaaagatataaaaaaagaccttcacaaacttaatgccggtgaattagttaaaccgttaaaccaccttgtaaaaataattagaggtgaataa

SEQ ID NO: 73857 - DNA, 1626 bp, Klebsiella oxytoca MGH 42
atgagtactttctcaccaacacctcagcaaacattagccattgactacacaggaagcatggtaataacagcatgtccaggaagtggaaagactacggttataaaagaaaaaataagaaatattaccgacggtcttccagagcataaaggggtcattgcaattacttttacaagaaaagcaagttcagaactggaacgtagatgcaaggctgatggacacgatgtaaaaaatagcttctttggtacgattgatagcttttgcttaaatgatataattatcccatttctttcaagaatatggggtggcacaccaagagaatgcaaagtattaaagaaattggaatctccttttaaccactttatagaaaaaaatttctctggcactccatcaattactaatatcaatgaggaccctggatataaaaaactatacgatgagggaatattgtggatggggtcattctcagccttagcattaaaaataattaatgaatcatctgctgcaaagagatatatcaaagctagatacagccatatattcatagatgaatatcaagattcatctttatctcagcatgaactctttctaagaataaacgagcttggcttatgctccattgctgttggtgatgtttggcaatcaatctatgaatttagaggagggaattcgaagcttcttttagaattggtaagtaatacagaatgctttaagcattttgagataaatttcaatcatagatgccacccatcaataagcaattatgcttcaagattgcttgatccatcctatattttactacctgcagatgagataagaatattcaggagacgacttaatggaaatcttaaagatgctgctgttacgatttcctcctggatttcaggatggctgagtagcggcgaatggaagttagaacaagcaaatcaaatagcaattttagcaagaaaagaaaaatcgctaacattattctgttctggattaaacttaaacttcagactttatatcgacacacctctagataaaattggtactgattgctcagatctatacaaagatctgttagcatacaagtacggttctataagtacagcacaagaatttattaacaaggtttttgatggaatcataatagatgataatactcagttcttactaagaaaaaaaataaaaacaattagagaagaattaaaagatgaagatttaatccataagtttcatgacatcgcagatatcctagggataagctcgacagaacatactgacggggctgtgataagaacaatctctgacgatattttagtcaagcaattcaagccattagatgatagtgagatacaagtaatgactcttcataaatctaaaggattggaattcaaattagtattacatctagatctagatgaatggtctttcccatatagggaatataacagtgaagacagatatacacctctatacccgacgcttcaacaagaacttaatctccattacgttggtataaccagagctgagaattgctgcattcttattaactcctctcttagagagaatgcttctggggaatttaaaaaaactgatgaatcatatttttttaaactaccacatttaaacagtctatatatttaa

SEQ ID NO: 73858 - DNA, 1701 bp, Enterobacter cloacae 'Hoffmann cluster IV' MGH 34
ttggaaatttcatctctgaaacttaaaggttttaggaattttaaagatgcatacatcaagtttaattcgaacactctaatcatcggagctaatgatgttggcaaaagtaatatgctgcattcgctaagaatgctattagataaaagtgtctcagaatcagaaattgaaccaaatgaacttgattttcatttagaaaaaggaaaatcatgtgaagaatttgaaattgtcattcattttaaagatattaatgaagatgcagtactttcgattttgaaagggaatgtcagtgactcaggtgaatcattcattaagtatgtcgcacaaaaatctgatctcagctacaaacttttcattggtgattctttagagtctttacaagaaatcaattctcgctattatcttaaattcgtaaatttaaaatatattcagtcacaacgagatttggagaggtttattcgcaaagaaaaaagacaactcttaaaaattgcacagcaatcattgaactctgatgaaagagaagaagatgatgatttgttaggagagataagttcagatttacattcaattaatgataaaatatctcagcttatatatgtagaaagagcaacaaaagaagtcaacgatgagctaaaaaaacttgcacatcattactctgaatattctgtacagttagatactggggcaattggaataaatgactttattgataacctacaacttggagctaatacaaatggctctaacgtaatgcttggaggagacgggcgaaacaaccaaatcttattagcattatggaaagcgaaaagtattaaggaacatgatatcggtaatgaagttatcttctatgttatcgaagaacctgaagtacacctacaccctcatcaacaaagaaaattagctgattatttgatagctgaacttccaggtcaaacaatcatttcatcccattccccccaaatagcggtaaacttcgaaccagactcaataataagattgcttgacagggagggacacactgtagccgcaagtgaaggatgctctaaaggtatttcagatggctgggaagatatgagctatcggatgagtatattgccagcagaatcattctttacaaatggtgtttttttaatcgaagggccatccgaaattttattttaccattccttagctaaaagtttaaatattgatctggattatttgaatatttcattaatttcagtggatggaatatcatttaaaatatatgcagcaatacttgatgctttagaaattccatgggtaatgcgaactgataacgatatatcaaagctaaaaggtcaagagaagtggaactttgcaggcataaaccgatgtttagatatagttggtatcgaaaaatttgagcatagcgacaaaaaaatcacatctctagatactcttaccaacggtgactggcaaacagtttctgaggaaataaataaatcgggagtgtatttgtcaaaaattgatttagaaaccgatcttgtcgaggagctgagtgcttcaatattagatgcgttagataaaaaagataatcaaagcgcaattgaatacttacaaaagaaaaaagcaatccgaatgcgtatgcttctaaaaaaaatcaaaaaagaccttcatactcttaactcgggtgatctggctaaaccgctagaccaccttgtaaaaatagttaaaggtgaatga

SEQ ID NO: 73859 - DNA, 1221 bp, Enterobacter cloacae 'Hoffmann cluster IV' MGH 34
atgagtgttttctctccaactactcagcaaatattagccattgattaccctaaaagcatggtaataacagcatgtcctggaagtggtaaaactacagttataaaagaaaagattagaaatattaccgcctgtcttcctgcgcataaaggtgtcattgcaattacattcacaaggaaagcaagttcagaactagagcgcagatgtaaggcggaaggacacgatacaaaacacagtttcttcggtacgattgatagtttttgcttgaaggagataatcattccatttcttccaagaatatgggggggtaaaccaacagaatgcaaagtattaaagaggttagagtctccatataaacattacctcaaggaagaatttattggcacaccatcagtcgttaatgtcaatgaagattccggttataagaaactgtacgatgagggaatgctttggatgagttcatttgctgccttagcattaaaaatacttaatgaatctcctgcagcaacgcgatatatcaaagcgagatatagccatatatttatagatgaatatcaagattcatccttatctcagcatcaattatttctaaaaataaatgaacttggtttatgctctattgctgttggtgatgtttggcaatcaatttatgagtttcgaggtggaaatgctgagctgttacttgacttggttagagataagcaggtgtttgcacattttgaaataaatttaaatcatagatgtcatccatcaataattaattatgcatctaggctactcgattcaaatttcgtgttattaccaagcgaaagcatcaatgtttacagaaagagattatctgggaacttaaaagatgtttcgatgacaatatcatcatggatttcaaaatggttaaatgaaagaagatgggggttggagcaagctaaccaagtagctatttttgcaagaaaagagcaatcattgctattattatgctcaggattaacatcaaattttagagtttatattgatacaccattagataaactgggcacagagtgttcagatttatataaagaccttctagcgtataggtataaggccataggtactgcgcaagagttaattaataaagtatttgatggattgattataaatgacaatcatcagtttttattaagaaaaaaaattaaaaccctcaggggtaaactaacaaatgaggaactaattaataagttccactaa

SEQ ID NO: 73860 - DNA, 2139 bp, Enterobacter cloacae 'Hoffmann cluster IV' MGH 34; identical to SEQ ID NO: 72908

SEQ ID NO: 73861 - DNA, 1800 bp, Enterobacter cloacae 'Hoffmann cluster IV' MGH 34; identical to SEQ ID NO: 72909

SEQ ID NO: 73862 - DNA, 2139 bp, Enterobacter sp. MGH 23
atgcatatttccaaactgactttggtcaactataggaacttcaaaaacacgtctctccagtttcacaagggagtgaacaccgttatcggggaaaatggctccggtaaatctaacatcctgcgagctattcgcctcctacttgatgacaccatggtgcgtgcagcctatcgactagatgagtctgatttcagccgctcactcggtcaatggcaaggccactggatcatcatcagcatggagttcgaggagataaccgccgatgaatccgttcaagcactctttctccatggaacagcttctttggatgctgggccgatccataaggccacctataacctgatcttccggcctaaaaaagatatacggctgaagctggctgccttggacatctttgacgatgagcaactcacggagatccttgaggcaatcacaatcgatgattacgaaacgattttcacaggacggagctgggcggacttcagtaatccttcagtgtacaaaaaaatagttggcgatttcgataattgtatcttctcatcagagacggagtttccagaaatcggggcaaaggtgcccggtttcctttccgttacgaaagaggtatcgctgaccttcatccaagccttgcgggatgttgtttctgaattccacaacaaccgcactaacccgttattgaccctgcttaagagcaagagtggagaaatcaatccagcgacgatggagcctattaccgagatggtccacgaactcaacgcctcgatcgaagggctaaaagacgttcagtcagttcgcaatcacattcgtgagaccatcaaggacgccgctggtgaaacctactcgccagcatcactttcgatcaaatctgatcttccagaagaagccgataagcttttccagtctctcagacttttcgtgggtgaatcagaggaagggtacgaaggggcaatccatgaacttagccttggcggagccaatctcatctatttaactcttaaacttcttgagttcaagtaccagcgcgaaaaactgaccatggccaatttcctcctgattgaggagccggaagcgcacatccatacacacattcaaaaaaccctattcgatcgcattgcatatagcgacgcgcagatcatctacacgactcactccactcacatctccgaagtaagtaatgtaaaaaatatcaatattttgggccgtcatggtgcattctgcgaggcctatcagccagccagaggtcttgtacctagccagataaacagtatccagcgttacctggatgcagtgcgtagcaatcttctctttgccaaaagcgtgatactcgtcgaaggtgatgtggaggaaattctgataccaatcctaattaagctagtattgggagtcagtgttgacgagttaggcatcagtgtcatcaacattcgcagcacaggctttaagaatgttgctgtactcttccataacatccgcattaagaagcgatgcgccatcatcactgatttggaccaagccttctttgatgtcacccctctgccaactgatacaaaaggtgtggctaaggcaaaggccaaagcagctgggtcccagaaagctggtttagaacggcaggctgatctaaccgagttcactggagataatccatggcttgtaaccttttacgccaaacatacgttcgaggtcgactttgtcgcagccggtaaccatgaggccgttgtccaaactattacagcagtttacaaagacgaggaaaccaggaaagaggcgaaacagcaacttcaatccggggacttgtcacaaatgggaactcgtacgctgacgatggcaaagcaagagggcaaggggtggttcgctctcatgctcgcagagtacctgactccccaagtccagatcccagcctatataatgcaggccattcattttgctcatggcacttttcctcttccccttcttgccagaattctccagcaccgcgctgaatgcagatacggttccgatatattgaattcgcaagctaagcaagcatttcttctggtaattgagcgttttgtgcagagaaatattggcttggctgaactcaggcgagaaatcggccttatgatacccggagaccccattaatgtattcttagcggagatgcagtga

SEQ ID NO: 73863 - DNA, 1782 bp, Enterobacter sp. MGH 23
atgtttgcctgggacccaagagacctcaatcctgagcaggcggcggcagtaatcgagccatcaagcatctttctgatcgcttgcccaggtagcggtaaaacccgtaccctgacctacaaaattgcctacgaactatctcgccgtactgacaagaggatcgttgtagctattacctacacccaccgtgctgctgatgagattcaagagcggattgaggacctgggagtagatacctcgggtctatggattggtacgatccatgcgttctgtttagagtggatacttaagccatacggtatctattcccctgcacttgcacagggctaccgcgtgatcgacccacatgatcgtgagcatctcctggagaggctatgcgctccgtataaaggtgtcactcattgggattgcgattactatgttactgagacggggtataagcttggctgtgtggatatgggaaaacaccctatcattcacaaggttttgaagttgtacttcgacgagctggcagcgaaccgacagatcgacttcgaacttatcctttggtatgcctacagcttgatgcgggacagaagccaaatcgcagtgctgctctcacgtgtattttcccacatccttgtggatgagtatcaggacaccaaacagatccagtacactatcgtcacgtccatacttcgtgcaggtaacggccagatcaaaatactcatcgttggcgatccgaatcaagctatctatggctctctgggtggctatgctatgccagtggatgaattccgaactctcgctgggatctcgattaaagagttagcgctcagcctaaactaccgctccagcgagcgaattattagctacttttcgaactacagcgtacacgcaacaaaaataaaaggcgctggcaaacatgccaactatcccagccgggtgacctacaatcaaaacgtaacacgcagcggtgtgcatgatgagattgtaaggctgattcggatgagtctcaccaacggtcactctcccgaaaatatctgcgtccttgctccgcagtgggttttgcttgcctctactactcgaaaactagtagcgatgttgcctgaccagcaatttgatggccctggtctcgtccctttcagtaacaatttcgataatttctggttcaagctttccaagattttactaacggattcctcccccaaactcctcgtcaggcgaatgcgttgggcgaacgatgtgatccaagacctcgaaagtttcggcgttgacacccatacactgacaccgcgtatcttgttgcgagagagtaactcactcacagtcaatgaaacggacgggctccgctacttggaccaagctttcaatgatctgctcaagaggctcaatatctcccaagacatccatcctgcactcttgacccatcgggaggcatttttcagcagctcggcagcgagaatagagcggctacagaaggaaggggcgacctacattaatcaagtgtcattcttcaaaaaagtttttcgcgagcgaaccggcatcacagtctccaccatccatggtgtcaagggggccgagttcgacgtcgtcatcgcttttggattactggagggtatggtaccgcactttaatgaagcaaatggaagtgccgccgcaagcaagctcctctatgtattgagttctcgagcccgtaaaaatcttcacttgatctcggaatcaggacgacagagaggaagatacggcctgtatacctcgaccgagttactcgcggcttgccgcttcagctatgaccaggactaa

SEQ ID NO: 73864 - DNA, 2139 bp, Klebsiella pneumoniae MGH 21; identical to SEQ ID NO: 73854

SEQ ID NO: 73865 - DNA, 1785 bp, Klebsiella pneumoniae MGH 21
atgaggttcgttttggatccaagtgacctcaatcctgaacaggcggcagcagtgacagagccatcgagcatttttctgatcgcttgcccgggtagcggaaaaacgcgcaccctgacctacaaaattgcctatgaactctctcgtcgaactgataagcggatggttgttgccattacctacacccaccgtgcagccgatgagatccaagaacgtattgaggatttgggcgttgatacttctgggctatggattggtaccatccatgccttttgcctggagtggatccttaagccatatggcatttattcgcctgaactagcgcgtggttaccgcgttatcgacccgtacgatcgtgagcgtctgctggagaggctgtgcgctcagtataaaggtatcactcactgggattgtgactactacgttactgaaacgggttatcaacttggctgtgtcgatacgagaaaacatcctattattcaaaacgttttgaaggaatattttaaagagctttcatcaagccgacagatcgacttcgaacttatcctttggtatgcgtactgcttgatgcgggacagacctcctatcgcagtactgctctctcgcgtgttttcccacatcctcgtggatgagtatcaggataccaaacagattcagtactctattttgacgtcgatacttcgcgctggaaggggggagaccaaaatactcatcgttggtgatccgaatcaagcaatctatggctcactgggtggctacgctatgccattagatgaattccgtgcgcaagccggaatcccgataaaggagtttgcgctcagcctaaactatcgctccagtgagcgaatcatcagctatttttcgaactacagcgtacacgctagcaaaatcaccggtgctggcaaagatgctaaatttcccagccggattacctataatcaaaaggttacacgcagcaatgttcatgatgagattgtaaggctgattcggaagagtctagacaacggctactcacccgaaaacatctgcgtcctcgctccacagtgggttttgcttgcctccacgactcgaaaactagttgcaatgttgcctgatcagcaatttgatggcccaggcctcatacctttcagtaataacttcgataatttctggttcaaggtttccaaggttttactgacggattcttccccagcattacttatcaggcgactgcgttgggcaaacgaagtaataaaagatcttgatagtttcggcgttgatactaagacactgacaccgagaatcttgctgcgggagagtaacgcgctcacggtcaatgagttggacggactccgctacctggaccaggccttcaccgagctgctcaagaggctcaatatttctccggaaattcatcctgcgctcttgactcatcgagaggcttttttcagcagctcagctgcgcgaatagagcgtctgcaaaaggaaggggcgacatacatcaatcaaatatccgtcttcaaaaaagtctttcgcgaaagaagcggcatcactgtctccaccattcatggtgtcaagggtgccgagttcgacgtcgtcatcgcctttggattattggagggcatggtaccgcacttcaatgaagtaaatggacatgttgccgcaagcaagctcctctatgtattgagctctcgtgctcgaaaaaatcttcatttaatctcggagtcagaacgtcagagaggaagatacagtagctattccgcgaccgaattactcgcggcctgcatctttaattatgacgaggagtaa

SEQ ID NO: 73866 - DNA, 2055 bp, Lactobacillus helveticus CIRM-BIA 101
ttgttcatatcaagtgttgaaataacaaacttcagaacttttaaggaaaaacaaataattcgttttacagagggaattaacattttagtcgggcccaacaatattggaaaaaccacgataatatcagcgataagattaatcttcgacaaaaataaatttggattagatataaatgattttagtaagactgaaacaaaagaagaattgaaaaactgctctcctaaaatcactgtgtcagttaacttgcaaaaatcaaacaaagaaggtagtgatagcgacgatcttctagcaatacgcaattggctgactgatatagataatccatataaggcaaagattactatgcagtttcaacttccaactaaatatgaaaaagcatatctggacgccgtaaaagacttagacgatataggcagtgtctggttagagttggaagatgagtttcttccaaaataccaaagaaaatattttgtaggagagtccgcacaaccattaatggataattcgttaagtcgttttaattgccaatatttgccagctattcgagatgctgaaaaaagaatgaattcgggaaacaaatatctactcaataaacttttaaattttttcattgattacgatttaaaaagcaatgaagagttgaaaaaatctgacatcgaaaagaagatgcaaaagcgacataaagattttcatgatctggctgtgaaactattgaataatcttagccctagatttaaagagggtaaaaaggaaatgctgaagtattcaagccaaaccggggctacttttgatggtgaagaaccagaattcaatagtgcgttaaatgatcacgatatcctaaaagaatttagtttagttgttaaaaatggtgaatcaaatgtgccaataaatttaaatgggctaggatataacaatttaatttatatttctttagtattagctgaacttcagcaaagtcgtgacaattcttattttggtgataattcaagtgtttttccatttctattaatagaagaacctgaggcacatcttcatcctgatatgcaatatgattttttaaaatttttacaaaataatatcaaggatggtacaactagtgaaacagcaaagcaggtgattataaccacgcattctcctaatattacagctgctgctagtttagatgatcttattgttctcagtaaatataaaagtggtgttaaaattggatatcctggggaaacgtttatcgataatccaaaagacaagaaatttgtagaacgatttttagatgtcacacgatccaatttgttttttactaatcaacttatttttattgaggggttagcggaacaaatgctaataccgcaatttatgaaagccgatacatctaacatacaaaacagacatatttctattattaatttgtctgggcgctatttcattccctttttaagaatgtttgatacaaataagaatcctaataccgcaatatataagcagattgcctgtctaacggacttagatcctgttcaaggaaagcaaaacaaatcctgtccgccaatatttcaagcggaacctgacaacaaaaatccgaatatagaaagtatcaaggctttgaaatcggctaatattaaagtgttctcacaagatgaagattctgactataagtctaatgaaggttggacgtttgaatatcagttgtatatggataatcctgatctaatgccattgatctttcacgattctatgagatattgtgatgcatgggaaaatttgaaacaaatgagcattgaaaatctgagtattgaaaaaatatcgaatactttccagaacgaaagatctaaacaaatcgacggaatactcaaggaaaatcacaatactaatgatttatcagaaattactgattccaagttaattaagctatatctaggaacaatgtttctatattcaattaaagataagggcctttatgcgcaagaactttccgaagaaataagtagtggtaaatctattacagtgccaaaatacatcaaaaaatgtttcaaatggatcgcagataaaaatggattataa

SEQ ID NO: 73867 - DNA, 1227 bp, Lactobacillus helveticus CIRM-BIA 101; identical to SEQ ID NO: 72085

SEQ ID NO: 73868 - DNA, 1926 bp, Salmonella enterica; identical to SEQ ID NO: 72180
  subsp. enterica serovar Typhimurium str. DT104

SEQ ID NO: 73869 - DNA, 1641 bp, Salmonella enterica
  subsp. enterica serovar Typhimurium str. DT104
ttgccttctgatgggctaacacttgaacccaatgctctgctggctgcgaaggaacaagcgcgctgtcttgcactgactgcggggccgggagcgggcaagacggaaatgcttgcacagcgagctgacttcctcctccgaaccggaacctgccgttatccgaagagaatactcgctatttctttcaaagttgacgccagcaaaaacttgaaggagcgaatccagcgacgctgtggacaagaattggcttcccgttttgatagctacacatttcatgcgtttgcaaagcgtattattgatcgcttccgagtagtgcttactggtaatgatgctctggatacggattattcgattggcgaaagaaaagtcacaagaaggcaaattacatttcatgatcttgtgccgctagcaattcaaattctcaaggcctctgttgtcgcaagaaatgccatacgccaaacttacagcgatgttttcttggatgaattccaagactgcacggatcagcaatatgaactcgttaaggtagctttccaaagtacaagcattcgtcttaccgctgtcggtgacaccaagcagaaaatcatgggatgggcaggagctttggacggaattttccaaacgttcgctaaggatttttcagccgtaccactaaacatgtaccgaaactttcgttcaaaaccacgcctgcttcggatgcagaacgagataattcgtgtgcttgatccagcttccgttatgccagatcaccaacttgctggtgaggagggagaggttttcgcgtggcaattcgagaatgcacagggggaagctgagtatttggccgatttgattgccgggtggataagaaatgaaaaggttccgttgtccgaaatcgccgtattagtgtccaaacaactagatctttatgccaaccacttgatgacggcattggaagttaggggaataccgtaccggaacgagcaggagatgcaggatattactgttgaacctgccgcgaggctcgttgttgactatttgtcctgcctctacggccagcgagagcccaaagcttgggttcggcttatgaatcaattgattccctttgctgatgatgaggtgcagtctagcgctaggcaaagcttccaacgcttcttcaaggagcagagaaaaatcatcaccatgaccgagctgttggatgagccgttttcgggatggtgggattctgtgtgtagctttctgaagaaaataggaatggagactcttgttgctctctcgcccgactatgagtcacatgctaggttaggtgaagttgtgagagataccaaagcgcgcattgaagaattgcttgaacttacccccgatttgcctcaagccttgactcgtttctctgatgatcaggctgtgcgtattctgactatccataagagcaaaggattggagttcgactcaacgataattatggccgttgagaacgaaatattctttggggatcaagatgctaatcggtgtgctttctttgttggtgtatcccgtgccaagcgtcggcttgttgttacatacgcaaaagagcgagataagcctgataattattcagggatatggcgaacgaatcgctctgctcagttagaatattttggatatacatctccttttgttaagtga

SEQ ID NO: 73870 - DNA, 2370 bp, Burkholderia pseudomallei NCTC 13179
atggacattcccgacgtttctgctcattccgccactacggacccggcgccgagttccgccccaagcgcaccagcagcaccacccgccgaaaccgtcgcgcttgcgggcgattctccaatccgacttgcttgcgtcgaagtctgcaacttccggcgcttggcaaagacccgcctcgagctcgatgatgccaccactatcctggtgggcgccaacaacagcggcaaaacctctcttctcacggttcttcgcaacttcctcagcgactcgccaggtttccgcgctttcgacattagcctctcccagtgggcgaaattgcggcaactgagcgaactctgggaggcgctggacgaggaccccacgacggagtcaaaggatgcggaaaaatgggaggagcagtatcggcagcttctaggttgcatgccgttcattgatctttggttcgacgctaaggaaggcgcgtacaactatgttgcgcccttcattacatcgctgaaatggcgtggcggtgcagttggcgtgcgggtacgactcgaacctgtggcagacgcagatgagttgcggaagctggcttggcgctaccgagaagcgcgttctcccgtccggaagcttccgaaggatggccacgcgtggcctatggatctgcttgattactggttgaggtactccgcggacctgcgacgcattgctgtttaccgcctcgaccctgcgaaggggcctttggcaacgaagccatgcagtgagctacaagaactgccgcccggttcgcagccggttgaactgcaactcctgcgcaagctcgtccgcgtggactttgtgccggctcaacgggggcttggtgcggaagacgacgagacgagatccgaggcggcaagcacgcgtcccgggctgttctcaagccagcttctgaaatttgcccggcaacacctgaacgttgctccatccggccatggcaatcgcgaggatctggtggcagctatcgcaagagctcaagcggaacttgacgattcgatttacaaggcgcttcaaccggcgatggaggacgtggaagtcctaggttatccgggactgcatgacccgcaacagcttcacttccgtacccgtattcagactgcagaccttctcgcacacagcacggcggtccagtatcgcctggacgagactacggccgacgagtccttgccggagcactccattgggcttggctatcagaatttgcagtcgctgagcttcatgctcgtgtctttccgtgccgcgcgcctcaatcccccgcagggctctccagcggcggttcaccttgtaatggtagaggaacctgaagcccatttgcacgttcaggttcaacgcaatttttcgtcgaatgctcacgaactcatccgaccaaaggagctcgtgcatagcaatcttcgcagccaattgctcatcagcacgcactcaagccatctcgcccacggggatagtttcacgcgtctgcgatatgtaaaacggatagcaagtaccggtgcgggcgttaggcccagtagcgaggtcgtcaatctcggcgacgcctttggcgatgacattcaaaccaggacgttcgccgagcgctactttcaggtccaacacacagacctcctcttcgcggacgccgccatttttgtggagggaactgcggagcgcatgctggtgccgcttttcatcgaacgcgactttcccaagcttgccaaaaaatacgtgtcgtttcttgatatcgggggcagtcacgcgcaccgcctcaggccgctggtagagcggctggggattccaacggctgttatcaccgacttggaccccgtggtaccgaccacgaacaaaggcgggcgtgttgtgcgagcggcggtgcatatcgcaggccaagcagacctcgagtgcgggaatgacacactgacctcgtggcaccccaagctggcggatttccacgcttatgggaagccaacgcccgcgcacttggagtgggtctccgacgcgggcgtaaaggtccgcttcgcgtggcagcttcccattgcggccgcaagcgatcaatggcctagctcgttcgaggatgctctcgtcctgacgaacatcgattggtttaaagcgttagacgaagagaaggattccgtgtccggcaagaagaaggatcaccgaggtactctcggcaaggtgataggtctcgtgctcgaccactctgaccatacggagcttcttaaggaactccacgcgatgctgcatgggaacttcagcaagggcgatttcgcggcaacactttttgaacggttgaacgctggacaagccttggcatgtcctacatacatcgctgacgcactcgcctggctgagtggtcaacttgacgtcatagccggagacaccgcgtga

SEQ ID NO: 73871 - DNA, 1956 bp, Burkholderia pseudomallei NCTC 13179
gtgagcgccgcgccggaatccctcggaaacgaccgcgacgctcacgtggtcgaagaaatctgcggctacattacggcgagcccacctcgcagctttttcttgttcgctggcgccgggtcggggaagacccgaacattagtggaggttttgcgccgaattaccggagtagtgaagcatgacgcgggtgaccggtacgcagcgcggcttcggtctcgtggccaatcggtgcgcgtcatcacgtataccaacaacgctaccgccgtcgtcaacggccgacttggcgagaattacctgactgcggtgtcgaccatccacgccttctgctgggaactcatcaagggtttcgacgaagatatccgagacgccctgctcgctcgcaatgccgagagccttgcgactgccaaggccaaggctttgagcaaagcaaagggggaatctgatagggaccgggagaagtacgcagagatcgaagcgaaggctgaagaaatccgaaaaatcgatgcatttatctatcatccggacagcaacacctacgggcaaggcgcgctctcgcacaccgacgttctacatgtgacagcttggctcattcgtgaacgaccaacattgcagcgcatcctcgaggaccgacaccctctcatcctcatcgatgaatcgcaggacacgatgaaaagtgtgctcgacgcgttgttcgagctatcgatgagccgtcccggacacattacgctcggactcttgggcgaccatcggcagcggatttatcccgacgggcacgacgatctgccgtcgcacgtaccggaggactgggcacgccccgcgctgcagatgaaccatcgcagtcagcaacgcatcgtcgatctcatcaacaaaatctgggacgcggatattgaaggccgtacccagcccaagactggcgtgcctcagcattcccggacggaaaaaaacggcggaaccgtgcgccttttcgttggcgataccaagacgagcacggccgagaagattaggagggagtcggattgcgccctcgccatggctgcggagactagctgcgctgcctggcaagatggcacgcgtggctataagacgctggcgcttgagcacaaactggccgccaagcgcggcgacttcttcgacgcgtatagcgcgatggacctgctggacaaggacgccgcgatgcctaagagcaacggtgagcggaccggtcccgcgatggttcggccgctgcttggcccaatgctcgaactcgcccagtgtctgcaagcagacggctcgctggacgagttcgctgctgttgacgtgctgcgtcggcacggaacccttgcaaacctgccggaggccagcgctgatcgtcaagctgccttggacaagctccatgcggcagtcttgaagttcgcgggcgtcatctccatgccggaagcgacggtccgagatgtattggcgccggtcctggaaggagggatattcgatgctgacctccgcctagtccaggcgtacggagacacctcgcctccaccacccgaaccgaaacccagaagcaaggaagcaaaggaagatcggcgcaggcgcggatggtgtgctctcttttccacgccctggcaacagattgcccggtatcgcgcctatcttagcggagacgcggaactcgcgactcatcaagtcgtcaagggctccgagttcaagcacgtgatggtcgtgatggacgatgaggaagctggtggctcgctgttctcttacgataagcttttcggtgccgaggagttgagttcgaatgaccgcgagaacgtcgacgagggaaacgagaccatcatcgatcggactctgcgacttctgtacgtcacctgtagccgagcagaggaaagcctcgcgctagttctgtgggcaaagaatccggctgcggcgcttgacgcaatcaaacggtcagaatggtttgccgctaacgaggtgtccgctctggagtag

SEQ ID NO: 73872 - DNA, 1812 bp, uncultured Thiohalocapsa sp. PB-PSB1
atggcatccgtaaaccccactcgcgtcgacagcggcttgcgcctagtcgaggcgcgcattcgcaactttcgctcgctgcgcgcggtggacattcgattcgacaagctgacggtattgatcggcgagaacaactcgggaaagaccagtctcttggaagctctttatgctgcaatcggcgcaggtcgcagggtcctcacgtccgacgacctatttctgggtatcggcgaggcgaaggtgccgcgggagcggacgatcgttatcgatctgctgttccgcccggcggatccgtccggaatcctggacgaatttcctgaaggctcctactggcttgagctctgggggaccggcatctcgcaagacgcggacgacaacgacttcatggccatccgtaccaagatggcctggaatacgggtaaggcggagtacgagaccaagcgacaatttctcgccgaatggtcgtcggcggccgatctcgactctgccaataccgtccctggtgctgtcgcgaccgcgcagctcgaacccatcgccctgtacctgttggatgccaagcgggacatccaggacgagctgcaaagtcgcagctccttttggcacaagctgatctccgatccgggtctgcccgaaaagacggttaccaagatcgagcggatactgtctaagctcaatgccagcatcgtcgatggcagcccggtgctctcacatgttcagacccatctcgacgatctatacaagacggtttcgtccggcaggggagcggtcagcgtgacgccgctggcccgtcatctgcgcgacctcagccggggtatggacattggattctcgaccaagggtgcccagacctttccgctggtccgccacggcatgggaacccgcagcctagcggcggtcttgacctttcgcgcctacagccagtggcgccaaatgcgggacagcggtggcaccatgcattcccttctagcgctggaggagcctgaggcccacctccatccccaggcccaacgggcattgttcgcccagatcgaggcgatccccggtcagcgctttatcagcacgcactccccgtacattgcggcccaggccgagatcggccagttcaggcattttcgcaaggaaggcgccgagacgacggtctcccaaatgagcctttccggcttaagtccggaagacctgcgcaagatcgaccgcatggtgctcaatactcgcggcgaactcctgttcgccagggccttggtcttcttcgagggcgagacggaggaacaggccttgcccttcttcgcgaaggcttactggggcgagcatgtccacaccttggggatctcgatgattggcgttggaggtcaagcctatctgccctttgtgcgcctcgccgagagctttgatatcccctggttcatcttttccgatggtgagccccaaaccatcgctagtctgcgcacgacgctcggaaatctgggtcgcccctccgacctaagcaacagcgccaacgaaaacgtcctcgtgattcctggcggcgaggacttcgaggcctacttgagccaacctgtctatgaggccgttttggtcgaaatgattatcaaagagaattcccggtcgcctcagcatgaggcggtgctgaggcgtcaatgggcaaacgaatcagacaagcgcgcgaagatcaagcaggaactatcggcgagcaagacgcggtacgccttgccgcttgccttggccatcacgtcgatgacagacccgacgtcgcgtttcccgacattgatccgagagctgttcgagacaatgtccctacgcttgggcttgacgcaagcgacctga

SEQ ID NO: 73873 - DNA, 1848 bp, uncultured Thiohalocapsa sp. PB-PSB1
atgaacctctccaaagaccaagcccgcgtcgtccagcacggtgaaggcgccctgttggtggtggcaggccccggctccggcaagacacgggtgctgacggaacgcgtccggcggctcgtgtgtgagagcgatgggcatttccgcgtactcgctctgaccttcaccaacaaggccgccaatgagatgcgcgagcgcctggaggaaattccggacatccatcaacgcgccttcatcggcaccctgcacagcttctgcatggaggtcctaaccagccgcggccagcaggtcggcatcgatggggcgcccaatctgttcgaacagttccaggatcgcaagcaggtgcttcgccaagcgatgctcgccgaccccgagctcaggcacatcttgctgtcgaaaggatcggtccgcgaccaagacaaggcgctgtggcagttactcgacgcgatctcggatgcaaagggacagctgttgctgccggatgcagttgaagaccctcgtttcggcaggctctacctcgcttacgatcaagggatgcgggcgtcgcgcgccattgactacgatgacttgttgctgctcacctatcgtctcttcttggagcgcccgaagatcgccggtttctaccgcaggctttaccgctacatctgcatcgacgaggcacaggatctcaacgaggcgcagtaccgcctgcttcaggccttgtgcggctcctcttaccgcaacctgatgatggtgggagacccgaaacaggcgatcttccagtggaatggcgctcatcccaagtacctggacctgttcgagcgcgactttgaggcacagagaatcgctctgaaccaaaactttcgctcgtcagccgcggtcgtagagattgccgtccggctgtcccccgattacgaggtggaaggcgagtaccctattgccggcgaggtcaccctgcttcgaggccgggatgaggaggacgaagcacgccaagtcatcgcctatctgcgcgacctccaggcctcgggacatgcggatatcgagggagagataacgctggatcggtgtgcgatcctgggacgcaaccgctacgtcttcaactgcttggaacccgcactatctagagagggctggacctactacaaacacctctcgacgcaacaggagagcgaatccgatctgctggaagacttcgaaatatgtctgcgcctcttggcgaatcccggtgaccgcctgcatttggaacaactcttgaatcggtggcgtatcgattgttcggagtcagttcgcccggagccgttagattgcagcgctttgatgcagcaactggagcgcttcgcgagcgggaatcctcgccgcgttatccttgaagcggtgcaacgcttggatttgaatgccagtgagttccgtctcggaccggcgctcgatcaccttgcggcctacgccgacgatgtactgaaggacgatgaccgggcgatggtcctgcaggacataagccaatggcgtaaggattgggaccgcttcgtgcgccgcgcttcggggctgcaacgcagcctgcggaccttcctcgggcagatcgctctaggcgctacccagcagccgcgcgaggacgggcttgcgctgctgacggtgcactcggcaaaaggcttggagttcgatgttgtcgtgatcatgggcatgatggagggtgtcttccccgactaccgtgcggccggatcggcgttgcatgaagagcgacgtaatctgttcgtcgccgcgacccgttccaagcgccttctgtgcttctcctatacggagcaacggatgatgccttggggttcgtccaaagcgcagataccctcacgcttccttcagcagctcggactgacctga

SEQ ID NO: 73874 - DNA, 2079 bp, Elizabethkingia anophelis NUHP1
gtgaaaataactcaactttctgtcactaactttcgtctattagacgatgtttccataaatatagaagatgatattactttaattgttggaaaaaacaatacagggaagacctctctatttgagattattaatttgttttttgaaagtaataacaaaatctcgtttcatgatttttctcaaaatagttatgaaacttttgatagttgctacaaaaaatttagtaatgaattacttgtcgaagctgacgaaataaaaaaagatgaaatagaaaaagaaattattgctaaaattccaagaattattttaagaattgaaattgagtatgataagattgaagactcactaatcaacattagtgatttcatttctgatttggatgatttaaaaaccgaagcatcaatagtttttaaatacgagcctaaggataccatcaatctttttaaaacatttcacaatagggatcttaaaacagttggattaattgaatggttaaatgaaaatattaatagttattattctacccgagtttttgggggtgataatttaatagaagataatgttttaagtaaagtgtccaaagttctgtgttttgaaacaattcaagcatcaagaaaattagatgacactaaaatggataaaaaccgttctcttgctgttgggttttctgaatattatcgaaatattcatagtgataaagatggggaagttgaagatttgaagacggcattaaaagacgtatccactgagttagatgaaaggtatggaaaggtcctcgagaggattcttatcaaattaaaatcatttgggatagataaagaaattaatattcctgaaatagttttaaaatctaaatttgatcccgaaaatatcataaagaataatattaagtatttttataaaaatggtgatattgagctccctgaaagctataatgggcttggatacagtaatcttatttttttagtcttaaaaattgtatcatttattgaaaatttcaagaaaaataaggcgaagcatcaaatggagattttgactatacttcttgaagagccggaagcacatttgcatccgcaaatgcagcaagtttttgtcgaacaagtaagagaaaccatcgaaaaagctaaagtagaggataatattcgagtacaattaattattagtacccattcttctcacatgattgcagaagcaggtcttaatgtaaaaagaagcttcgagaggattagatactttagcaagataaaaagtgataagaaatacattattgaaattaaggatttcaatgattttaagcacaaagaaactgacaaggatactttcaggtttttgaagcaatatttaaatctaaatagatgcgacttgttttttgctgataaagttataatggttgagggaataactgaaaagctcttaatgcctttatttataaaaaaagttgctacaaagctggagaatgaatatgtatcaattatagaagtaggaggcagctatacacataaatttaaagagttttttaaatttttgaataccaaagttttgattataacagatattgactccgtatgtgctgagcatggtaaatcatgccatgtactgaagcctgattcaaatacaagcaattctacattatcagattggctaccaaagaaaactaaaatctcagatttgttagctttaacttctgaagaaaaattagatgattcgaaaattattagagtggcttttcaaattgcagaagatgataatgcatttgtagcaagaagcttagaaaattcaattattaattgtaatcagacattttttaaaagtaaatattcttctggaggtacagaattagatgttcataaatctttttcttatcagaaactaaaaaatttagaagacttaatatacctagaaactgatagaaaccaatctgaggtagatatgtcttctaagcaaaaaacagattttacttttgatttgatgactttcgatgaaaaagaaactgctcttgagtggaaagttcctaaatatatccgtgagggcctggaatggttagaaaagaatgaagaggtagaatcatctaaagtcgattaa

SEQ ID NO: 73875 - DNA, 1836 bp, Elizabethkingia anophelis NUHP1
atgtcagcatttgaggaaataaaagctcgtattgaagataagtcaagttttgttgtagaagctggagcgggttctggtaaaacttatgtattaattcaaacgttaaatcatttaattgaaacacaaggtgaaaatttaagtttaaataatcaaactattatttgtattacttataccaatgttgcaaaaaatgaaataatcaaacggattgaatttaatgatttggttggtgtgtatacaatccatgagtttttatggcaatcgattaaacagtttcaaaaacagcttaaagttgagttatgcaacctaaatgagataagatataaaaaggagatagataagaacggagcttctaagaattacatagaaaaccttaaagagcgaattgacaatgttaatgagatattttataatgattcagcttttcgtgattttgaaataggtgaattgcatcacgatgacgttatagaattggctaaaatgctctttgaaaactatcctcttttaacatcagtaatagcacaaaaatatccttatatttttattgatgaatatcaggatacatctgaagatacagtacaagctttagtagattatttattaaaacgaaatgagagaaaggttatcttaggtttttatggagattctcatcaaaagatatatgatactggtataggtagtttagaaaagtattatagtaaagaagttaaaactcttacattaattaaaaaggaggaaaactataggtcgtctaaagcaattgtgggggtattgaatagttttagaacgaacattgagcaaaaacctcaaaataagattaatgggtcggtcatttttctctattggaaagaccatcctgaaaaagaagaaaagcaaaaggtaaccgactttgagaactcattaaaagattataaaaataacttctatgatgaggttgtcaatatattaaagaaaaaagattgggtttttgataaagcaggatttgataaaattcttgttctggcaaacagccgtatagctgaaagagcaggtttttcaaaaattttcaaattattctcaggtcgatttgggcaatctgttaaagaaagatttttggataggaatcatattcttgttcgattattcactggttatgtcgacaagaaaagttctcaggaaagaacagtgggcttggaacatttgttactatactggagtgtcaataatcataatgaagtgattaggtttatcaagaaaaatggaaccttattaaatgattttgaacatcctaaaaagaaaataatagcagaaatattagacgagttaagtgctaatagaagtacgatgacaatcggggaagttttgaatattattttggataaaggaataattttttcagattctctaaataaatatattgagagaataaatcaagatgtagaaaaattagataaggaaagcaaagaacgagtagaaaaagataaacgtttctatgaatcatttttagcactttcttatgatgaaattttaaaattttggaagcatgtgcaaaacgaaacagtcttttctacgaaacatggtaccaaaggtgatgaatatagaaatgtcctaactgttattgatgatactgagtggaaaggagaatataatttcaataatttctttaataattctgaagacaaaccagaaagagaattgcgcacacggaatttattttatgttgaatgttccagggcaaaagaaaatttggttgtattaatgttgtccaaaatagatgaacgagcacttaaaaatataaacaaatggttcggcaataaaaatgtaattgatgtaaaagaatttattagtggttcttaa

SEQ ID NO: 73876 - DNA, 2070 bp, Pseudomonas aeruginosa DHS01
atgaagctgcgtcatgcaaagatcaagaacttccggttactcgcagacgtgcagcttgctctggaggatttgactactgttgtcgtggggcgaaacaacagtggcaaaacttcactgtccgagatcatacggcgactactagccgaaggcagcgcagcatttcaactcgaagatttctccagtgcctgctacgacaggttctgcacggcactggaagctcataataatggccaagatgacgatgtagtcagggctctgattccgttcatcgagttgcgtttgacgtttgaatatgaccctgctcagccacagttggggcctctcagtccattcgttatcgacctcgaccccgactgtaatgaggtactcgctgtagtccgctacgagttgaaggatggacagctcgcccaatttttctcgggtcagccggatacccccctgaccgatgaaacgaggatagctttctttcgctcgcttcgagaacgtattccaaccagctttgccgtcagggtatgggcggaagatccgaatgatgcggagaacaatcgtcagttgcagccgagtgcactgaaggctctgatcaaaaccggcttcatcaacgctcaaagaggcctggacgacataacatcccgcgagtccgatgtactcgccaagactgttgaactcctctttgccacagcttcttcatcttcggcagatgaggctgacaaacagattgcccaagcgctgaaagaggccgttcaggacattcaatctcagatagacagcagcttcggcggccaactgaacaatctgataccggcattgaagaactttggatacccaggattgggaaatcaggaactgcataccgagacattgcttgatgttcgcaagctgctctccaatttcaccaaggtgcgctatgccggctacagcggtgtgactctgccggagtcctacaacgggcttggagccagaaacctcattttcatccttttgcagcttgcgggattctataaatcgtttctggccgaaccaaattctccaggggtgcacctggtcttcattgaggaacccgaggctcatttgcaccctcagatgcaggaggttttcatacgtcagctcgcgaagactgctcaactgctggttgaaggcacggaaagtaagacggcttggccggtccagttcgtcgtttccacgcactcatcgcatatagccaacgaggccggatttgaaagtatccgctatttcctcagtggcgaagtacaaggcgcagccgctggcgttcgccaaacgagggtcaaggatctacgcgaggggctggacggcgtttccgaaccggacaagaagtttctgcatcagtatatgacgttgacccgctgcgacctgtttttttccgacaaagcgatcctagtagaaggtttgagcgagcgactcttgctccccgcgatcatcgaaaaactggaaaccgcagagccagatcggccaaagctatcaagccagtacgtaaccactatggaagtcggtggagcatatgctcatcttttcttcgggctcctgcgctttcttgagttgccaaccctaatccttaccgatctagattcggtagaaaaaccgggcggaagcgcgtgcgaggtccacaagggaacctactccagcaacgcctgcctgaaagcctggttctccgatgataatccattcaccctcaatggcctcttgaccaaggatgaatccgaaaaggcaaagcatggcaactgcatcgcctatcagtgcgcggagaaagagaacgggccatgcggtcgcacctttgaagatgctttcattctcgcgaaccgagcattattcggcttgaatggagccacacgggaagagcttgaagcgggagccagaagccaagccagtaagatcaagaagtccgagtttgcgctgaagtacgcaatagaagaaaaagcctggacgacccccaagtacattctcgatggaatacgccggctagcggctggcatcgagccagctatccctgacccggcgcttgccctggcggccgaggcgatgatcgccaacgaggaggatgccgctgatgcctga

SEQ ID NO: 73877 - DNA, 1740 bp, Pseudomonas aeruginosa DHS01
atgcctgatccgcagtcaccggccgaggttgccagccagcgcgctcttgatgccatgtttcgcagcctggatgccggagagcacttccggctagaagctggagcaggcgctgggaagacctactctctcatcaaagcgctccactatttgatcgagcgccacaaaagcacatttccaaggaaaaacaagcagattgcgtgcattacatttaccaatgtggcccgcgatgaaattgccgcccgtactgacagaagcccaatggtgtactgcgacaccaatcatgccttctgttggtcattgatcagtggcttccagaaacaactccgtggtttggttgaggcgatgccggcatggcaagagagaattgcggaagctggaggcggcctgggtaaccgtgtaatcgagtacaactttgggcaccgttccattcgtgaagatcgcgtgtctctccatcacgatgatgtgttgcccctcactgtttcattgatggagcatgccaaatttaggcatatagtgacagatcggtttccaatcattcttgtggatgaatatcaagataccgataaggattgggtcgaggcgattcagcggctgtttttggggaatccgccttcacccctattcggcttctttggcgaccattggcagaagatatatggcaatggatgcggaagacttgagcatccgcaagtcaaggagattggcaaggaagccaacttccgatcagtcaaagccattgttgactgcctcaaccggatgcgcccggagctacaacaatttgtcgaagaccctgacgctattggacaggtcagcgtatttcatacaaatgcctggactggaggacgacaaaccggtgcccattggggaggagatttaccttcggaagtcggccacgacacacttgagggagtgaaggcctcgttgacacaagagggatgggatttttccccggaaagtacaaaggtactcatgctgacgcataggcttcttgccagtgagcagggctatgccagcttgccatcagtctttcgttacaacgattcctttgccaagaaggaacatccgtatattgccttcttcgtagaccagttggagcctgcgtgcgatgccttctccgcgaataggttcggcgccatgttcgatgcgctgggcggtaacacgccgctattgcggagtcaggccgataaggcagcctggcacgatgcgatgagccagctactggcgattcgcgaaaatggcacggtcggagaagtcatcgaccacctgctcaaccggcggaagccaagactcccggaagccatcgagaagcgtgagcgggaactacgcgagttcgatcgagcaagcggcgaagagatgccggccgcactggcggagatagagaagctacgcgcggtcagatacgcagaaatcaaaacgctacggagctatctggatgggcactctccctttgaaaccaaacacggagtaaagggcgcggagttcgagaatgttcttgttgtcatcggtcgcgggtggaaccagtacaactttggagagatgctcgaactggcaggaagcgcagccatcccacccgggaagcaggcggccttcgagcgaaatcgaaacttgttctatgttgcctgctcaagaccgaaacgccgccttgccctgctgttcacacagcagctttcgccagatgccatcgcaacacttgaaaggtggttcttgccagagagcatccgtgctgtcgctttttcgtag

SEQ ID NO: 73878 - DNA, 1872 bp, Pseudomonas aeruginosa PA1
gtgcatcttgtgcgtgttcgcgtccggaacttcagaggcatcgcctacggtgaggtccacctcaatggacacactgcttttatcggtgacaataacgccggcaagtccacattgctggaagcggtggacttggtacttggcccggagcgcctgagtcgtcgccctgtaattgatgagcacgatttctatgccggtacgtacgtagatccggccaagaacgaggtcgtcccgatccaggtcgaggttattgttgggggactctctgatgagcaactgcggcatttccgggaccatatcgagtggtgggatacacagaccaagtcattgcttgtaggggcacccccggagggaacagatgcgccccatgtcggagcggcaatacgcgtcttcttcaacggttggtatgacgtagatgaggacgacttcgctggggatacctattacgccactcccgaaatgccggatggctcctacccccggttctctgcgcccgacaaacgaaaatgcggttttctttatctgcgcacgctgcggaccggagctcgcgcactcagcctggaacggggctctttgttggacgtgatccttcggctgaaggaaacacgactgactatgtgggaggatttgctcgaccagctgagggcactgccagttggagagaccgaggacatcggcgagttgcttgtcgcagtccaagatgcagtacggcactacgtaccatccgactgggcagagcaaccccacatgcgggtttcggacctcactcgcgacatgctccgtcgaaccctgactgtcttcatgggtactggagcgaaaaggccggacggctcagtctattccgccccatatcagcaccaaggcactggcacgattaacacgctggtattggctctgctttcgatcatcgccgaactcaagcaaagcgtgatcttcgcgatggaagagccagagatcgcgcttccgccgcacacccagaaacgaatcatcaattcgctgcgccagaagtcggcacaggccatcttcacctcccactcaccctacgtgctggaggagttcgagcctgcccaggtagtggttctcaagcgcacggccggtgttatgaccggggtgcctgctacatatccgccagcagtcaagcccaaggcctatcgcacagaattcaaagcacggttctgcgaagccctgctggcacgctacgtacttgtacttgagggccgtacggagttcgacgcattgcctgccgctgcccgccggctcgccgagctggatcccacgcgattcaaatcgctcgaaaacctaggtgtggctatcgtcgacgcccgcggcgagaccaatgtcgcgccactgggtgcattcttccgctcactcggcaaggtcgtgttcgccgtatttgacaagcaaacgccggaggcgctcgcaaccatcactgcctcggtcgatcatgcctatgagtctgcgactaagggctttgaaaaccttgtcttgtatggcgcgtctgaggtggcactccgcagctatgctgctgttgtggttgttggcggtgattggccgcagcatctcgcggcatacacaccaacacccgcaacaccgctggccaatctgcaggtagctctgtcgcactattttggctgggccaaaggcggtggcgacgccggcgacttgctcgcctcctgtccaaccgccaatgacatgcccgaatacgtgagaaccacgctggcagccatcaagaacgtcattgagccacctcagccgcctccattacctcaccagctagccggcgtgccccctctcccagaggctgcagccaagccaccgccattggcagcagcctatgggaagttccacccgtccccgccccagcctctggcatga

SEQ ID NO: 73879 - DNA, 1656 bp, Pseudomonas aeruginosa PA1
ttggcgctaggtggtcctggtgcaggcaaaacacacgtcgcgctggtcaaagctcgtgatgagattcgctcaggggtactcaagccaggccagaagatcctcttcttgagcttcgccaggcctaccgtagcgcgcatcatcgaaaaggcttctgagctgatttctcgcgaggacctgaagcaacttgaggtcagcacgtaccacggttttgcttggagcattctccgaagccacgcctatctgttgaatggcaggccgagcttgcagcttctgccaccacccgaggcagcagcgcatttggcagatatcgataaggcccagcacgaaaatgagaagcgacgcctattcgagcacgagggccgcctgcatttcgacttgttcgcaagcttggtcagcgaacttctgagccgtagtgaccggctaagcgccatcttctccgacgcctatcccattatcatcctcgacgagtttcaggacacaaactgtgatgaatgggcgctgatccagcagcttggaaagcgtagtcgcctcattgctctggccgaccctgaacagcggatctatgagtttcgaggcgctgatcctaggcgggttggcgactttctggagctcttcggcgccgtccacttcgatttcgcaggtgaaaaccaccgcagcagcggtaccgatatcacgacctatgggaatgacctgctcactggcgcaaacaagggcaaggtctatcagcaggtaaaaatcacgcgttacggcttcatgtatggaaagagcctgcacttcactgccaaggccgcagtgctctcggcgttggatcgcctcaaggcaataccggacaaatcgatcgcgatcctggtgccatccaagcggctgatgctcgagctttctgattacctttcttctgcagctgatggtctgccagagctacatcacgatgttgcaatggatgctgaaccgccggctctcgccgctggcgttatcgccacgttactggagggggggacggctggcgatttggcgagccgcatgcttggtgcacttcactcgcacattcgtggacgccgcggaggcaagcctaccccccagtccgagctggacctggcaggtgctcttagcggattcctctcctcgggaaagatccgcggtgccaaacgccagctgattgtcagcgaagttcagcgtatcgcagagttgcggcagcaactgcaattaacgggcgaccctgcggaggactggttgcagctgcgcggcctgttgcaatcgtccgctgcggtagccttgaagcaagtagcaacagatgctcgctaccttcgacttcttcatcgtggctcggtactgcgggctaacttgggtgcgctgtggcgtgcccagggagagtacaagggggctgaggaagcagtccgcagtgccttgatgcaggagcatttcgctgcagctcaaaaggactggcgcggcatccacctaatgacgatacataagtccaaagggaaggagttcgacgaggtcatcatctacgacggcctatttcagcgcattgccaaagccccgcaggatccaaaaatctgcgctcaggatcttttagtgctacgggtgggagtgactcgggcgatacgtcgaaccaccattctgactccgaagcgcgatacctgccctttcctgtga

SEQ ID NO: 73880 - DNA, 1872 bp, Pseudomonas aeruginosa PA1R; identical to SEQ ID NO: 73878

SEQ ID NO: 73881 - DNA, 1713 bp, Pseudomonas aeruginosa PA1R
atgacggaagtgtggagcgatcagaagcgcggtttcctggcgtgcgctgggcacaccttggcgctaggtggtcctggtgcaggcaaaacacacgtcgcgctggtcaaagctcgtgatgagattcgctcaggggtactcaagccaggccagaagatcctcttcttgagcttcgccaggcctaccgtagcgcgcatcatcgaaaaggcttctgagctgatttctcgcgaggacctgaagcaacttgaggtcagcacgtaccacggttttgcttggagcattctccgaagccacgcctatctgttgaatggcaggccgagcttgcagcttctgccaccacccgaggcagcagcgcatttggcagatatcgataaggcccagcacgaaaatgagaagcgacgcctattcgagcacgagggccgcctgcatttcgacttgttcgcaagcttggtcagcgaacttctgagccgtagtgaccggctaagcgccatcttctccgacgcctatcccattatcatcctcgacgagtttcaggacacaaactgtgatgaatgggcgctgatccagcagcttggaaagcgtagtcgcctcattgctctggccgaccctgaacagcggatctatgagtttcgaggcgctgatcctaggcgggttggcgactttctggagctcttcggcgccgtccacttcgatttcgcaggtgaaaaccaccgcagcagcggtaccgatatcacgacctatgggaatgacctgctcactggcgcaaacaagggcaaggtctatcagcaggtaaaaatcacgcgttacggcttcatgtatggaaagagcctgcacttcactgccaaggccgcagtgctctcggcgttggatcgcctcaaggcaataccggacaaatcgatcgcgatcctggtgccatccaagcggctgatgctcgagctttctgattacctttcttctgcagctgatggtctgccagagctacatcacgatgttgcaatggatgctgaaccgccggctctcgccgctggcgttatcgccacgttactggagggggggacggctggcgatttggcgagccgcatgcttggtgcacttcactcgcacattcgtggacgccgcggaggcaagcctaccccccagtccgagctggacctggcaggtgctcttagcggattcctctcctcgggaaagatccgcggtgccaaacgccagctgattgtcagcgaagttcagcgtatcgcagagttgcggcagcaactgcaattaacgggcgaccctgcggaggactggttgcagctgcgcggcctgttgcaatcgtccgctgcggtagccttgaagcaagtagcaacagatgctcgctaccttcgacttcttcatcgtggctcggtactgcgggctaacttgggtgcgctgtggcgtgcccagggagagtacaagggggctgaggaagcagtccgcagtgccttgatgcaggagcatttcgctgcagctcaaaaggactggcgcggcatccacctaatgacgatacataagtccaaagggaaggagttcgacgaggtcatcatctacgacggcctatttcagcgcattgccaaagccccgcaggatccaaaaatctgcgctcaggatcttttagtgctacgggtgggagtgactcgggcgatacgtcgaaccaccattctgactccgaagcgcgatacctgccctttcctgtga

SEQ ID NO: 73882 - DNA, 1695 bp, Vibrio halioticoli NBRC 102217
ttggaaatttcatctcttcatctcaaaggcttcagaaacttcaatgatgctttaatcaattttaattcaagcacgttaatcattggttcaaatgatataggtaaaagtaatatgctccattctcttcgcatattattagataagagtctttctgaagctgatattgaaccctcggagctagacttccacattggtttagatggcacttctcagtatgtagagatcacaataacctttaaagatgtgaaagaagatgctgttctgtcgattttaaaaggtaatgtaaatgacaatggagaaacaatttttcgctacacggccaataagtcagacctcagctacaagctatgggttggtcaatcgctagaagatttacaagaagtcacaagtcgcttttacctcaagtacattaacctaaagtacattcagtcacagcgagacttaaatcgtgttatcgccaaagaaaagaagcaacttcttcgtattgctcaacaagtactaaatgaaaacgatagccaagaagatgaaactttactcacagaaataagtactgatttagcaaaattaaataggaaagttgccaaactaaactatgttaagtcagcaacagatgatatcaacagtgaactaaaaaaactagcataccataactcaaattattccgttcagcttgacactggcgctatagaagtaaatgattttattgacaaactacagctcggtgcatccactggtggcgaaagtgtcatgcttggtggcgatggacgcaacaatcaaatactgctagctttatggaaagcaaaaagcataattgaacaggatatagatcacgaggttgttttttacgtggttgaagagcctgaagcccacctccaccctcatcagcagcgtaaattagcgacatacttgattgaagagcttcctggacagaccattatatcgtcacactcacctcaaattgctactaatttcactccagattctatcgttcgcctactttcatttaaaaactcaactctagctgctagtaatgggtgttcgcaatgtattgcggaaagttggaagagtatgagttatagaatgagtatcttaccagcagaggctttcttctctaacggcgtgtttttggtagaaggtccatcagagatgctcttttatcatgaattagctaagcaaatcggaataaacttagattttaaaaatctatctatcctctctgttgatggcatttcgttctctgtatatgtacaaatattaaacgctttaaacattccttgggttatgcgaactgacaacgacatcaacaaaattaaaggtaaaagtcagtggcaatttgcaggagctaatcgttgtttaagcgctgctaacctctcaaaactaaagcatagtgatattaaactttcacctaccgatgcgtttaataatggtacttggagaattgtatcggatgcagtgaattgtaaaggtatttatctttctaaagtagacctagaaactgatctagtaacagagcttcctgagtcaatagttaaagcattaggaaaaagtgatacaaatggtgctattaagtacctacaggggaaaaaagcacttagaatgcacccgttgcttaaaaagattgataacgatctagcttcaattacttcaggtgatttggcgagaccactacacaaattagtggaaatggtaaggtaa

SEQ ID NO: 73883 - DNA, 1623 bp, Vibrio halioticoli NBRC 102217
atgaagcagtttaagctaacagcgcagcaacaagaggcgattgattacaatggaagtatgattattacggcttgtcctggtagtggaaagacaaccgttgtaaccgaaaaaattagacaatccaccctaaatttaccttcttataaaggtgtcattgctattacatatactcgaaaagcgagcgcagaactgaagcgtaaatgcacttcgaatgcacatgacaccaaagcaagcttttttgggacaatcgatagtttttgtttcaaagaaattattttaccattcttaccgagaatttggggatcaccagctttagaattaagagcaacgaagaagttaattagtccatacaatgagtatttaaaccaagaatataaatctccaacaacagcagatattgtcaatgatcctggattcaaagctttatacgatgacggtattttgtggatgaactcttttgcggctctagcgttatttgttctcaagaattctttagcagcaaggcgttatgtttctgcaaggtattcaagcgtctacattgatgagtatcaagattcatcttttgctcaacatcaattgttcgttgagctatttcagttaggattaactgccaccgcagttggtgattcatggcaaagtatttatgagtttcgtggtggtgactcaaagctacttttggcgttgacaacagatccaagattcaagcacttcgttattgacaagaaccatcgttgtcacccttctatcgtcaattacgctgagcgattgattgatagcaatgctcagttgttaaaacatgcccctgacgatatcagagttcatcgctcctacctccaaggtaatctaacaagtataggaaacggtatatctacttacattaatacattgctcaaagatggcaacatcaaacaagcatcagatgttggtgtattagctagaaaagagcaatccttacagatgattgctaatggaatgaccgtcaagtataggttatataacgacaaccctattgataagcatgcttcaaccgagtgtgccgatttttatacggatttattatcttatcgatatggtgcgatttccacgatgcaagacataattgatacctatttcgagtctattgatcaaaaaaaactatcaatcaataacttgagaacaatgatccaaaaattaaaagatgatcaaactgtggaagagttgattgataaatttaaccaattagccactttaattggcattaaagatacaagatctacagatacagcactaatatcgaaagttcatgatgaatcatttttgaagcagtttaaattaaaagatgaaaatgaagtacaggtcatgacacttcataaatccaaagggctggagttcaagtatgtgtttcacttagatctagaagaatggtcttttcctcatctgacacctggaaaatcttggggggaacagacgttcactaatctagaacaagatacaaaccttcattatgtggggattaccagagctgaagagcactgctttctcgttagagccgaatatagacaaaacgcaaaaggtaaggattcatactcgaatccatcatatttttggacgttaccacagcttgaagggttgtattcagaatga

SEQ ID NO: 73884 - DNA, 2127 bp, Enterobacter cloacae S611
atgtatcttaaaagtatcgaaataaacaatttcaggaagtttggtagcaaagataacttaataggttttgtaaaagctaattcaggagataataaaatttcaccagttgcttcatcaacaactttaatagtcggtaaaaataatgcaggtaaaaccactattactaaagcgttggaatttatagttgatgaaggggataggttgattggttcatattttaattttgattacttaaatagtttattgagtaaatacatagggggggactacaaagaaacaccagagctaagctttattttagatgttattcttgataacggcaatgaagatttagcaacaaatttcggaagttttattactatcaacgacagcaaagatgataaaaaaccacaatcagctaaagttaaaataatttatgaggttaaagataaggatttatttgaaactagcataaaaaatgggattgattttctttcgctgaagaaaaaagataaagtttcgaaattcaaattcttagtggatgtgatctcagatacccaattcagacgagtagtgaaagggttaaacggaagaggagaaaaaaacattcggctaaaagatataattgatctcaaagttatatctgtgtctaataatatccatgataaaaggttgctggctaagtcttttaataaaataattagatacatgtatgaggccaatgatagaagccttaagagtattaacagtttagtcgaaaaaaataataataggctgacgggtagaattagaaggacacatcagaagggaattcaatctgttcttgagaacataatctctgaaaatgcattagctttttctctaagagctgatcttactttcgataagttaatgactgacctcgtaacttatgaatatatagacggtgaacattttgtgccagaaggacagtttggattaggttacactaatttgataaatatacttagcgaaattattgatttttcatataaatgtaagttcatgaaaaagcaaagtaaagttcaggttttatgtattgaagagcctgaattatttatgcatccgcaaatgcaggttaatttcatacgtcatatagaagaggcactgtctgcaatattaaaattatcaagtagagatgttgctaatttaaaaagtcaaattgtcattactacacattcatcacacatactgaacagtgtgattcaagagagttgctcattagatgaagttaactacacctatcccgaaaacgggcaaagcaaaaacatcatcattaaagacgcaaatatttctaatggtaagaccgacgaagagtattttcaatttataaaaaaacatataaagcatcaagttcctgagttgttcttttctgatgctatcatattagttgaaggaattaccgaagaaagagttgttagtttttttatagaaaaggatattatccttagaaggaaaaaaatttcggtgtttagaatagatggcgctcacggcagtgtttacattaaattgttgaatactctgagaataccttctctcattattactgatattgattttcaaagatcaaaagaatctttatataaaaagattaaaacaatagatgatgaggtgattaaaattcctctctatccacagattgaagtaattgatgaaaatactcttactacgaacaaaacacttactttcattcatggtaactcaaaagtaaatacttttccaaaatatttctcacaagagaacgtaagagtatcatatcaaatagaaccagttgaattttactcagaaggaactttggtaaataaattttatgccactagttttgaagaagcactcattttagagaactacaataatctactttttaaagaacttttaatcacagtcattccttctgtcatggatgaattattggaaggtgaaaacgcagatgtaaatattttagccaaaaattcgtataggttgcaaaagaacctatccgaaagtaaaagtaaattcagtaactcaattatatattcattggttaattcagcagaagactctggagaaaaaataaaaatcccaaaatatattaaggaaggaattgattggctttcgagttacaaattttctgatgaggttgaattatga

SEQ ID NO: 73885 - DNA, 2058 bp, Enterobacter cloacae S611
atgatatttgaagagtctcaagatgctcttatagaggaaacgagggtttttgataccttagttggatatgttaatgataggaagccattttattttctgtccggtgctggtagtggtaaaacgcatgctttaataaatttaataaaaagaataatgcatgataataaatcacagttatttactacgggtcaaaaaatattatgtataacttacactaacaatgctaaagacgaaattattagtaggctaggtgaaaatgaattggtttatgtatccacgattcataattttttatgggatatgatccaacatcacatggatgctcttttagaaattcatgtctcacatctgaatgacttgattaaacaaaatgaaattgaattattttttgctgaaaatgacaagcctgcatataaagtgtataggggattaaatcaagatgaaattgacgcaatctctaattttattctaaatgacgatgaattttattatggtttgaaagaaattaacgctgggcccttttggctaatattaaatgataaacttggcgaagagttagggcagaaacttaatacaaataaaaatcacttgctaaaaatattttcatgtattagaaaaatctataactataaagcatgcttaataaacatcattgaaggcgttaaaggctatgactctatagaatataacataagaaatgcagagtgtctttataagaacagaattggtcatgacacacttctactttattcctataaattaatggaaagttatccttactttgcgaatattgtcattgataaattcccatatacctttatagatgaatatcaagatactcataataatgtcgttgctttttttaagctgacaattgagcgtttgaaatttaccaattcgcaatacctgcttggtttatttggtgatccttctcaagagatctacagctcaggagttaaaacatatgttttgactttcgacgaagttcagaaaaacattaatagaagatcacataatcaaatcattgattgtataaataatattagaggagggcatcaaccgataaagcaaatttccatttttagaaataaaaaccttgggagtgtaaggtgttatatttatccactttccgaatgcaataaatcaaacattgaatttataattgattcttatcagaagaagtgggaagtgagtatgtcaaaccaaatggcatgccttgtttcgaaaaatgagatgcttgccgaagtttgtggtttttcaaacctatattcaaaagtgaaagagttgctgattgcagaaaacaaaattaactacaacaaagttaatgatgaatttgtggtgaatagtattgaaaagttaggtcctctcgcatcactattatattattattgtaatccttcttatttgctgaggatgaaaggtgatgctcccataattgacctctttccaaaaatttatttgcaagaatgtactgttaaagatgttagggtggcagtacggaaattgaacgccatgagttatgacagcttgggacagtatttttccgagctgcatgggttgttaaatagcatcaaaaacaagaaagttaagtcattaattaattcacttcttccattttcgtttgaaaatgatgaagtttggaaagatcaaatagttagacactgtggttttaggaaagttaaattcgatgacccagtatttcagagttttttagaagttaattttaatgaggtgactcattggatgaaatacattaattccaataaaacggatagtccaataaatgttatgacgtgtcactcatctaaggggcttgagtatgaaaatgtaattgtgtttttaaatgacaagatgaacaaaagacaaacgtatttttctagtcttttaaattcggatttaaacggagtgctgcctcctgatttagaagaagttagaaggcttttatatgtttctacttcgcgagcaattaaaaacctcagagttgtacttttttctgataacgaaatcgaaaaagataatattcaaaaaatctttagtgattgtgttttttataattag

SEQ ID NO: 73886 - DNA, 1980 bp, Enterobacter cloacae S611
atgaaaattacacaaatggagatcaaaggctttaagagctttgataatgtagggcaaactataaatataaattcattcaccagcttaattggagggaacggaacagggaaaacggcagttttactcgcattaacaagaatgtttggtgtcaaaagctccgatagaattattcaagttgatgatttttatgttcctcctggggatgaaatcgatactcaagatgaaagagagctatcagttcgtgtaaaattcgaattcgcagatttggaagatggtgaggacaatacagttgcagatttctttaagcatttagtttcaagtgaagcggcagagatcccatactgtactgcaaaattaaaagcaaaatggacaaagactaaccttgcagaaggagatatagaaagcgacctagtgtgggaaatcggggagtatgaaaaaaatataacagcatatgaaagatcgaaaattcatgttcattatgtccctgcataccgagatcctgcccaacaactgaagcaaacagccggaaccatcatgcaccgtctgataaatgcagttgaatggtctgatcaaatggcgtcaacagttgatgaggttgctgtatcaatcggaaaccagttccaagaagaagttggagttcagacgataacatcgtcattaggtagaaattggaaaaccctcttcactggggggtactttgaaaagcttcaaattaagccagtagtgaatggaattgaagatgtattaaaacatatcgacactgtctttttacccagtccagatacacaaccattaccaactgaaagattgagtgatggtatgaaatcattattttatttatctttagtcaaatctgcgtttgacattgaagatgagataatcaattctgatgggaaacagttatcaatatcagtagaagcattagaccccccaaatctaactataatattaatagaagaacctgaaaaccacctttcacctcaatatttaggaaggatagttaaactgtgtgaagagatatcagagaatgatcgggcacaggtagttttgactacacatgcaccatctttacttaatagggtggagccagagaatataagatatttccgtcttcatgataataaaaatacaattgttaaagaaatattattaccaagggaagataaagatgatgccgagaatgttgatacttttacatatgttaaggaagctgtaaaagcatatccggaaatttattttgcaaaagttgttatacttggtgaaggtgatagtgaagagatcgtcattcctaaaatagcacaagtaaatggaatagagcttgacacttcattaataacatttgcaccattgggtggtcgatatgttaatcatttttggaaacttctaaatgagctttcaattcctcatgtaactcttctcgattatgattttaggagaggaggtggaggttggggaaggattaaatacgcggtaaaacaacttatttcaattggagtagacaagaatatattgcttaaaatgagtgatggggttttgtctgacgaagatttagaagtaatgcattcatgggatgaagatagggatgaagaaattgcatggatagagtcgttaaaggaatatggtgtgtacttttccttcccttatgatttagattggataatgctaaatgaattctttgaggattacaaaaaatttgttcctgaaaatggaggaccaagattgccaaaggatgatgatcctgaatataacaagaaagttaaagctgcaatagcttcagttttgaaaaaagaagaaaaaaatattgatattagtaagtttgatgacttcgagaagtacttttggtaccgctacttatttttaggaagaggtaagccattatcgcataattatgttctatcaaaaatggaagacgataagttaagagataacagtcctgaagttctcaatgaacttatcgaaacagtaagaggtcttttgtga

SEQ ID NO: 73887 - DNA, 1848 bp, Enterobacter cloacae S611
atgccaataataaaagatgatgattgggttctaaaagacatccaagaagtagaagacgaggctatgaaagtaatacggaatagcacaggacataatcttgttcttgctggtcccggtgcaggtaaaaccgagttattagctcagaaagcatgtttcttaattgagacaggaaagtgcagggataaaagaataattgcattgtcctttaaaaaagatgctgcgcaaaatcttcaagatcgagttgactcacgacttgacttgaaatatagacaaaagtttgagtcaacgacattcgatgcattttgtaaaagcattgtagatagatttaagagtacacttccagtggcgtatcggccttcagatgattatgaaatatattttcctgaaaataaaaaattcgtagaagaggttaaacgagatgccgttggttttgagggactaactgcggaggaacttaagaaattaaaacataacaatttcgaaaataattatattgttaggccttataaaaagggtgaagagcattcggtagatgctcgtattaaacgatttgtttggttccgtttattggaaggaaaatccaaagtttcgtttaaaatgataaacttccttgcgaattatatcataagaaacaataagttcctttcaaatgctattaattcgacttacgaatatgctttcattgatgagtttcaagatactacttatcaacaatacgaaattttcaaaagtatctttttagataaaaaaataaaaataacagctgtaggtgatactaaacaaagaataatgggatgggcgggagcattgcatagtgcatttgagatttttaaaaatgactttgcgattgaacatcataatgaactattgagtaatagaagatcgctgaaaaatcttataagttatcaacgcatgatggaggctttcatgaatcatgctgataacaaacctgagatggagttaatagagaatgaaggttcagcaaagttaatacaatttgatgaaagcaatatagaaggggcatacatagcattatgtatccaaaaatggattgaaaaaggggttgatgaaagagaaatatgtatcttattcagaaatccgtctaagcattacacggataaaatcatctcatctctacaagacttggatataaagtgccgcatcgagaatacctatcaggaattactcaatgaagcaatagttcagttaatcttaaaaatgctaatgtttacttgcgataaaaagtcgattgaaggctggaattctacaatggaacttttatgcaacataagaggggtaaataaaagcagagatattactcgtttggaaaaagagcttagtcgttttataaaatcgaacaaggacatcaatggaaatgttgttgattatatatatggattaataagtatatttggtatcgatgagatcaagtcttacttcccacaatatataaatggaaatggcttggactatactattaattctctttcacaacatctggaaactttaggtatcaaagataataaattagcagctattgatatgttactcggaaataaaacgataccacttatgacgattcataaaagtaaaggtttggagtttaaaaaagtcatcgtcgtaggtcttgaacctggtgcatattttggcgatgaagaagagcagatagaaaatcaaaaaacagtctttgtggcattttcacgagcgattgaagaggtcatattaactcgctgtgcaaaaagagctaactggtgggatgaagtatgttcacaaaatttttctgagatcccattgataacggatatgctaacctattgtggtcttgaagctgagatttataaagattaa

SEQ ID NO: 73888 - DNA, 2010 bp, Sporolactobacillus laevolacticus DSM 442
gtgtacttaaaacgcattaaaataaacaatttcagaaagtttgggcttggaaataacgaagtagaacttgttgacgcacaaagttatttaaaaaggaaagaagctaaagatgtgaatatagcttcaactactacattgattgtaggaaagaataatgtaggaaagacaactattattcaagctatgaataaattaattcatggggaaaatattaattcaaatgattttaatttcttctatttgaaaaaattattttccgaatataagattgacaattacaaaaatataccaattatagagtttattgtaactatagggcttgataaggggagagatgactatgtaacaaacattattccatttatgttgttaaaagatatagatgctacagaaatgaatataattgtgagatatgagttaactgatacagagctgtttatcagtgcagtgaaaaagatcattactaaaaaatacaatgaatccgtgaaattttctagaattttagatgtaattgatgattcccactacacagtcaattattatgataaaaatatgaaaaaagttgaaaagttccatcttaaagatttaatagatctggcgatggtcaaagctaataatgtgacgggagataaatgtctttcagatgcttttaataaaattatacagtatcggtatgaagaattatttaaagatgaaaaagaggcattggaggataaattggccaaaattaataatagcctaaccaaagatattgagagaaaacatacaaagccaataaattcttctttaaaaagagtcgtttcaggagatatattgcatgttttattaagtgcagatttgacgtttcaaaaattaataagaaacatggttaaatatgagtatattgaaaaaggtaaccatatcccggaaaatcagtttggtcttggctatactaatttgatgatgataattgcagatttaatagattatatggaaaaatatccagatagtgcttttaacagccgaataaacctaatatgtattgaagaaccggaaacttatatgcatccacaaatgcaagaattatttattaagtatatcaatgatgctatagcaacattactgtcttttcggaataagaatattaatagccaattaattattaccacacattcttcgcatattctgaatagtaaagtacatataggagaaagcttcaataatatcaactacgttacagctaaagataatttcaccaaagtgatcccattaaatgatattttaatttcaccaagtgggacgacgaatgataaagattttaaatttataaaaaaacatattaagttcaatttctctgacttattttttgcggatgctgcaatattagttgaaggtataagtgagtataatttgttacctttttatcttaatcaggacagaaatttgaagcataaatatataacaattttgaatataaacggagctcatgggttagtatacactaatttaataaaagctcttaaaattccaactcttattattacagatttggatattaaacgtgatgacgccgaaaaagaaaatttcaagcaaataagtagtttgaagggaaggacaaccaccaatcaaacaataaaagcatttaatagtggtatggataatattgaagacttagcaaattatttgcaggatgaaaatatttatgtgctttttcaaagaaagacaggatactattttcctacaagttttgaagaagcatttatagcaaagaattttgataatgctattttaaacgaggtgttaaaaagaataaaacctggaatttataatgaaattttgggtaattcggtaaactatcaatacaataaaaaatattcatataaatggcagtctaagttatctaatgataaaagtagattctcaaatgaaatattgtacgagatgatgacacaagaagataatattcctactttacctaattatatcgaaaagggattaaaatttttaagtttagaattgggaagccggtga

SEQ ID NO: 73889 - DNA, 2052 bp, Sporolactobacillus laevolacticus DSM 442
atgcttagtcagatttctagggaaaatcagcaaatagaaaaagctacaatagataaaatatttaggaatatagatgataaaaagtgtaccatttttaatgctggtgcaggagcaggaaagacatatgcattaatactaagtttaaagtatgccgttaatacatatggaaaaatgttaaaagaacacaatcgacagattatttgtattacatatacaaatgtcgctacagaagaaatcaagaaacggttaggaaatactagcattgtacgaatatccacgatacatgaaagaatatggaattttattcatggatatcaaaaagaactcgtggaattgcatcttgaaaacctaattaaacaagtagacgaattagtggaacagactacaaaccaaaaagaatttgaattgtatagacaattatcaaatgatgataaatcaaatttttttaatattatgtttgaaaataaagacacatattataaaagttataatttgggcgccaaggattttaagcaagcattatcaagtatacttggagtttatgcttcattattaaaaaatgttgctcattttaagaaaatagttaacacgttatttagaattggaaattataaaaagtgtattcaaaatattcatgagagtaaacctggttacaacgaagttttatacaatgttctgtctaatagagatcaactgcatcgaatgaaaattagtcatgatacattattagaatatgggtatcagatgattaaaaagtatgatcttttgaaaagatttcttgtagataaatatccattcatgtttattgatgagtatcaggatacaaaggaaatagttattagcgttatggatatgttacaacagttttcagtggatattaaacatccaatttttgttggatattttggtgattctgtccagaatatttatgaagatggtgtcggaacaaatataggaaattttcattctggcctagaagtggtgaacaaggaatttaatagaagatcggcgcaagaaattgtttacgtggccaataaaattagaaatgatgaaattgtacaaagttcaatatttgaggattgtcaaggggggagcgtggaattttatgtgggagatgaaagagatgcaacggattttattgaaaaaaatactttaaatgcaacaaaagaaaatccagtacattgctttatgttaaccaataaatcagttgctcaatttagtgggtttgaaaatttgtatttgctattttcaagcacacaatactataagacttattatcagcaattaaatacggaattgttgagtgatgatccatctaagttgggagaaataccacttctgatttttagaatagtaaaatttataaataaagtccgcaatgaggaaacttctattacagatgtattaacgtattcaatatatgcaaataataatttgtcgcaggtaaaagtattggtagacttgttaaaaagaattgaaggaacaacattgttaaataatattcagtctatatgtggtttttatcaaagtgaggataatttaagttataaaaaagtcattgattctctgtttgacattgatgagtcttcaatagttgatataaagagatacatgattcaaaaattatatccgaatatgactgaggagatagaagatgatgcaaggaaaaatgttgaaaatattttgaatttagaaatgaatgaatatacaagatggtatgattatttgacggggaatcatctcgggaatgtcgtatatcatacgtatcatagaacaaagggactagaatttgataatgtgataattgtgttaggaaattcgtttggcaaagaaagaaattattttaatcttttcttcaaaaactataaggatagcggacatttaatcgacgaagatttgaaaaagtatgaacaggctagaaacttgttatatgtttctgttacacgtgctgttaagaacttgaaaatattgtatattgatgatgtatcaggattttcagatgtggttgagagtatttttggtgaaattcaagtgtacagtagagataattag

SEQ ID NO: 73890 - DNA, 2370 bp, Burkholderia cenocepacia KC-01
atgtttccgcacgagatttctgcttcgtctcccgctgtcaactcggccgcggactccccgcagatcgcgcctgcggcaccgtccgccgaagcagcggcacctcggagtacttcaccaatccgactcgcctgcgtcgaggtctgcaacttccggcgtttgtcaaagacccgtcttgagctcgatcaggccactactatcttggtaggtgccaacaatagcggcaagacttcccttcttacggttcttcgcaattttcttagcgagtcgcccggcttccgtgctttcgacatcagcctttcgcagtgggcgaaactgcgcgagttaagccaactctgggaggcgctcgacgaggaccccactacagattcgaaggatgcagagaaatgggacgagcagtttcggcaactcctcgcatgcatgccgtttatcgacctttggttcgatgcaaaggagggtgcgtacaaccatgttgctcccttcatcacgtcgctgaagtggtcgggtggcgcggttggcgtgcgagttcggcttgaacccgttgcagacgcgaatgagcttcgtaagttggcgtggcgctaccgcgaagcgcgtgcgcatgtgcgaaagcttccgaaggatggccacgcctggccaatggacctgcttgattactggctcaggcattcagcggacctgcgccgcatcgccgcataccgccttgacccagcgaaggggcttcctccagccaagaagcattgcgatccgcaggaactgccgcttggctcgcagcccgtcgagctgcagtttctgcgcaagcttattcgcgtggattttgtgcccgctcaacgagggctcggtgccgaagaggacgaagcgcggtcggagtcggcgaatgcgcgtcctggactgttctcgagccagcttctcaagttcgcccgacagcacctgaacgtcgctccatctggtcacgggcaccgcgaagacttggtgaccgccatcgccaaggcccaggctgagcttgacgaatcaatttacaaggcgctccagccggcgatggaggacgtggaggttctggggtatccgggattgcatgacccacagcaatttcacttccgcacgcgtattcagaccgcggacctccttgctcacagcaccgcggtccaatacagcctagacaagactgccgtcgacgagtccttgcctgagcactctatcggactcggatatcagaatctgcagtcgctaagtttcatgctcgtgtcgttccgcgccgcgcgcctcaatccgccacagggcactccagccgcagttcatcttgtgatggtcgaggagcctgaggcccatctgcacgttcaggtccaacgcaacttttcgtcgaatgctcacgagctcattcgtccgaaggagcctgtacatagtaatcttcgaagccagatgctcatcagcacgcattcaagccatctggcccacggagacagtttcacacgactgagatatgtgaagcgcgtagcaagtaccggagtggccgttaagcctagtactgaggtcgtcaatctgggtgatgccttcggcgacgacaatgaaaccaggatattcgcagagcgatatttccaggttcaacacactgatctcctctttgctgatgcggccatattcgtggagggcaccgcagaacgaatgctggtgccacttttcattgagcgggactttcccaagcttgcgaagaagtatgtgtccttccttgatgttggaggcagtcatgctcaccgcctccggccgttggtagagcggttggggatcccaacggccgttatcactgacttggacccggtggtaccaacgaaaaacaaaaaggggcgcattgtgcgtgcggcggtgcacatcgcggatcaagcggaccttgagtgcgggaatgacacgctgacctcgtggcacccccaactgccggacttccctgcttatgggaaaccgacacccgctcaattggagtggacgtcggattcaggagtcaaagtccgttttgcatggcagcttcccgttgcagtcgcaagtgatcaatggcccagctcgttcgaggacgctctcgtcctttccaacattgattggttcaaggcgttggatgaagaaaagaaccctgtttccggaaagaagaaggaccaccgtggtgcactagggaaggtgataggtctcgtgcttgactaccctgaccacgccgagctacttagggagctgcatgcgatgctgcgcgggaatttcagcaagggcgattttgcggcgacactgttcgaacggctgaacgcaggcgagcctttggcatgccccgcatacatcgctgacgcgctcgcctggctgagctgccaactcaatgtcgcggccggagagaccccttga

SEQ ID NO: 73891 - DNA, 1956 bp, Burkholderia cenocepacia KC-01
ttgagcgccgcactggattcccttggaaacgatcgcgatgctcatgttgttgaagacatctgcggctacatcactgcgaccccgcctcgctgcttcttccttttcgctggcgcagggtccgggaagactcgcacgttagtcgaggtcctgcgtcgcatcacaggagtggtcaagcatgaaacgggtggcgggtatgcagagcggctccggtcccgtggacagtcggttcgagtcatcacgtataccaagaacgcgaccgccgtcgtaaacggtcgactcggagagaactacctaaccgcagtatcgaccatccattccttctgctgggaactcatccaggatttcaacgaggacatcagagacgctctgctcgctcgcaatgccaagaggcttgctgcagcaaaggcctatgcgatgggcaaggtaaagggagagtcagacaaggaccgggagaaatacgccgaaatcgaggcggaggccgaggaaatccggaagatcgacgcgtttatctaccacccagaccggaacacttacggcctcggcgcgttgtcacatgccgaagttctggaagtaacggcgtggcttattcgcgagcgcccgacgttgcagcgcatcttggaggaccgacaccccttgatcctcatcgatgagtcgcaagacacgatgaaaggagtgcttgacgcgctgtttgagctctcgaagaatcgctcaggtcacatcacgctaggactcgtgggcgaccatcgacagcgcatctacccggacggtcacgacgaccttccctcgcatgtgcccgtagactgggcacgccccgcgctgcagatgaaccatcgcagtcaggagcgcatcgtaaagctgatcaataagatttgggatgcggatattgacggccgcactcaacccaagaatggtgtcgcccagcacgctcggacggagaagaacggtggattcgttcgcatctttgtaggcgataccaatacgagtaccgccgagaagattcagaaggagactgagtgcgcgctggctatggcgcgcgggacagctattgcggcgtggcaggatggagcgcggggctacaaaacgctagcccttgagcacaagcttgccgctaagcgaggcaacttctttgaggcatacagcgcgatggacctactggacaaggactccgcgatgcccaagagcaacggggagcggaccggtcctgccatggttcggccgctcctcggcccaatgcttgaacttgctgagtgccggcagccggatggctcactgaacgagtttgccgccactgacatattgcgcttgcacggcgcgcttgcaagggtgccgcaggccagcgccgagcgccaagcagcgttggaaaatattcacgctgcagtcatgcggttcatcgacgccacttccaagccgggagcaaccgtgcgggaggttttggtaccggtccttgaaggcgggctcttcgaagcagacttccgattgatccaagcatttggcgatacgtcacctccaccgcccgaaccaaaggcaagaggtaaggaagccaaggaggaccgacgcaaacgcggatggcacgccctcttcaatacgccgtggcgagagattgctcggtatcgcgcctaccttggtggagaagcggaacttgcgactcatcaagtcgtcaagggttctgaattcaagcatgtcatggttgtcatggacgatgacgaggccggcggcacgcagttctcctacgacaaactcttcggtgctgaggacctgagtccgacagatcggaaaaatgttgatgatggaaatgagaccatcattgatcgaaccctaaggcttctgtacgttacttgcagtcgcgctgaggaaagcctcgctctagttctttgggctaagaacccaaatgcggtgctcaattcaatcaagcggtccgaatggttctccgtggacgaggtgaccgttttgaagtag

SEQ ID NO: 73892 - DNA, 1893 bp, Flavobacterium cauense R2A-7
atgtatttagcttcaattcatatagaaaactataaaggtattaaaaaacttaatgtaaattttcaaaaagacattaatgtaattataggggaaaatggaagctgcaaaacggcattaatagatgcaataagattactctataatttaggaaatcaacaaaaagaaatttacgttacagctgacgatttttatttaggagaatccgtaattacaatttcatatgagtttaaagatttatcgattgaacaaaagggagctttttatgaatatcttgttttaggagatactgaagaaaatgattatgcaaaagttacgattacttataaaagagaaaaccaaaaaattttatttagctattatacaggtgaagtagagggtcagaaggcagatagtttgacatttcaattttttattcactattatttaggagcattaagagatagtactaaggatttaattatgaatcgtagtagtattttaggaactttaattaatagacaagttgaaaataatagtagtcaggaaaactatgagaagttgataaaaaaagcaaacgatggtttattaaaattagatgaagttactaattcaagaaaatcgattaatgataatttaataaaaatttacaaacactcagtagaaaatcaaattggtttacgaattgaagaagccaaggctgaacatattgtaaatataattaaaccatatcttccacatgataccaaaaacctgtcaggtgctggctttcatttgaaacaaaatagtttaggttttaataatttaatatatatagccaccgttttaggcgatataaatcaacaattagaagatgataaaacttctcactatgctttattaatagaagaaccagaagcgcacttacatcctcaacttcaattgaatttattctattttttaaaacaaacaaataccgtagagaattcccaattatttattacgacacattctccaacactaacatcaaaagtgccacttgataatttaattcatttatctaaagataatgaagcaattaacttgattaaatgttttgaagaccgggaagaagttacaattcaagatgatgaagagacttatcttgatgacatatcaaacaggaagaaacaattggaaagatatattgatgtaacaaaatctcaacttttcttttcaaaaggtgttttatttgttgaaggtatatctgaagagttactagttacagtatttgctcaaattttagggaaaagtttagaagactttaaagtagaactacttaatgcagatggaacgtctttttatccttttatctatttatttaattctaccgaaaaatcaaaaacactcccaatcccattgtcaattttaacagatgatgatagatttaccgaatctaaaaatacagaatatagttttatcaatattaaagataatctagctaaagcaggagaactttatgataaaataaagaaggcatcccaagctacaagaatcaaaaacatatcaagtgttataaaaagtgttccgaaaaaaattagtttgaatgtatcttataaaacatttgaatttgatattgttaaatcaaatatttcaaaatcaaaaaaacaaattatagagaatttactttggatatatatatctcaagagaaatctatttctaagaaatatgaaaaattaaaaaatcatttagaatcatttgaaggggatgagataacagaagaacaattaaaacaattgcaaattttgatttggaaagctttacccagtaaagcggagtttgctcaagatttttcaatttatttgttagcaaacattgaaatagcaaaaacaaatttcgttgttcctaagtatattgaaaaagcaataactcatttgactaattataaaataaaatga

SEQ ID NO: 73893 - DNA, 1503 bp, Flavobacterium cauense R2A-7
ttgacgattgatagtttcgtaaattcatttattactttgccttttgctcataaattgaaagacattggaaagcgttataaaataattgatgatataagttatttagataaaatctttcaatcagattggcagctaatgaaaacttataaatcctatttgttttcatataaacctagtaaaattgattatacaataaatagtggatattcatgggatgggcatgacaaaagtgatgaccttgattttgttaaatatgctaaagaaatcaaaacaagacaaattaatatggggttgcttaaaacaagtgattctgcatttttggcttatctcattttgaaaaaatatccacgaattgcaaaatacatagcatcaaaatttccatatttaataattgatgaagctcaggatacatcagaaattcaacattcgattttagaattgttatataatcaaggattaaaaaatatagatttagttggtgacccttatcaatgcttgtaccaatggagggatgcaagcccggaattatttctccaaaaatttgatgattgtgaaaattggaaaggactttatctaactgaaaatagaaggtcaactaaaaaaattattgaagttttcagtatgcttaggcgaactactgataaagaaataataccaatactagattcagaggcagatttgcctttacatgtcattaaatatgataaaacagattattctgaggctataagcaaatatgaaaaactttgcttagataacaatctttcttcaaatattattttggtaaggggaaatgctttaaaaaactcattgcttggcaaagaaagtgattatttcccttgggataaatcttcaattgcctataaattgattcaatcaagaattcatttacagtcaaatgagattaaagaagctgttaagaaaataagaagattgataattgaattattaattccaggaatttcatttagtgatttaaaagagaaagaaaatgagttaaagaatgataaagattcaaattcaataatttttaaaatagttagagatattccttcttttgatttatctctaaaagaatggacagtcaaaacacaacaatatttaaaatcagaattgcaattagaaaatatgcctgattttaaaatacgtaaaaagaatgtaacaaaaaaagggaaaattacttttgataaaacaacattagagaattctgttaatcattactttaaaaaggcaataactgaaaataattttccaatcacaactattcatcaagtcaagggtatgacctttgattcggtttttatgatattgaatgataaaaatcataaggagaatattaccttaaatgattttgttctaaaagaagaaatgccaacagaaaaacagcgattgatttatgttgcaatttcaagaccaagaaatttattatgtattggggttccaaaaactatgacagatgagaaacttaaagaatttttaaattgtgaaatgttaattttatag

SEQ ID NO: 73894 - DNA, 1734 bp, Flavobacterium limnosediminis JC2902
ttggaaattcatttcaaaaaaggaatgaatatacttattggtgaaaatgattcgggtaaatcagctattcttgatgctataaaattggttctaaaaacgcacgcttatgaatggattaagatcgaggaaaatgatttttataatgaaggagacgatattgcaagtattactaggatagagatagagttttcagggattaatgatcttgaagcaagtaattttaccgaatggtgtggttggcaagatgaagaggttgaaaatgaatccggtataaaagaacttaaacctagacctaaattaattctcatttatcaagcagaattaagagaaggaaaaattatacctacagatgtaagagctgggatggatggttatggatacttattgacggctgaagcaaaggagtacttaaaatgtacgtacttaaaagcattaagagatgcagacaatgagcttacagctaaaaaaaattcaagattatcgcagatcctaaaacagcacgatttatttaaaaaaaagagcaaagatgtaaaattagaatttgaaaagatatttattgaagcaagtgatagaatctctgatgaatttaagaagccaggaagcgaatattatttaaaaattaaaaaaactattgatcaatatattcaatcatttattaatgaaagttctgaaagcaaaatcgatttaggaggttcagaaatctctagtattcttgaaaaaatttcattaggaattttagatcataaaaatcttgggttgggaaccatgaaccgtctttttatggctgcagaattgttgcatttaaaaaaagaaaattggaacggattaaagttgtgcatgattgaagaattagaagctcatttacaccctcaggctcaacttaaaattgttaatagactaaaggaagagaaagatattcaatacattttaacaacccatagtccaaatattacttctcaggcagatttaaaaaacataatcatttgcagaaataagcagttatatacattatcagaaggaaataccaaactagagcctaaaaattataaatatttagaacgctttcttgatgttactaaaagtaatctcttcttttctaaaggaaattttgttgttgaaggttggtcagaagaaattttacttcccgagttggcaaaaaaacttggttatgatttaacaaaaagtgagttttcaataattaatgttgcttcaactgcctatttacattttgcaaaaatttttctgagaaacgatggtgccaaaatgggaattccaatttcaatcataactgatttagataatagaccagatatagatggaaattttaaagatatttcagaagaagatgataaagttaagacgaaacagtcaaatctaaataaattaaaagcagagctcgaaaagactgatgtaattttagagatagcaaaagaatggacattagaatggtgcttgtataaatcctgtttatctgaattatttaaaaatgccatcaaagaaactcatcctcaggtgtttaaaacttttgatgagaaatactttataaagagcttgagtaaacaaaatggaggaacaaaaattgacaaagtagcccttgctaacgaattggctatattaataagtgaggataccacaatacaaaaaaaggagttggaagaagacaaatttcttgaatacttaataaaagcaatcaaacacgtatgtgattatggaaataaatccgaaccatattag

SEQ ID NO: 73895 - DNA, 2031 bp, Flavobacterium limnosediminis JC2902
ttggttttagctcatactaatcatgcagtcgaagaaattgaaaaacagttaaagcctatttgtccacaattattcgaatatcccaattttgttggaacgattcaattgttctctaatcgatttattgctaaccaggcttgttttgaattatatggtagttatatcagaaaaaatgatgatgaaatatccgaaaatgaattaattagtgagttttataaaataaattttaagtcaaaattaaatggattcattttcaatcaattattttcacaatacgcaaaattatcaaaaagggatttagagagggatttgaattttgattccaaaacatcattagaattgataaaggaattaaaagaaaataaaacattaaacaaatcaggagttcttaattatcatatcacaaaagaaattttggtaaatgatgaaaattcattgttattatatatcaaaaacattcatgacaatgcaattcaaaatgtaaaaaatgagaagcaaaaattttgcctcagatataagattgattttattaataaaaagtttgtttctttttcaggggacttgaattttgaaagtgaatcaggatcagaattattgagttattttgagcaatcatttaaaagaggagtgcttagatattctgattcaatatctctttctaaatattacataacacatcataaagaattattaaaaattcttcaaaatagattcaaatatgtgtttatagatgaaatgcaagatttagaccaagatcagatagatttgattgaaaatatctttttcgaagagaaatcatcaaataaaattcaacgaattggagataaaaatcaatcaatatattcaagtgcaaaatcagtttcaaacgacattttatggaaaactagaaatgaaatcgatccaattaaatttccaaaaaatttaagtctaaacaattctcatagattaactcccattgttgcaaaattagtggacggttttgttcttaaacgtgatgtagattataaagtagtaggtacatctacaaacaacaatatagctcctcatttgattatatacaaagatgaaaaagatggtaaagaacttaagaataaatttattgaactaattaaagaacatgaattagataagggcactaaaaatttagaaaaagggtatcacataattggttggacaactgaaaaggaggaaaattctaataaatggtacttaaagaaaatatttcctgaatattcaaaggaaagtaggcaaaagaaagaagattttgatagcttacgaaaatattttttcctttttgatagagagaaaaaaactttagaggcaatccgaaagtcgttattgaatggtatacttagaatattgagaattgaacaaatttattccgaacctgaaaaaaagaagcatttcaggaaatctttattaattcggataataaaagagaaaggtgaaaaacattatactgattttaatcagcgaatataccaatggtgtttttcaattgtaacaaaagagaattatgaagaagtttttagagattatttctcatttatagaaaatgaattggtgaattacatacctaattttaaaattaccaaatcaatagaatttgtagtaaaagatttcaattttaattcaataatagattctaaaattaccaaagatgtcgtaaatcataatgatttggatataaaaatttcttcaattcatgcagtaaaagggcaaacacattgcgcaacaatgtacgttgaaactgaatattttaatttcgaaacatataaactagatgttgaaattaaaaaagctactaaaaaaactgaagctgttttgggaaataacccattatactttcaagaacaaaatttctcagaattaaataagactcgttcaaatgaaactttaaagatgatgtatgttggcttttcaagacctacacatttattatgctttgccgttttagaagaaaacgtaaaaaaggatattcaaaaatacaaggatgcaggatggattgtaattgatgatttggttaaataa

SEQ ID NO: 73896 - DNA, 1458 bp, Bacillus sp. 17376
gcatataaggattcagtgactggagaaaaacaataccatttcgaagcgggtatcagtccaaaagatttagaagaaatcaaaggaagatattatttaaaaactttaaatttaaagtatctagccagtactagggacttgaactccttcataaagagagaacggaagaatttgttggtcgatataaaaaagaatagaacacctgaggaaacagtttatgatgaaaaatatctagataagattgataaatcactcgatatcatcaacaaaagagtgagtaaccttaactatgtgaaaaaagcaatgggaaatattaatgacgaattaaaaggtttatcgtttcaccatctttcgcaaaagatagaattcgatgtaggagcttgggattcctcgcattttgtcgataatttaaatttagtgtcaaaggtaagagataaaaacctttcaataagcggagatggaagaagtaatcaattatttattgcattatgggctaatcgcaatgaagttaataaagatcatttgttagaagtgacgttttattgtattgaagaaccagaggcgcatttacatccacatcaacaaaggaaattagctggatatctctccaataatattaatagtcaagttattttgacgactcattcacctcaaatagccgaagagtttccgcctgattctataattagattatataataaggacctgaaaactaaagctgctttagatggatgccattctttaattaatgattcctttgttaaatttggccatagaatgagtattattcctgcagaagcgtttttctccaatgttgtattactagttgaagggcaatcagaattacttttttataaggcattagcagaatcgatagaaattgacttagatcgaatgaatatcagtattttgatggttgatggagtaggttttgattattatattgatgttctatcaaatttagagattgattttgttgtgcgaacagataatgacttttttaagttaccgaaaaaggataaatactggtttgctggaattaaaagatgtataaaaatttataagactttttatgaggaagaagagggaatggaagacttactcacccaagaaaacgccctgacagatgtcccattggatgtaacccaagatattaaagaattaacagttaaactacgtcaagaattggaacagctctctatgtttttggctgaaaaggatcttgaacacgatttaagagattcgccagtttccggacaactggagaaatatttcggtttactttttgaggaaaatgcagacccagaaataatcaaggagatgcaaaagaagaaagcaacgtttatgtttaactttatcaatgatcctaacacagatttatcagttctaaaaaaccatacattggcaaaacctttgctgaaatgtgttgaattagtggaggcacaaagtggaaccgactaa

SEQ ID NO: 73897 - DNA, 795 bp, Bacillus sp. 17376
gtgtatgaaaaaaaggttattggaacacaaaaagaaattgcactttggttagaccaatacgcacctaaaatcttaaagaagttaggtatagtagataataatcgagcagctatactggttcgagggaaggtaacaggaaatattattgacgagaacttaaaaataaaacataagtttttcaataatactccacttgataatgactcaaatctctggagtcaattatttaaagaattgctacttatattatttgataagaatattaataagtttgatatggtacagaaatatctagatttaaatttggataagagaaatgctaaatatatattagaacaactacaagagttatcgacaaatttggaatctaacccttacgacatctcaaactatgaacaagagttgattaagcttgctaaagttataatacctaacggggaaaaagaaaaatcgaaaatgttattaaatgatgtattaaacaataatgaacatataaattcatatctccctgccaaaaaggatgagatacaaattatgactctacataagtctaaagggttagagtttgatattgtatttcatttggatttatataattatatacttcctaatccacagaacgatcaaacacaggacataaatctccattatgtaggaatcactagggcaaaaaagggattgtttttgatttggagtacagaacgttttaatgcatcaggtgaaaggaaaatgggtgtgcaatctgactttttagcgaaaggacatttgagaagactcagaatgtggttgccttag

SEQ ID NO: 73898 - DNA, 1785 bp, Pseudomonas mosselii SJ10; identical to SEQ ID NO: 71894

SEQ ID NO: 73899 - DNA, 1338 bp, Pseudomonas mosselii SJ10
gtgctcaatcgaaatagcgtcgcttggcgtagcgaggaggaactcgctgcctgggccgaggcctacgaggccgctctgcgcgacgaggggctgattgactacgatgacatggttgtcttcggccagcgtttgatcgccgagcacgactgggtactacctctggttcaggcaaaattccccgtgctcgcggtggatgagtaccaggatttaggcgtggcactgcatcgcatcgtcaaacgccttgccttcgacgggggtgtccgacttttcgctgtcggggatgcggatcagtcgatatatggatttacgggagctgatggcgcgttgctcatggaattggcggctcgcagagacattgagcctgtccagcttcaattaaattaccgttctggtgcagggatcgtgactgcgtcagagatggcgcttggagaagcccgaggctatcaagcgagcgatcctgcgcgacaaacgaccatcgaatttgtcctgcgcccgggtggtatggcggaccaggctgcgcacgccgtcgcgcagatcattccggcggccttagcctccaagccgggacgaacactgggcgatatcgcgatcctatacaaagactatcgcgcaggcgatatcgtggctgaagctgtggcaaccggtggtctcgatcacatccgtgtggataccgcagcaccttaccgcaaggttgccctaacaagttgggtagaagattgtgcggcgtggtgcgcgggtggctggcgtgttggacgcccacaattgcgtggactactcgaccgctatcgcgcatttcatcgggcgagcttggacgattcacaggccaagcgcgaagagcaagagctaaccgccttgctatgggagctgcgtgctgaccagcaacctgcgcgagaatttgttgcttcgctgcgcaacggtgtagtggatcatctgctggcggctgaattggcgctcgctgatcagaaggagcaactggatcgcatgacggcagcgctcgctgaaggcggtgcactggcttcgctagacatcacgagtttgggcggtcgggacggttcgcccgatcacctgaatctgctgacactgcattccgcaaagggctgtgagtacgacgtcgtcatcatggttggactcgacctcggaaatctgccgtggcgcaatgaaactccagagaagttgcgcgaaagtcgccggctcttctatgtgggactcacacgtgctcgcgacgaggtccacatgctgtattcgggcttcgttgatggccgctatggccctatgcgctttgggcgctcgccattccttgatgagctggaggcgcgaatgcgtgccgctggcatttga

SEQ ID NO: 73900 - DNA, 1755 bp, Paenibacillus sp. MAEPY2
atgaaactatcaaaagtcaaagttcttaatttccgtaacttaaaatgtattgatatcagtttaaatagaattacgattctaatcggtgaaaataatagtggaaaaagtaatttactaaaagccatcacacttccatttttaaacgacgaggtaggaaatttaagtaaaaaattaggatggcatgacataaataattcagctaaggaaatgtattttaactttttaaagacaaacaaagaacgaataacgaaccaagaaataaacatagaagagtttattaagattgtgcctatagttacagtagatgtatcattttctcctgatggatcagacgaatattacatacataaatggattactgctatggatgaagaagtgccacaatacagtattcaatataaatatgctgtacaagaccaccaaaaactattagaactagttactaatattctgatgacgaactcatccattgataatattaaaatgaacctcctacccattgagttttacaaatatacgatacaagtacctctcacagaagatccagtatcctttagtgatcttattaatttcaaatataactccctcgctgcggagagagacgatttttcaattaagaataaccagttaggttctagagctttagtgaatttattacaaaacaagcttagtgatgagcagaaggtagctgtagaaaaatcttatgaggactttttctcagatctcaagcacatcagtaaattagagggagtttttaattggcaagaagattctgccttagagaacgcaaaagactttttcaaagaaattacattgctcccgaatatgccaagcatgggttcattattgaacaatctaagactcggttttggcgaagaatatttgaacactcaaggattaggttaccgtaacttaatttatttgcttgtgatgataaattctttaaaagtacataccgacagtgctttaaatatattaacaattgaggagcctgaggcacatttatgtgtcagtaatgagcatctccttgccagtttttttaattcgattttgaattcgagtagtaacttacagttgttcctctcaacacatagcacagaatttgttaataaactcgaattacaaaacgttgttgttttagcaaatggatctgcattttctttaaaggacacaattacctcacaagaattgaactatttagccaaaaagcctaacttagattttctaaagtttcttttctctagaaattgcattttagtagaggggcccactgaagagatgcttataaaggcatacctgagttctaatgctaattccttgtacgatatagaggttatagccttgcataaaggcttcactaagatgttggacatttggcttaaaataaaccagtatactaccagtagaataggaattattagggattatgatgaccaaccaaatgcacaaataaatcatgaaagatataatgagtattcaaacatatatgtaacgacaacaactgaatatactctagaaccagagttcgtaaagacgagcactaattttaagaaaatgaatgagtattttactcaaaatcacgggtgggagaagtgcacaagccctgaggagttatcagaacgttggagatcggcaaaagcttctactatgttgaggttttgtagggattttggtaaaaatgagcttaccaatatagtgctacctaagcacatagctaatgttcttgaattcttaaaaagtggagagaaaaaatga

SEQ ID NO: 73901 - DNA, 1374 bp, Paenibacillus sp. MAEPY2
atgaatataatagttgctggagctggggctgggaaaacaacctctatggctagtcatattctgaaccggttggaaaaagttgaggatggaaagatactctacgtaattacttacactaattctgcaaagaataaaattcgagaattgattattgagaataaagggatcatcccgaaacaattacgaattgaaaccatccatgctttccttctccatgaagtcatttacccatttcatcatttactattcgaaggacattttaatagtgtttcatatataaatttacctacaaatagagcattctctgctgggaaattaaaggaactaaaacaaaataattatatccacgtagagaaagtgacggaaactgctaaatggattctgtgcaagaagactggtgacaataggttaattaaagagaaacgcgaaaaaatcatcaataccatttcaagatatttagattgtgtttatattgatgaggctcaagacatggatgaacatatgactcagatagtcaaacttttagataataaagggttatatatattcttaattggagatccgaagcaagatttacgtggtcgtaattttttctcaaatttggtcatacaacatcaagaggcggttgtctatgaacctactaatcatagaagtccactatcacatgttaatttctcgaatcattacattccttttgaacaaaagcaaattccactatctaagatagaaggggaaataaaatttgtgctcgaaaaagagattgaatcaagcgaagatttctttaataaccaaaattgggataggatttatatatatcaaaaaaacaatcgatttaacactcatgaaaaagataaagctagcaatcataatttgatttttgaactcgagaaactaatttctagaacaactgataatgagaaagaaagaaaattaattcagtatgaattgctaaaagatattttctctagactaaaagattccaacaataacgaaatattattactcatagagaaagttttaaatttgaaattgaactcacaagacaaagccaagatacatgattcattgaagattgctaatgaaaaatcccattcaccaggtattttggtaaactcaattgactctataaaaggactagaaggagaaaagtgtttattcattgttactacagaaattgcagagtatttgcttggtataaaaaaagatcagaataaaatgatgaattatctatatgtagcgctcacaagatcaaagagagaacttgtgctatttatcaccctagaggtacacctgaaatatacaatccaaaactgggaggcctttctttctagtaaaaaaataagtaaatacatctcagttccattagcgccctag

SEQ ID NO: 73902 - DNA, 2043 bp, Paenibacillus sp. MAEPY2
atgaatataacagagttgagaatcaagaatttcagatgttttggtgatcaggaaacatcaataaatattgttcgattaacaactattattggttctaatagtagtggaaaaactgcactaattcaggctctattaaagttattcggattgaactcaaaagatcgggtaataaataaaagtgattttcatgtaccacctaataaaaaaccagatgaagtcaccgaggaacaattacttagaatagaagcgaaaatagaattttctgaattacaaatagaaggtgaaggagtaaaaacggtaccatcattctttaagcaaatgatgactggtaaaccacatgaggtaccatatttaagaatacgtcttgaagctaagtggacacaaagtgtaacacctgacggagaaattgatccaaagctgtattatgttgttgtgccgtatggagatgaagaaaaagaggattctcttaagcctatgtcttctaatgaaagagctctaattcaaatgatatatgttcctgctgtaagagaaccctcaaatcaattgaaattagcatctggtacaattttatggcggttggttaaaagtatagcttggccggaagatactaataaagaaattcaaaaaaacatcttaccactagaacagtatttaagtagtgtagacggattgcaagagatacgtaacgaggtcaaatcagcatggaataagtaccatcgtgatcctaggtatactgatgctaatattttattcaatgagacttccttggagtccatgcttaaaaatataaatgttcagttttcgcctactgaagatatcacaaattatacaatcgataaattaggtgatggacttcgatcgcttttttacttgtcattagtttctactttattgggaattgaacaaaaaattataaaagatgaaacaggaaaattccttccccaaaaaatccctgctgctttaacaatattagctgttgaggaaccagaaaatcatatttctcctcatcttttaggtagagtaaccaaaaatcttagagatatatccgaaacgagtaatgcgcaagttctacttacttctcatagtccttcgattgtcaaaagaattaatccagaagagatacgccatgtaaaagtttcacatactggagaacatgttggaactacctctgtaagtgagattaaattacctagcgatagtgatttggctataaaatatgttaaggaagctgtaaaagcatacccagagctttatttcgctcaactagttatacttggtgaaggagatagtgaagagttaataatcccacgattaatgcaagttggaaatattgctcttgatgatgagacaatatctgttgtccctttagggggaagatttgtcaaccatttttggaggttattaaaacaattggatgttccttttgtcacactattagatctcgatagggaacgaggaactggtggatggagccgaatcaagtatgcatttaaacaactcatagaaatagacgtcgacgtaagagagttattaacaattggcggcactacacatccaaaaaatattctagaggaaatgcacaaacgtactctagatgatccaagtggtccaaattctatagcagagatgaaaatgtggattaagaagttagaatcctataattttttcttttcaggtcctcttgatattgatttgctcatgcttgagtcttttactgatgtatataaatctatcccagagaatgggccggaaatacctgataaaatgagataccctcaggaatataacacagtgatattaaatggtgtaaacgcaaccttgaaaaaagataaaaatgaaacaaaatttggaaatacatattccaaagaacagaaagaattaatggtctggtacaatagcttattcttgggtaggagtaaacctagtacacatctagaggcgttagcaaagattgaacctaacgattttatggataaatgtccagcttcacttatgaatgcactgaacgctgttagaacaattcttgacaaaagtaaaaaataa

SEQ ID NO: 73903 - DNA, 1896 bp, Paenibacillus sp. MAEPY2
atggcacttgttaaaccgggagaatggattccaactgagggcattgtattagaacgcgctgcggacaaggttgttagaagcggagaaaatgttatggttgttgctggtcctggggcgggaaaaacagagttgctggctcaacgagcgagttacttacttcaaacagggatttgtaaacctccgcaaaaaattctggcaattagttttaaagtagatgcagccgcaaatttagcggaacgggtaagaaaaagatgcggaaatgagctttgtcaaagattcgaatcacgtacatatgattcttttgcaaaacaggtactcgatcactttcgcaatagcatggacgaaatgtatcgtccaattcaggactatgaaattgtaactgataaaaatgaattaaaaaaattagtagcgcctcattttactgaaaaatatccagtttacgcattgaaatatgacacattgatggagtatcttggaaatgaacgattaccattaaatgttacatataatgtaacggatctttacagtttattttctaatgatttgtggggaattatgccaaaaggttcgcaggaatttactgcatctctaacatttccaatgataacgagattagtcgaatatttaattagtacaaacacaatgattaaaaatgcattaaaagttacatacagccacttatttttagatgaatttcaggatacaacaaatacacaatatgatatgttaaaacaaatcttccaatattcgaaaacggtaattacagccgtaggtgatgataagcaacgaataatgggctgggctggtgctttaccaaatgcgttccaagaatttaaaaaggacttttcttcaaaagatgaacgattaatcaagaatcatcgttctgcgcctttactaattgatattcaaaattaccttgcaagggacctagattcatcatctttgacagttgaatctcctaatctaattaaagatgaaaaatcgtctttaggagtatgtcaaatttggaagtttaaaactcatctattagaggcggaacatttatcaaaaaaaataaaagaatggttagaagatactattataagtcctcgagatatttgtataattgtaaaacaacaagaggatatttatgctgaacaaattatattggacttgaaaacacaaggtattattgcccgagtagaaaaagaatttcaagatttgctttcggaagaatgtgttacattactaattcatgtcctgacattagttataaaagatcgagctccggattcgtggcaaagtatttttgatatattgatcttcatgaaccctgaaatagctgaaaatccggaggttttttatcaatatgatagtgaactaattgattttattactaggttaaagacggaacttcccggcttgaaaaatgggcgagagttagaagcttacttaaaaaatatctttgggtttttgggtgaagacaagtattgtacaatatttccaaagtataaaggtggaaagtatttgcacaaaaaaatcaaagagttttcaaaaaaactggctagttcatatcgatctttgaaatcttgggagttggctcttaatgatgttcttggtattaatagtataccaattatgactatacacaagagtaaaggtcttgagtatcatactgtgatttttgtaggtctggaggattcagcattttggaactttgttaataattcagaagaagataaaagagctttttttgttgccttttcaagagcaaaacaaagggtactatttacttttagtgaagaaagaaaaataaaacaatacaacgaaattattaatagacggcaattttcaagtaatatttcaatattatatactaacctactacaagctggagttgagacggtcgaactgtaa

SEQ ID NO: 73904 - DNA, 2043 bp, Paenibacillus sp. MAEPY1; identical to SEQ ID NO: 73902

SEQ ID NO: 73905 - DNA, 1896 bp, Paenibacillus sp. MAEPY1; identical to SEQ ID NO: 73903

SEQ ID NO: 73906 - DNA, 1749 bp, Enterococcus faecium UC8733
ataaattgtattaaaattaaaggtttccgaagttttgaagatgctacaatcactgtagcaaaaaaatctttaataataggggcgaatgatgtaggaaaaactaatctaatttacgctctacgacttcttttcgataaaaagattagtgagagcgatctagaactgtttgatagtgattactgtatccattcttcatctaatcaaatttctattgaagtacactttgaaaatgtcatagaagattgtttagtctcaacttttaaaggattaataaaagaagataagatgattattagattctataaggaaaagggaaaaccatatataatttattgtgggtttaacgatgagactatgacagcttttgaaaacagattttacataagacatttatttatggagtgtgtcgatactaatcgtgacttaaataagtttattaaaaaagaaaaaagtactcttttagttaacgcaaaaaaatcgagagaagaagaacaaattcaaaaagatgatgctcttgaaaaaagattgcaaaaaaggttaactcgaataaataattcaattgaaaaattaagttatattgaaaaagctttagacgttgtaaatgatgaacttaaagagatgtccattcatcatagtaaaggtaatttagagtttacagttcctgaaactgacatgtctaaagtcttatctgacgtgagcttatcatttagggaggaagggcagaaaataggagttggaggagatggaaagaataatcaaatcttcttagcaacttggatttctaaacaagcactaaatgataatacagatgaatatgtatgtttttatgctattgaagaaccagaatctcatttgcaccctcaccagcaacgtaaactttcctcttatattatgagtaagtttacttctcaaatatttattacttcgcattctccattcataggaacggattttgtacctgaaaatattataaaactaaagaaaaatgatgggaaaactatagctgcttctaatggagcaagcgaaagaatttcttcggggattgatgaattcaactataggctagatctaattacatcagatttattttttgttgacggaatgatcctagtggaaggcccttcagaaaaaatattctatcaagcattatgtagtgatttagatattgatttagatttttataacttttctataatatctacagccggtgtaggatttacaccttttatcaaaatgtgtcagttattagagatcccatttactcttcgtactgataacgatatttttaacaaaactagagataaacaagattaccaatactgctcaggagtaaatagattgcataagttatttagagatagcgtaattgatgatgaaagaataattagtgatttcactgagagcgattttgagtggattgtaaagtctcctgaggaaacaaaaattattccacaagagaaaattcagaaaattaacgaactgaaagatatttttgagagtaaaggattattcatagctgatacagatttagaagaagacttagtttatcagctctccttaagcgaaggctgggataatggttatcaaaatactctaattaaaaagttgaaaaaaagaaaagctactaatatgtatgattttgtgagaagtgaaacttcttttatttctcttaaagacaaagatatttttaaccctatttcttatctgtttaaagaagtatacggcttagattgggagaaacaaaaatga

SEQ ID NO: 73907 - DNA, 1566 bp, Enterococcus faecium UC8733
atgaaaaagcctacaacagaacaaattagagtaattaatagtgataataattgtgttgtcactgcttgtccagggagtggcaagacgtttacaattgtagaaaagattaaaagacatagtaaagatttaaaaaattatgagggattagttgcaatatcgtacacaaataaagctgcagatgaaataaaaagtcgattgaaaggagaaaacacaaaaaaattttttatcgggacaattgatagtttttgtctcaaagagattatatttccattctcaaaatatgttattgaaaagaacatagaggattttgaactagtaggttctagtaataatgaaaataaagatgatgagtattatacaaagcatttagaagctgggcagatatacttgaacgatattgccgatttatcttattttatattaagacaagttcccgaatgtgtgaattatttaagagctaaatataaaatgatatttgtagatgaatatcaagattgcaaaaaaaatcaacatttattatggaaattcctttcacatcaagggataaagttagttgcagttggagatattgaccaatcaatatatagtagctttacggatgctaatcctgaatttttaagagagctaatgagtgatagtagttttacctcttttgaattgactgtaaatcatcgatcacatcaaactatcgttgattatgctatgcgattcaaaaatgctaatcatgtgcctcgaatgaacgaggattcaaggataaccaaagttaatattaagggaaacgagaaaaatatagttgagtccttagaaaataatatttctgacattaaaaataaatataatattgaagaaatgtcaaatatggctatattttgtcgttccaatgacatggttagtagagtatctcagtttttgaaaattcctaacaaagattatagcttagtagcatttaaaaaggaagatgacttcagtagattttgtatgcatttattaattagattttttcaatataagaagaaagaaactacaaaaaaagattgtgtagaagaattggtaaatacacatagaaatcaagaattatacaaagaaactagaagaaaagttgatttgctgttttctaaaaaaccagaagacttaatttctgagattgacttaatttgttcactttatttggaaacaaaaaatcgaccagttactgagcaaaataaaaatgaattgattcatatattgaaagaaaaaactttattagatacttttaaacctgcagaaaaaaatgaaatccaagttatgacttaccataaatctaaaggactagaatttgatgtggttttcctaatggattgttacagatatataatacctaacgaatataataaaaaatatacaaatctggaagcagatgagaatttacactatgttggcttgacgcggggaaaagaagcagtatatatattgttaggaactgagagattcagatcaaaaacatctgattatatctcggctagtgaatctattttcttatctagaaatggtttagttaatttaagaaattatgataattggacataa

SEQ ID NO: 73908 - DNA, 1992 bp, Vibrio parahaemolyticus 10296; identical to SEQ ID NO: 72330

SEQ ID NO: 73909 - DNA, 1752 bp, Vibrio parahaemolyticus 10296; identical to SEQ ID NO: 72331

SEQ ID NO: 73910 - DNA, 1992 bp, Vibrio parahaemolyticus 12310; identical to SEQ ID NO: 72330

SEQ ID NO: 73911 - DNA, 1752 bp, Vibrio parahaemolyticus 12310; identical to SEQ ID NO: 72331

SEQ ID NO: 73912 - DNA, 1851 bp, Mesorhizobium sp. L103C119B0
atgactgtctacggagccgaaagcggtatcgcaatcgtagcggcgcgcgtccgcgactttcgctcgcttgccaatgttgagttggaattcagcgatttcacagttctcatcggggcgaacaacgccggcaagaccagcttcctcgacgcactctttgccgcaatcggtgttgggcgaaaatcactcgatgccgatgatgtgcgcctcgcacttggcgaatccactgcgcccaagactcgctcggtgttggttgatgtgatgctgcggcccgtcggtgccgacggcaaaatcgtggatgcttatccggctggaagcttctggacgaacctctggggtgccacgggtatcgcgaccgacgacgcctttaacgagttcaccggaatccggacgacgctaaaatggagcgacattcgtggggagtacatactggagcggcgcttcctgagggagtggaagccttttgacgattgggcggcggcggccacccaagatcgccccgtcacggcggctcagcttgagcccttggcgttacactatgtggacgcgaagcgcgacctagacgaagacttgcgaaagccgggatcgttctggcgacgcctgactgaggaccttggtctctccgtggctgaggttgaggaaatggagaagacactgtccgggatcaacgagcaaattgttggaaagagtgcgatccttaaacacctaaaacaaaatcttgcggggttgcaaactattgtggccgcagacagcggcacggtcgacgtcacacctgttgctcgtaagttacgtgacctttccaagggagtggatgtgtcgttccaaacggccggggcccagccgttcccactcgctcgacatggcatgggcacccgcagcttggcggcgcttctggtgtttcgggcttacgtctcgtggcgatacaaacaggctaccgatggtggggacagcgtgcattcggtgctcgctctcgaagagccagagtcgcatttgcatccacaggcccagcgctcgctgttcgcgcatatcaagcaagttaccgggcagcgcattgtaagcacgcactcgccatatttcgcaggccaagccccgctcgaagatctccggctgttctttaaggccaacggtgattcttctgtgaccaagttggacacaagttcacttcacaaggacgacattcgcaagctgcaggatacggtgattgagacccgtggggacatcctgttttcacgcggggtcgtgctcttcgaagggcagactgaggaacagggtttaccggtatatgcaggaaagtactggggcaggagtgttcacgagctgggattttgttttgtgcgcgttaatggcacagactactttccgttcatttggctggccaaggctctgcggattccttggtacatctttagcgacggcgagcctaagcctgtggcacatttgaatgcaatgctccggaaggcaggtgaggctgagtctgagaactgccccaatgtggtggtgatcccaggtgatatggggcttgagaagtacctgctgtccgaaggataccaggctgagattgagcaagcgatcgacgaaatcgagggcaagtccaagcatttggatgattatatgaagtccatgcaggggcaaaagaagaagggcggcacaacccgcgactacacggcggctgacggtcgcgagctcgcgacgctcgactatctcgagggtaacaagacctctgcggccagacccgttgccctcatcatctcaaaccataaagacccgcagcgtcggttcccgagaaagatcgaggaactcttcgaagcaatcagcaaagcccatgggttgtccaaagccaaggaccaagcatga

SEQ ID NO: 73913 - DNA, 1845 bp, Mesorhizobium sp. L103C119B0
atgacagacgcgtttggatcgaggctctcgccgcagcagctcagcgttactaattatctggaggggccgctccttgtcatcgcaggcccaggctcaggcaagacgcgtgttcttacggagcgaattcggcacttactgaccagcgttccagggcactttcgggtgctcgcactcaccttcacccataaagcagctgacgagatgaaggagcggctggccgacctcggcgatgctagggaccgcgcgtttatcggcacgctgcatggcttttgtctggaagtactgacggagcgcgggaaattcgtcggcatcgacggtgctcccaatattttcgagcagacgagggatcgtcaagaagtacttcagagggcggttgaagaggatcccttcctgtcggagcaactcgccaacagtggagacttgaaagagcgccatcggcgcgtcgtacaatggctgtcgtctatctcgtacgtcaagtcgcaccctatcagccacgccttggtggaagacgaggagacgcgccgcgtgatggaggcgtacgaggcgggcatgcgcgcttcaaacgcctacgacttcgatgatctgctattgcttacctacaagctgtttgtggacaaccccaagatcggtgacatctaccgacgcctttacaagttcatctgtgtcgatgaggctcaagatatgaacgaggcccaatttgcggtgattatggcgctttgctctgacagcaatcgcaacgttatgatggtgggggatccccggcaatcgatctatggattcaatacgtcgagccccgagtatatggaacgttttggcatcgaattcgatgccaagcgagtggagctcaccgctaactaccgatcgtcgcgtgcagtcgttgatttcactcagacgctggactccaactacatggtcgaccagcagttgcctatccaagggcttgtaaaggtgctgcgtggagccgacgagaaggatgaggcgcggcagatcgttgacaggcttgaacagctgttccagcaaggccatcctgacgtcgaaggaggagtgcagcccggaaagtgcgccgtcttgggacggacacgctattcactacttgctgtcgaaggcgaaatgacggaacgcggcattcccttctacaagcgtttttctgccagccacgaaaacgaatccgaggtggtcgaggacttcctggtggcgttgcgcgtcttggcgaacccaaaagatcggctgcatctatccgcgcttgctaagcgatggcgggtggccgaacagccagtatcccacgacttcttggctagcttagaagttatgtcgggtgcggcacgcagttctcgcgcagaggcggtccgaaaagctatcgtggcagcctcgaggaacccaacgaagctggacctcatgctggcgctcactgaattgagaaagcacgctgacgaacaagccgtggccgataggcttgcgatctatgaggatgtcgaagtgcttaggcaagagtgggaccagttcctgcgccgcgtgaccggtgcaagaaccgcaaccgccttcatgagtagcaaagcgcttggtagcactcagaagccttcgcgtgagggtgtagcgctgctgactgtgcattcgtccaagggacttgagtttgatgtcgtattcttggcgggcatggcagaaggaatctttccggactatcgcgcaaccggcgcaaaggaacgcgccgaggagagtcgcaatgccttcgtcgctgccacgcgtgcaaggcgcctgctgtatctgagctatccagccacacgagaaatgccttggggtggtgtgcgaaccttggctccatccacgttcttgaatggggcgctgtag

SEQ ID NO: 73914 - DNA, 1968 bp, Mesorhizobium sp. LNJC372A00
atgaaaatagagcagctgactatccacaacttccgatgctttgggccggagggagtgacgctcaccttcgaagaggctgttacggcattcgtcggaaataatgggtccggcaagacggcgattttcgccgcaatccaaaagacgttcggtacatcaagcgctcaacggacgatccggaaatccgacttccatgtgcccaaggacggcgagaagctcgagtcggaaaccgtgatggtcatcgactgcttgcttggcttcccggagttggaagaagacgatgtggatacggatgcgatccccgaagttttcaatcagatggccacgagcggagaagaagagccgctaaaagtccgtatgcgcctcgaagcgaagtggatcgacgacggcacgcccgaaggaacgatcgaagaagcgttccggtgggtgcgcgcaacggacgacgatttcgaatgggacgagtgccaggcggtacaggccgtcgagcgaaactacatccagctcatctatgtccccgccaaccgcaatgcagccgatcaggtcacgaacctgctcaaaggacgtctgtggcgcgccgccaaatggtctcaacagatgatcgaccaggccgagacatcggcaggcgcacttcaaaacgaattcgataccgaagaggtcacggagtttatcctcgaacggatcgaaacccgatggtcagaggtctatacgggagacacggacacgacgccgaagctcagactaatcgaggccaggctcgaagagctcgttcggcgcgcggagtttgtattctttcccgacgaggccgggcgggagcgccgccttgaagatctcagcgacggacaacgctctctcttccatatcgcgctgactgcggcgacactggagatcgaacgcgatgccctgcagggggccgcggcggacagcgtattcgatcaggagaaactccgccgaacgtatctgacgatccttgcgattgaagagccggaaaactccctctcgccgttctttctgtcccgcatcatgcgccaggcacgtgacatcggcggcgctaccgaggcgcaggtgatcctctccagtcacagcgccagcattcttggccgggtagaacctgaagaggtgcgatacgctcgcctagacgcggagacccgcgtgtcttcggtgaaaatccttacccttccggaggaaggcaccgaagctcgcaggtatgtgcgtctggcagtgcgtgcctaccccgagctctactttgcgcggttcgtcgtgctggctgagggagagtcggaagcgatagtgcttccggctattgcggaagcatcggacttcccgctcgaccgctcgttcgttccgatcgtgcccttggcagggcgtttcgtcgctcacttctggcgcctcctgtcggatatcgagattccctatgccacgcttctcgacctcgatgccggacggcagcacggaggggcgaaaaccgtgcagtacgtcgtcgagcagctcgccgttatcgacaacgacctcagcaccaacaaacttgtcgtcgatgaggaaatcgatccggatgcgattgatgagatcgacgaccaggaactccttgaccaggatcaggatcatccttggctcatggcgctgagactagaaggcgtgttcttctcatccccgctcgatatcgatttcgcgatgcagcagatgttccccggtgcctaccggaaaccgagaccgggcggccgtggcccgaagacaggtgcgatcgcccttgcagataagaagaaagtcacactgaagacggagggaaatccagacctttacgatcacgggtgggacgctggcttcatttggtatccctatctgttcctcagcgaaagtaagcccgaagcacaccttcgcgcattgagcgagatcgagccgggagaccttgcaagctctgcgccggcagagttgaaaagcctcgtagcctacgtgaagcgtagggttagtaaatga

SEQ ID NO: 73915 - DNA, 1854 bp, Mesorhizobium sp. LNJC372A00
atgagcctcgttcgtccggaagactgggtgcctcaaggcattgaagagcttgaggatcgtgcctgggaagcacttcgggaaaccggcaatagcgtctgcgtcacggccggtgccggcgctggcaagacagagtttctggcgcaaaaagcgtcttacctcctgcagaccggactctgcccagcgcccaaacgaatcctcgcgatcagcttcaaacgcgacgccgcggaaacgctttcggcccgcgtgcggaaacggtgccccgagggacaagcacggcggtttgtgtcgctgacattcgacgccttcgccaaagggcttgtcgatcagtttcgtatggcagtgccagcccagtacagaccgccggcggattatgaaataggcttcccgaccaacgacgccttgaacgactttctacagcgcgccgggcttcacaacatcaacgctcagcaactatctcgaatcatcgccgatgttcgcatcggcgaccctaaccaagttgtggcggcggatcgtcaagccgcgttcgacggatactggaacgatcagctacatgggcgaccgacagcctatctgacgtttgcaatgataaaccggctcgcagagtatctggtgcgcgcaaaccgccggatccacgccgcgatccggatgacatacccgatcatctttctcgatgagttccaggacacgcagggtgctcagttcgagctacttacctccgccttcgacaaagaccacaacacttttaccgcggtgggagacgacaagcagcgcattatggggtgggcgggagcgatgccgaacggctttgaagtgttcacgcagcaattcgatgcaagacttatttcgctactcttgaactggcgctcacatacagatctcgtggcaattcaacatattgtagcgcaaagcatcgaccctaatgtcgagcacgcggtcgcacgcggggagaaagcggtcgatggcgatgtttgcgcaatctgggatttcgggagcgaagagggagaaatcgaaggcctcgccggctggatatccgaacaggtggatgacggtattccggcgcacgaactggcagtcctcgtgcgaaaccaccctgaacgtttggagaaagcgttaggacctgcactcgccgaactcggtgtccctcttcgaaacgtcgcgcgaaacgtcggctcgatcgcgatccaggacttgctcgccgaagagctgtctgagattctcctaccgctgcttaggctcggagccgagaagcgaaaccccgaggcatgggcgtctgcacaagagcagctgcgaaggcttgaagcgatatctctcgacgacgaactcggacttcagcgatcggcagcgcgcaccgaaaccctcgtaaaatcgatcaggggctatattgcctcccacaatccggaggctggcagtgcggcaggcgctgtcgctatcctcatcgaggaaataggcgagaccgttataaggcgcgcgacaccatcgtacacacgcaatgccgacttcgctcgcgtggtggaaggttttgaacgtctgctttccgagtgcctcgacgacgccgaaacctggagcgatgccctcgaccgcttcgaggggcagaaccaggtgccgctgatgaccatccacaaaagcaaaggtatggagttccatacgatcatcttcttcggcctcgatagtaacagctggtggagcctaacccctaaccggccagaggagatgaaatcattcttcgtggcgctcactcgggcaaagcagcgtgcgttcttcacgaactgcagcgatcgcggcggccggattgcctggttggaaaatctgctcggtgaacacgtgcctcgcatcgcgagcgaagatattggctga

SEQ ID NO: 73916 - DNA, 1968 bp, Mesorhizobium sp. LNJC374B00; identical to SEQ ID NO: 73914

SEQ ID NO: 73917 - DNA, 1854 bp, Mesorhizobium sp. LNJC374B00; identical to SEQ ID NO: 73915

SEQ ID NO: 73918 - DNA, 1797 bp, Mesorhizobium sp. LNHC252B00
  modified_base (1223)..(1223): a, c, t, g, unknown or other
atgtatctcagcaagttgagcatcaggaatttcaggaattttcaatcgatcgacgtcgcgctggccggcaatgtcgtgctgctcggagaaaacagagttggcaagagcaatctgctgttcgcgatccaactcattctcgatccgacactgcccgattcggcaaggcagctgaagctcaccgattactgggatggcgggcctaccgactacagcgcgcccatcgaggtccatctggagatctcggatttcgcgtcggacatgtcactgaccgcgctgctgaccgattttcgggcgcctcatgatccgagtatcgcacggctcagctacatcttccgcaagaagtcggacgttgccgggccgcctcaatcgggcgccgattgcgagtttctggtctttggcggcggcgacgaaacacgttcgctgccgagcaagatgcgccggcgcattgcgatcgatctgctcgatgccttgcgcgacgcggaaggtcagctcagcagctggcgggcctccccgctgcgccatctgctcgaagaagccgtctcagcgataagccgcgcggatctcggcactgtcgcgaccgagctggacaaggcgagcaagacgcttgaggcctttccgaccatcaagacgctggaagatgaactgcgtgccgggatagcccgtttgtcgggaaaggcgcatgacatcgatgcgcgcctgagatttgcaccggccgacccgcttcgcctgttccgggcgattgcgatgttcatcgatgatggcaaacgcggcatcgccgaggccagcctgggatcggcgaacgtggccctgctggcgctgaagcttgcggaattcgcctggcgccggaagaagaacgagcgcaatttctcgctgctgtgcatcgaagagccggaggcgcacctgcacccgcacctgcagcgatcggtgttcgcgaagttgctcggcaatgccgaggcctctcaggccatgatcgtcaccagccactcgcctacactggcagcagtcgcgccgctgcagtcgatcgttcagctgaagaggcgagggggcgcgacgcaggcattctcactggccaacctgccggtgacgcccgacgaactagatgatctggagaactatctcgacgcgtcccgcgccgaactcttgttcgcgcgcggcgtcatcttcgtcgagggcgatgcggaggaggcgctcatgcctatcttcgccgcctcgctcggccattncggccattcgcttgatgatctcggcatcaccgtatgcaacgtcgctggcacgaacttccgtccttacgtcaagctcgccgaggcgctgtcactgccctattgcgttgtcaccgactgggatcccctcgacggcaccaagcctcctctcggcaagaaacgaacgtttgatctctggcaggacatgctcgccgttcgtggcaagcctcttctgacgacggcagatctggcgaggtgggaagcatcagactatgccgcattcagcgccgacgcggcgaaatccggaatcttccttaacgaacgaaccttcgaagtctccgtcgccaacacgcaagcgctattggacccgctcctcgatatcctgagcgaacagaatttcggttcggtgaggaccaagcgcattgccgactggcgaggtggcacacgggttgatgctgaacaacttctggccatggtcgcaagcgttggaaaaggccggctcggtgcccggttggcaaagaaaaccatcgggctcaatccgcccgcctatatcgaaaacgccatcaacaacgtcgtggctttggtcgccaatgcttag

SEQ ID NO: 73919 - DNA, 1776 bp, Mesorhizobium sp. LNHC252B00
atgcttagcgaccggccccttgtccaagccctcgcagacctcaaggccaatccggagcaggccgccgccgtcgtagaaggaggtcattgcgtcgtgcttgccggcccgggaagtggcaagaccaagacgctgacgatcgccatgtcacgcgccgtgatccaggacgtacccgatcctcgcggcgtcgcctgcatcacctacaacaacgactgcgcgatcgaactggaaacacgcctcgcccgtctcgggatcgtacctggagaccgcgctttcatcggcaccgtgcacagcttcgcgctgagccaggtcatcggcccgtatgcgcgctgcgtgcccattgggcttccagcggacttcaaggtcgcgagcaaatcccagatacgggccgctgtggaagcggcatacagcaaatcgatcaacggcttgggcaaccctcacgacagatggaagttcgcctcggaaaagcgcgtccgcgatgtcgatcgtacgcggcccgaatggcgggggcgcaatcccgagctggctggtttcgttgaagcctacgagatggaactgcgccggcaagggctgatcgatttcgacgacatgccgctgatcgcctatcgcatgatcaaggcgaacggctggattcgcgacgctatccgagctcgtttccccgtgttgtttgtcgacgaataccaggatctcggtcatgcgctgcacgagctcgtcctcctgctttgcttcgaaggcggcattcggctgtttgcggtgggcgacaccgaccagtcgatctacggcttcgccggcgccaaccctgagctgctggaaagcctgacgcgccgctccgatgtgcgcacgatcaggctccgcttcaattatcgttccggcgcgaagatcattcgagcctcgctcggtgcccttggcgaggaacgcgactatcacggcatcgatggcgctcccgacggcgatctcagcttctggccagttccgtacggacacgagaatcaagctgaagcggtagccaacacgatcatcccgaagcttctcgaacagggattcgaactggggcaaatcgcggttctctaccgggccgcctggctcggcgacaaggtggcagccgctttgaaggaggcgggagtcccgtttttccgaaccgacacgaacgccctggtcaaaagaagttcccgccttgcgcgcttcattgaggaatgtgcccgctggatcacgggcggttggcgcgatgccaagccgccatatgctcggcttctgtcgcaagcgacgacgctcgtctacgggcgccacgccagtgagcgtgaggaagaggaactgtccgcccaactcatggaatttctgagcacctcattcggaagcagcgaaaccactcacgtctggctgcaacgggtcgcgcgagaactcatcacgccgtggcgcatgatcgctcgcactcccgaacaggagtgggacgtttgcgacgagatgatctccaacaccgacccggcccgcgatctggacattccattggcgcatctcgccggacggtcggaaggatcgggacgcgtcaacctcagcagcctgcacagcgccaaggggcgggagttcaatgcggtcatcatgtatggcgtaaatgcctccgacatgccgagcacgcgcgacaaaagcactcccgcaggtctccgtgaggccaggcgcttgttctatgtcggggtgactcgctcgaaaaaacacctcagcctggtctatcaggagcaccaccattctccatgggtcttcgagctgtatcagcgaagccggtag

SEQ ID NO: 73920 - DNA, 2070 bp, Mesorhizobium sp. LNJC384A00
atgcgcattcagaaggtcgcaatcaagaattttagacttctatctgacgtaagtctcattttggaagcgtccgaaacagtaatcgtgggacgcaacaacagcggcaaaacttcgctttcagaggtcatgcgccggcttctagacgatggccccgtcaacttccagctcgaggacttctccagcgccagttaccgcgggttctgcgcagccgtccatgcctatctctccggccagcaggaagacgaggtccgcgctctcctcccagccatcgaactgcgactgcattgtacctatgatcccaacgcgccggagcttggtccgctggcgccgttcgtcgtggatctcgatcccgccgtaagcgaggctttgatcgtgcttcgctacgagttaaaggacggcggaatgggcgcgctttttgacgggctccctgatgggtcgctggacgacgcatcccgcaaggcattccttattgggctgcgcgaaaaggttcccagcaatttcgggctcaggatccgtgcggaagatccgaacgacccgacaaacttccgccagttgcagccgtcggccctccgtaatctggttaggaccgggttcatcaacgcgcaacgcggtttggatgatgtgacatcgcgagaaacggacgtactcgccaaaattcttgaaggccttttcgttacggcgtcctccccgtccgcggacgctaccgacagggttatagcagaagccctagccaccgtcgtgcaaggcatccagacccaaattgacgccaatttcggaaatcaactgcaaaatctgatgccgacgttgaccagctttggttacccgggcttaggcggccaagaactccagacagagacaatccttgatatccgcaagctcttgtcgaatttcacaagagttcgatacgccgggtatggcggggtgacgctgcccgaatcctacaacggccttggggtacgcaatctcattttcattttgctcaggatcgtggaattccacaaagcgttcaaggccgagcctaagacgccaggcgttcacctcgtctttatcgaggagcctgaggcccatttgcaccctcagatgcaggaggtctttatcaaacaattgggcaagattgctgcgcaactggctggcgcaggtgaggatgctgtcctttggcccgtccagtttgtggtatccacccactcgtcgcacatcgccaacgcggcagggttcgagagtatccggtatttcctcggcgccgaagtgccgggcgccgacgctggtattcgacagactaagatcaaggatctgcgcctggggctggcgggcacgccggcgcctgacaggcagtttctgcacaaatacctcactctcactcgctgcgatctgtttttcgccgacaaggccattctagtcgagggtctcagcgaacggctcatgcttccggttatcatcggaaagatggaggccttggaacctgcgattaaactctcgagccaatatcttaccatcatggaagtcggcggcgcctacgcacacctgttcttcaacctcctcgatttcctagaactgcactatctgattatcactgatttggactccgtcgtagccccaggcggcgttgcgtgtgtcgtccatctcggcaccgcatccagtaatgcgtgcctgaaggcgtggttcagtgccgacgatccgcataccttggcgggcgtgatggcaaaatccaacgacgacaagaccgacgatcgcgggcgcatagcctatcaagttccggaagtcgccggcggtccttgcgggcgaacctttgaagatgccttccttttggccaaccaaggccttttcggcttggcagcgggaatgccgcaacagcaggaaacggctgcacgcgatctagccacagtgcagaagaaatcggaattcgcgttgaaatacgccatcgaaatcacaggctgggtgacaccaaaatacctcgctgacggcattcgctggctcgcagtcgactatgttcctccgatcgatccggcactggcgatcgtcgcggcagcggccgctgcggcgcctgcttcgggaggcgacgccgttgcctaa

SEQ ID NO: 73921 - DNA, 1734 bp, Mesorhizobium sp. LNJC384A00
ttgcctaatctcgaatcccctgccgaagcggcgagccgcatagcgctcgaagaggtattcgcgtgcattcaggccagccggagttttcgccttgaggccggtgctggcgccgggaaaacctattcgctggtcaaggcgctcaaatacttgacggagcggcatgagcgggacttttcgcggcgtggacagcacatcgcctgcattaccttcaccaacgtcgcaaaggctgaaatcgaagctcgaaccgataggcatccgataatctactgcaacaccaaccatgccttctgctggctgcttatcggcggcttccagaagcagcttaaggccttagtgcagcagatgccggtttggcaggaaaagcttttggaggcaggcggcataggtaataggggtgtcgaatacagtttgggccaccgcgcggtacgcgagcacatgctttcgcttcaccatgacgacgttattccgctcaccatctcgctgatggaaaatcagaagtttcggaaaatcatggccgaacgctttcccatcattttgattgatgaatatcaggatacagacaaagcctgggttgaggccctcaggctgcgcttccttgggcagccggggtcaccgcttttcgggttcttcggggaccactggcagaaaatttacggcaatggatgtggcgagctcaacgacgacgccgtcaccccgatcggcaagaaagcgaactttcgctctgtgagtgcgattgtcgaatgtctcaatcgaatgcgtccggagttgccgcagtttgtcaaagacccggctgaacctggtcgggtccgcgtcttccataccaacggctgggtcggacaacggcaagaaggccaacattggggcggtgatctgccgtctgacgtagcgcaccaggctctcgaagccacgaaagccgggatggttgtcgacggctgggacctcgcacctagccagaccaaaatcctcatgctgacccaccgggtccttgcgagtgagcaaggatattcgaacctggcccaagcgtttcaatacaacgactcctatcttaagaaagaaaaccgactgatcgccttcctggctgacgtgcttgagccggctgcggacgcttatgatggaaagcgctatggcgccatgttcgacgcgctgggcggtacggtaccggtgctgaagcgccaagcggacaaggccggttggactgcctctttcgatactctcatgacgctcagggataatgggtcggttggcgaagttgtcgaccacttaattgtgtcgcagcggcccggcttgcccgatcgggttgaggagtggcaacacgcgctggctgcgttcgacgtagatggcggggtggagatgccccgaccgttagccgagttgcagaagcttcgtccggttgcctatgcggaggtcaaagcgctacgaagatatctggacggacattcgccgttcgaaactaagcatggcgtcaagggcgctgaattcgagaacgtactggtcgttctcggtcggggctggaatcaatataatttcggcgaaatgctggaattggcgggagcggcggccataactgccgccaaacaagcgacctttgagaggaaccgcaatttgttctacgtggcttgttcgaggccgaaacggcgcctcacgctgcttttcacccaagaactatcgaatgcggccttggcaaagcttcaagagtggttcggatccggttccattgaagcgttagtgttctga

SEQ ID NO: 73922 - DNA, 1734 bp, Mesorhizobium sp. LSJC285A00
ttgtatttggcagctctgtcgattaataacttccgacgcctacaaagcgcgaccataaattttcaacccggccttaacgtgatcgtcggccctaacaacatcggcaagaccgctgtggtcgatgcgctgcgcgcgctgctagccggggtagacgatccgtatccacggttcgcccgagacgacttgcatctgccaaaaggtggcacatcaagcggtgaaatcacgtttgggtatgttttcaaggaccttactggggacgatgaggcggacttcttgcacgcactacgtcctggcgccgatggagctttagaggccgtattgggcgttagctatggagacccggatagatcgggacgtttgcgagccagaaaatggtgcggagagcataccgatgtcgccatgactcctacgatgctggacaaccttcgaagtgtttatcttcaaccccttcgggatgcggagcaggggttgcgccctagtcggaacagtctactttccagacttctgcatctcctctccgatgatgcgggccgggctgagattgccgatgaactcgcgaagctcgatgcaaagctcaagaatcttaaatcgataactgacacgcaggatgcgattgcgggcagacacaagacaatgcttagcgagcagttcgctcagatgctgaatgtggaactaacaggaaacgattttacaaaactagcagctagaatttccttggtcgtcgatgattttgagatagagcgaaacggcctaggttataacaatctgatttatatggccgtggtattgagcgaactcgcaatgaatccaaccgctgcatttcgcagtcttatcgtcgaggaaccagaggcccatctacatccacaactccaggccgtattgcttcgctatctttccaatatagaaagtgccgccggcgagaagccggttcaggtatttgtcaccagccattccccaaatttcgccagtgtagccgatctcgactcgattgcttgccttgtcgacaccggtgcgcaggtggaagcattccacccgcgcaccgtcacattcaaaaagggcaagcgtgaaaagttgaagcgctacctggacgtgacacgtgcagaactgttttttgctcgacgaattatttttgtagaaggcgcggccgaattgctgatggtcagtcttcttgctgctcgaattggttttgatcttagaagccacggggtcagcttgatcagtgtggagggtctgaactttgattccttcatgccactgttcggcaaggacgcaatcaaaattccagtcgccgttattaccgacgccgaccctcagatagccggtgccgatgggaaaatggaagctcactatccaggcccggatgaggcaatagcggtttcagccaacacggcttcaatgcaggcaatgcaggacaatttagtccgtgtcttttgtggcaagaaaaccttcgagtatgattttgcgctcgtcgataaaaatcgcgaagctatgctcgccgcacttgaagaaattcatcctggaatcggcaaggatttgagagccgtggtgaacggtgaactgaccgatcatggaaaggctacggcgctgttcaaaggaatgtttgagcgcccgacaaacaatgtacagaaaggtaaatttgcacaggcgcttgccgcgaaaatagttgaaaataaattagatgtagcggttccgttatatattgaggaggccgtgaagcacgcatgccagaaataa

SEQ ID NO: 73923 - DNA, 1725 bp, Mesorhizobium sp. LSJC285A00
ataaaattatctgaacaacaaacagacgttgttgaactccctcttgagccgattgcgattactgcctgcgccggtagcggaaaaaccagaacagcggttcatcgccttgccgagatgcggcggcgtctggacgacagacatgggatggtggcactgctgtcattttcgaacattgcagtggatacattccggagagattatctggcgttgatgcgcgccaatgacggtggccaacaacccttcggtattgaaatcgataccgttgacggctttataaccacaaatgtacttcggccgcatggctatcatgtcatgggttgtgggtgcacgccttatctggtggatggtcgtgaacctttcttaaagaacttcacagtcttcgacggtgttaggcccaacccaacggctgatctccgtatcagctttgagaacggcgacttttctttcaagattggaaggaatgcgccaaaaaaaatcccgactgctgaggccaagaaagcgttaggaaaattgggagcagtaggcgcatacacccacgcttcagcgcgctactgggtcctgcgagttctcaaagaaaaaccatatgtcttgcgtgctctagtgcgacgctacccccacatacttgttgatgaagcgcaggatgtcggccctgagcacgaagccattctcaagctcatggtggacggcggatcccgcttgtctttgatcggcgatccgcatcaaggaatttatgagttttccggcgcaaatggctcatttctttccggatacgcgaagcaactcggcgttactgaaagaaatttgagcatcaactaccgctcagtgcctgcaatcgtcgacctcgcaaacaaactttgtgggcggaacgataaagcgaagaggattgctccagaaatacttaatggcgcctttttcataccgtttaaaaaggacgagaaagacaatgcgcttgcaaccttcaggtacatgctgaaagaggccggcatcgcggacaaagacggcgtcgtggtgtgccgttcgggagagtgggctgaccaatggagcggtggcgaagatggtcaaggccaagggatagtgaaggcttttgctgatgccgctgtttgtcgagacaagtttagacgtctcgaccaggcttatgatcacacatgcatcggcatcgtaggcctgctcgcaaaccaacaccgcgatttgatttcaaaactttctcgccccgcgggaagtgcggatattatgaaactgagaagggcaatttggggatacgcgcgcgatcctgcagccgggctcccctctgcaacgttgttggcagatacgcaatggcacccattgctggtagagagagcaaaatcgtttattgcctttctggaatctgacttcggattgagcgcaggcgagaatttaggcaataggcttgccaaaaaagcattactgaataagccgctgatccaaatgcccgaccttgcgcagccggatagtccgccgcagtttcgtgtatcgaccgttcacaaggttaagggtgagagtttggaaggcgtcatgtatgtggttagcaaggagcacgctgaaggactgttgaatgggacaggaaccgaagttgggcgtattggatatgttgcacttacgcgagcgcgaaatctatttgttctagcggttcctagcaacgccctcggcgcacttgagccaaggttggtgaaaatgggctttatgaaaccagggaaagctgcgtag

SEQ ID NO: 73924 - DNA, 2070 bp, Pseudomonas aeruginosa DHS29; identical to SEQ ID NO: 73876

SEQ ID NO: 73925 - DNA, 1749 bp, Pseudomonas aeruginosa DHS29
atgccgctgatgcctgatccgcagtcaccggccgaggttgccagccagcgcgctcttgatgccatgtttcgcagcctggatgccggagagcacttccggctagaagctggagcaggcgctgggaagacctactctctcatcaaagcgctccactatttgatcgagcgccacaaaagcacatttccaaggaaaaacaagcagattgcgtgcattacatttaccaatgtggcccgcgatgaaattgccgcccgtactgacagaagcccaatggtgtactgcgacaccaatcatgccttctgttggtcattgatcagtggcttccagaaacaactccgtggtttggttgaggcgatgccggcatggcaagagagaattgcggaagctggaggcggcctgggtaaccgtgtaatcgagtacaactttgggcaccgttccattcgtgaagatcgcgtgtctctccatcacgatgatgtgttgcccctcactgtttcattgatggagcatgccaaatttaggcatatagtgacagatcggtttccaatcattcttgtggatgaatatcaagataccgataaggattgggtcgaggcgattcagcggctgtttttggggaatccgccttcacccctattcggcttctttggcgaccattggcagaagatatatggcaatggatgcggaagacttgagcatccgcaagtcaaggagattggcaaggaagccaacttccgatcagtcaaagccattgttgactgcctcaaccggatgcgcccggagctacaacaatttgtcgaagaccctgacgctattggacaggtcagcgtatttcatacaaatgcctggactggaggacgacaaaccggtgcccattggggaggagatttaccttcggaagtcggccacgacacacttgagggagtgaaggcctcgttgacacaagagggatgggatttttccccggaaagtacaaaggtactcatgctgacgcataggcttcttgccagtgagcagggctatgccagcttgccatcagtctttcgttacaacgattcctttgccaagaaggaacatccgtatattgccttcttcgtagaccagttggagcctgcgtgcgatgccttctccgcgaataggttcggcgccatgttcgatgcgctgggcggtaacacgccgctattgcggagtcaggccgataaggcagcctggcacgatgcgatgagccagctactggcgattcgcgaaaatggcacggtcggagaagtcatcgaccacctgctcaaccggcggaagccaagactcccggaagccatcgagaagcgtgagcgggaactacgcgagttcgatcgagcaagcggcgaagagatgccggccgcactggcggagatagagaagctacgcgcggtcagatacgcagaaatcaaaacgctacggagctatctggatgggcactctccctttgaaaccaaacacggagtaaagggcgcggagttcgagaatgttcttgttgtcatcggtcgcgggtggaaccagtacaactttggagagatgctcgaactggcaggaagcgcagccatcccacccgggaagcaggcggccttcgagcgaaatcgaaacttgttctatgttgcctgctcaagaccgaaacgccgccttgccctgctgttcacacagcagctttcgccagatgccatcgcaacacttgaaaggtggttcttgccagagagcatccgtgctgtcgctttttcgtag

SEQ ID NO: 73926 - DNA, 1758 bp, Enterococcus mundtii QU 25
atgacaaaaataaaactaattaaaattaaggggtttaggagttttgaaaatgctaaaattaatgttgcagaaaaatcattaataatcggtgcaaatgacgtagggaaaactaatttaatttatgctttaagaattctttttgacaaaaaaataagtgagaatgacttggaattatttgacagtgattattgtatttattcttctaataaagagatttccatagaagtacatctcgaaaatgtagttgaggattgcctagtttcgatttttaagggattgatacatgaagacaaaacaataattaaatttgttaaagaaaaaggaaaaccgtatacaatatactgtggttttaacgatgaaacaatgacagcatttgataacagattttatataagatacttatttatggaatgtgtagatacgaagcgtgatttaaacaaatttatgaagaaggaaagaaatacattattagataatgcaaaaagatctagaaaacaagacgaagtctgtattgacgaaaatcttgaagatactctacaaactagtttgacagaaattaataaatcaattggaaatttaaaatatattgaaaaagcattagatacagtaaacgctgaattaaaaaaactttctattcatcatgacaaagggactttacattttacagctccagagacagatatgtcaaaagtcttatcagatgtaaacttatcatttaaggaagaaaatcaagaaatcggagttggtggagacggaaagaataatcaaattttcttggctacttggatttctaaacaaacacttaatgagaataatgatgactatgtatgtttctatgttattgaggagccggaggctcatttacatcctcatcaacaacgtaaactttcttcttatatcatggagaaatttacttctcaaatatttattacatcacattcgccatttatcggtactaactttataccaaaagatattatcaaattaataaaaaaagatggtagagcttcagcagcttctaatggagcaagtgaagaaatttctgagggagttgatgagttcaattatagactaaatataatcacttcagatttattttttgttgatggaattattttggttgaaggaccttctgagaagatattttatcaagctctatgtgatcaattagaaattgatttagatttttataatttttctataatatctacagatggagttggatttgctccatatatcactatgtgtcaactattagagataccatacagcctcaggacggataatgatattttcaaaaagacaagaggcaatcaagaatattacttctgctcaggcttaaatagacttcacaaattatttagagatggaataattatggatgaaaagattgatggcgaattttcagatagtgattttgaatggaggataaattctcctgaagaggagaaaattattccggaagaaaagagaaagaggattggagtgtttaaagaattactcgaaagtaagggtttatttttagcagataaagacttggaagaagatttaattaagcaattatccatagaaacaaaatgggatgaagaaaaacaagatacattaataacacatttgaaaaaaaagaaagctacaaatatgtatgattttgtaaaagagagtattgcatttgattctcttaaaaacaaagacataagtaagcctgtatgttatcttttgaaagaagtttatgattttgatttgggagaaataaaatga

SEQ ID NO: 73927 - DNA, 1566 bp, Enterococcus mundtii QU 25
atgaagcaaccaacaatggaacaaatgaaagtaattgaatacgatggaaactgtgtaataacagcttgtcctggaagtggtaagacttttacaattgttgaaaaaataaaatgccatactaaaaatttaaaaagctatgaaggcatagttgctatctcttatacaaataaggcggcagatgaaataaaaaatcgactaaaaggagaaaacaagaaaaatttttttataggaactattgatagattttgccttagtgagattatctttcctttttcaaaatttcttattaagaagaatattgatagttttgaaataatcaataatgataatagtggagataagaattttgattattatgttgactatcttaattcagggaaaatccctttaaattatattgcagatatatcatttttaattttaaatcgtattcctgaatgtgtaaattacctaaaagcaaagtataaaatgatatttgtagatgagtatcaagattgtgaagaaaatcaacatttaatttggaagtttttatgtcaacaaggaataaaattaatagcagtgggagatgtggatcagtcaatttacagtagttttactgattctaatcctgaattcttaagagagttaatgacggatgaaaaatttaaatcttttgtactatctattaatcaccgatcacatcaatcaattgtagaatatgccatgagatttaaaaatgaaaaatattctacgatgaatgacatggatttaagagtatctaaagttaatattaatggaaatgaaagacaaatagttagttctatagaaaaaaatatagctggtattaaaagtaaatatactattgaagcaatgtcgaatattgctattttttgccgttcaaatgctatggtaagtagagtatgtcaatttttgacaatacctcacaaagactatagcttgaatgcctttaaaaatgaaaatgattttaatagattttgtaaattattattagttagattctttcaatttaaaaataaagaagtcacaaaaaaagagtgtgcagaagaactagtaaatttatataaagagaaagaattatacgataatattaaaaagaacatagactgtttattttctcaagaacctgaaaaactatatatgaaattagaaataatatgttctctttattcagaaactaaaaaacagtgtataacagaagaaaataggagtgaattatatcatgtattacaagatataaacctattaaatacatttaaaccagcagaaaaagatgaaattcaagtcatgacttatcataaatctaaaggattagaatttgatgttgtttttcttatggactgttataaatatatattgcctaaagaataccaagatagatacgacaatttggaagctgatgaaaatctacactatgtaggtctgacacgtggaaaaaaagctgtttatattttgataggaactgaacggtatagagtgcataggtcagattatatttccgcaatagagtctatttttttatcaagaaatggattagctaagttgagaagatacgaagattggaattga

SEQ ID NO: 73928 - DNA, 1800 bp, Acinetobacter baumannii ZW85-1
atgcacttgtctaatataaaactttggaactttcgaaaatatggtgatgttagcagcgtatttgatctaactaaaccaaacctagatcttaatttcacccaaggtataaatgtactaattggtgaaaatgattcaggcaaaacggcaataattgatgctattaagctcgttttaagaacacatagttttgactatataaaagttgaagataaagacttttttggcgactctaaaagattaagaatagaactcatattcgaagatctatcagatcaggaagccaaaaattttactgaatggcttagttggaaaggtagtggcacagatgctgaaccgtttttaaaattaaattgcgatataacacgtaatgataaaaagataaatccttttgatatcaaagctggtccagattcagatggctatctattaacagctgaagctaaagaataccttaaaataacatatttaaaacctttaagagatgctgaaaatgaattgatatccaaacggaattcacgtctctcgcaaatcttattaggtgatacggctttcaaagaaaaaaatcaaaatcatgaacttgttcagatgtttgagggactcaatcagaatttaaaaaaatattttaagggtgaggaaattagttttatagataaagatggtaataataatactgaagtttacgaagatggtaaaataattaaagataagatcgattgctatattaaagcattctatgatgataatgttctaacagaatttaatgtttcaactacagatttaaaaagtatattagaaaagttttcactttttctagaatctcaaagtaatgttggcttagggactttaaatcgcctattcatggctgctgaactattacatttaaacaaagaaagttggcatggactacgcctaggtttgattgaagaattagaagctcatcttcaccctcaagctcaaatgcaagttattcaagctttacaaaaacaaaaacagattcaacttattcttacaacacatagtcctaatttagcctcaaaagttaagttagaaaatataattctttgtagtaaaaactatgcatatcctttaggaaaatcatatactttattagatgaagaaaattatattttccttgaaaaatttttagatacaactaaatcaaatttattttttgcaaaaggaataatatttgttgaaggatgggctgaagaaatacttattccaagtttcgcaaaagctattggaattgacttaacatcaaaaggtatatcaatagtaaatattggcggagtaggttttcaacactatgctaatatatttcttagaagagattttcctcatcttaatattccagttgtaattattactgattccgatattagagcgtataaaagacacaattttgaaaaaattcacaaaaagaaattcaataaaaagactagtttaaaattaatccgtattaaaaataaatcgaaacaaaaaatcaaatattatccagcaccgtattggactctagaatattgcttataccaatctcagaaattatctgaaatttttaagaaacatactaaaattattcattcaaaaactccttggaattctaactttgaactcgaattagcaaaaaagttgatcaaaaaaaatttagataaaacaggaatcgcatatcgaatagcccatgatttagatcaagaaatagaaaaagagccacacttacaaactttaaaactacatgaaacagagtctaatgacactatatattatttattagaggctatccgatatgttaccaataattaa

SEQ ID NO: 73929 - DNA, 2037 bp, Acinetobacter baumannii ZW85-1
atgttaccaataattaaaattacagatgaagatatttcttatgccgaaaatattttattaccaaatggtaaggtttttgatgaagaaagacgtgattttattcgaaatttatcaacaatagatttacaagctgttcctggaagtggaaagacgactgctcttttagctaagttattaattttagaaactaaactaccattgcccgacaattcaggaattttagttttatctcatacgaatactgcaattgatgaaataaaagaaaaaattcaccaatattgcccaaaactttttcgttatccacattttattggaactatacaaacttttgtccatgattttttgacaataccttattactccgaactatataaaaagaaaattaatcgaattgataatgaattttataatgaatatgtaggtaaatgcctagattcattatggctaccatgttttaaatttcaatttagtagcagcacaataagaaaaatccaatatataaaaaattctaatagtgaaattttctataagtatagaattgaaataagagatcaaccaattttaactcaagaattaaattcaaaaaaacttgaaataagtaaacctagaggaagagctagaaattatagtgattatacacctgaagaaaaggaagaattatataactggttttatgcttttaaaaaaagcttattaaaggatggttatttgaattttgacgatgcttatttttttgcaaacttgtctttatctcaaagacctaatttaataaaaattctacaaaaaagatttcagtatgtatttattgatgagatgcaagatatggataatcatcaatatgagttaattgaaaaaattttctataataatagtaatagcctttcaattattcaaagaatcggagataaaaatcaatctatatataatacagtaaaaatagattcaatttggcaagatagagatattgttctacgtctcacacatagtcagcgattaagtaaacctattgcaaatattattaaaaattttgcattatatcctgaatactgcaatgatattgaggggttaaatgaatgccttcttaagccgcatattatattattctctaataactcaattcaaaatatagttccttacttttctcagctcatacttgagtataaagattctggcgcacttattactcaggacaaaaaagatttaaaaatcaaggtaatcagttggaatacagaatggaaaaatgacacagaaagtcgtaatgacccaaataaagttagattagaagactactatagatcttataaaaaaaatgagcaaaaaccaaaagaagattataaatgcttaaaaagttatctattctttttcgataaaagatcatcttctcttgcacctattcgaaaaaatattatacatgctctactcaaaatattaaggattgaaaataaattttctgaagatggtcatccatttacaattcaaaaattgatgagttatctaaaagcacgatctcagaaaaactatgaagaacttaatttaaaaatataccaatgtgcaataaaagttgtgagaaatgagaaaaatcaggcattgttagatttaaaagattatatacccgtctttatctcttactttgatgaaaatcatttaatatcatctaaaactattgatttcattaataatgatgaaacagatatacctctctcaatgcaaaatatttattcatcttcaaatgttattgaagaaaacaatttaagtattgagataaccaatgtccattctgtcaagggccaaactcatgatgccactctttatttagagtcattttttcatgaacatgaatctaaatctttagcccagcaatttttaggaaataatattgatcaaagtgcaggaataagaaccaaacaagctacgaagatggcgtatgtaggtttttccagagcaacgcaactgctctgtattgcaattcataaagatagatttgaacaatacttaggcgctattgaaagagaattctgggaaattaaggaagtatag

SEQ ID NO: 73930 - DNA, 2031 bp, Rhodobacter capsulatus YW2
atgcatattgaaaagatcaaaattgaaaactttcgcctcctacaagattgctgcctggacatgaggaaaaagacaacgcttcttgtcggcaaaaacaatacgggaaaaacatcccttgctgtattgctggagaagtttctggagcgtccagatagcttcacttatacggactttccgataccgataaggcagaagataatcagtattgacgattgtacgaatgtcgaggatttcgcgatcaggctagtgctgcgcatagcttacgacgaaactgacaaccttgcgatactctccgagttcatgttggaactcgatccggaacggcgacatgtcaacatccttttcgaatgttgcatcgacaagaagaagctgcttcgcgctctgccaggcgacatcaaagagcgaaaaaaattcattgaaaacaacctcagcggaaattttctggattttaagatttttgcgtttgatgatttcgggcacaccgaggaaacgccatactacctggcgcaccgcgatcaactggaagagaaagaacgatctgatgtgcgggcgctattgaactttcaagtcatccatgcccgcagaaatgttgcgagctcggaagatgctgggcgtggcaccaagccgctgtcagcgatatctacaaagttctttagaaaacgcgacatcgaagccaaagataatgaaaaaacaaccgggtccggcggtgatagcattgaaaagctcagatcaatgcttgctggcatcgatgatcagctcggagagcagtatgcacaggttttcggggggtttctaaaaagctcacgcgactttctggggctgggcgatttgaaggtcgtttcaaacatacaatcgcaatcgctgatcgaaacctcatcgcaggtcatatacggagaaaccgacaactttctccctgagcaccatagcggactcggatacttgaacatcctttatctgctgttgcagatcgagttgtgccgtgacgactttgccagacgaaacgccccgctgaacctcctgcttatcgaagaacccgaagcgcacacgcatccgcagatgcagtatgtcttcgcggacaaaatccacggattgatctcgcaaactccaaatttgcaggctttgttgacaacccattcctcccacatcgtttctaaatcaaactttgaggacatcagatatctttcacggctttctctggcggagcctgtcacgataaagaatttccacactgatctgagcgcaaaatacgaagagcttggagcggatgggaccgcgctttttcaatttctcaagcaataccttacaatcaactctgccgagctgttcttcgcaagcaaagcgatattcatagagggaactacagaacgcatcctgcttcctctattcattgagatgcatgacaaggaaaatgtcgatacaacatcggagagcgggctatcttcccagaacatatccgttcttgaagttggcgccaatgcgcgggcgttcgctccgttccttgaattcattggcgttcgcacattggtcattaccgatatcgacacgaccagagctgtagtcagtgaaaagacgggaaagacgagctattccgcctgtccagttgcagagtcgagccacacctcaaatgaaaccctgaagcacttcctttcagcccctgatccgaaggaagagaaggacttctcggagtggcataagcgtctggtagatggaacggcctcttcgggcgaggggcagtttatggttgcctaccagcttgcgcaggacggctaccacgcaagaagctttgaagacgctttcatttcgatcaacctggataaagtcaaggcccggaaggacactttggcgggcttgaaaaacagaggcgcgctggatcaattcgacggcgatgacttttattctctaacaactcagatactcgaaaagaaatccgattttgccggatcgattttatacttgacgcttgttgaaggcgagagctggcgagtaccggaatatatcatggatggcttgaaatggattcaccgaaattga

SEQ ID NO: 73931 - DNA, 1851 bp, Rhodobacter capsulatus YW2
ttggtttcgacaattcactcgttcttaggcgaggttatttcgcctttcaagaggaacatccaacaggtttttccaaagctcttcgaattacctgagtttgttgcccttggggatgatcactataacggcgatgaaacgctgaggaagaaggaggagcacgaccgtttcaagaaggcgcacggccagctcgagaaccgccgccggacggtactcggtgaagatacagcgaaggtcactggaaaacgtgaatacgacaaggagcccgacacatacaatgcgcagctcaatcggctgattggcgaggtcaacaaagaaatccgcgacaagctggcgtcgagacagccgagagagtttttctacaatgataccgcctttgacaacttcaacgatccttcatacggccatgatggcctgatcgcgttggcctgccatatgtttgaaagcttcccgttgttgggcaggatcgtatcggaccggcatgactgcatctttattgatgagtatcaggacacaagtgcagatgtcgttcgcgtcctactgcgctgtttgccagaagacgcgaagaccgtcatagggttgttcggcgactccgaacaggccatctattcggatggcataggaagcgctcagtcgcatatcgatgccaaagagctcattcttgtcgtgaaggaggacaattatcgatgctccccccaggtcattgattttagcaataaatttcggacggacggtctgaagcagggggtagcgctaaaatctcttgataacggaactcttgaaacccttgagagccgccagggcagcgtgaagctggtgtacgacttggcacctccgcagattgatacgggagacaaggcggaagaccggaagacaaataccgcatcgttcagaagagcacttgatgcgttggttgaaaagaccgcctctgattatccaggctacgttcagttgaaactgacgaacaagtctattgcagacgatgtcggatttggaatgctatatcggatcttcgatgatcgatattcagagccacgggaccgcatacgtaagacgcttgacagattgcagtttggagaactgattgacttagttgctctgtacaagagttttccgggcgacaggcgctcatataaccgtttgatcgcgaaattgcggaggcgaggattttccgttacgtcagtagcagataaggccaagctcgacaaaatgcttcactcgttcgagtcggaggatcgcgccgcctatgaggctataaagtatgccgccgaatgtggcttgataaagttttcagacagccacaaggcatttgttgatcgacgcaatgagcttttggcaaagcttgcagatgatgctgtctttaccgagtttgaagaactacaccggaacggccaccgtaccaaagctcagatgtcaaaagagatagctgccatgaatatgaagcacatcagtgttgagattctggagggggagtacgaagacagattaaatgacttaaaacagaagaattttcttgattcattgttttccacagagctccaactgagcgagatactggcgttttacgagtatgaggacggcgaaggcgatttttccacgatgcacaaaacgaaaggaacgggaattgagaatgtaattctcgttatcgacgagtatggctggacgacagagtacgatttcgtgagttgctttacgaaagaaattccagagtcaaggcgggaaatagcgtcaaagaaactcatttatgttgcgtgttcacgaacaaagacgaatctcgtatgtgttcgtctaatgaaaagtcaggaagaggcggatcagattgcatccttctttcctgaaactgtcaaactatag

SEQ ID NO: 73932 - DNA, 1785 bp, Rhodobacter capsulatus Y262; identical to SEQ ID NO: 71830

SEQ ID NO: 73933 - DNA, 1818 bp, Rhodobacter capsulatus Y262; identical to SEQ ID NO: 71831

SEQ ID NO: 73934 - DNA, 1569 bp, Varibaculum cambriense DORA_20
atgaaccatagccgattgcctgactgtaagttggacgttcgggacaatttgatacttgtaggtccgaatggaattggaaaaagctcgttaattagatgtctcgatatgctcttgggaaaaagtattcagcaactttattacagcatcagcaactctgattttcgggacgtaaacctccctctctgcatagaagcacagcttacgaacctcaatagtaacgaacgttccttttttccagacgaagtagaccttgaagacgagtcattaacggttcgattgaaagcgaatctcgacggtgaagatctcactgtcagccgtttctttccgtatggggcagcgaatacttcagtaggctcagagcagcgtaagagtattggatggactatgatttcatctgacttttcggcaaagtcgctagccccggggcgaaggacactagtagatgattaccttaaagaaatcgatgcttcgggtgatcaatataagttagaagcagcaataaacgcactcagcggagccattaatgattccactgctttcactggtgcactgaactcactggcttccactctaaatcaggcactggaaagcggagtggatgatagtaagctccgattcgtacctggagcagcaatcgagggaaaccttttgagcgatgtgcgattggagatggaggataagtttggctccatgcgagaagttaccgagcagtcggatgggacgaaggctctaatctcgtttgcaatattcggattaataaattcgagtggaataatcgctatagatgaacccgagacccatcttcatccatcagcgcagcgaaatttgattgaggtgcttcagtcttccggtaggcagctaataattgctacgcattctggtgctgttgcaagtgagtttagcccggacaacattgcagtaatgcgagagtccatgtcccccgctcagccaaaagttgggtttctcaaagggcgggacgaacaaaaaacgctagccagatggtggatcagcagccgaatcgagctactcacggctaggcatattatcgctgtagaagggcaatcggacagaatggtagtagagcgcgttgccgagctaagcggatatcacttgaaaagagatggaattgaaattctcgaggcaggtagttgcaatgagatgaaacccgttatgggtatttttggcgacaacgggtttggcaagcaaatcagtattctggttgatgaagatgctgaaaatgagacagccaacgagcaaaagaatctcacttcagtatctatgttcgtctcaagagccgatctcgaagacgagtatgtttccgcaatcggagcagatgcgctgtgggaggcattgagaaaatcgactcttttcacgccaaacatactgaagaactgtgctatctcagatggcgcagtcaaacctaatgaagatgagcttgcagagttttgtaggcataagaagaggaaaatctcctgtgctattgttgcctgcaagctgctggataagacctcggcacagcgggtttccagtgttgtcaaggtgcttcaaaatgcagtccaagtcgcatga

SEQ ID NO: 73935 - DNA, 1704 bp, Varibaculum cambriense DORA_20
atgcagtccaagtcgcatgaggtaactgccgagcagcagaagattttcgattacgagccttttgggatggtaatcactgcgccagctggatgcggaaaaactgaggcgcttgcctatagggcaagaggactccttgagcgatatgatttctcaggcaatggcaggagactgcttatagtctctttcaccaatcaggcacgagacaacattaacgaacggcttaagaaatatattggtgtgaaaacgctaagggaacatgtcaccgtctgtaacttccatggtttagcgtcacgaatcattagggcgcatggtcagcttataggtattggaagcgattggagtttggcgaattcagactgggtaggtagagagcttcgcgcccctggatacaatcgagaggatgttaatcaggctagactagcaatacgtgatgcaaagctcacgtgtttgaccgatgaggaagtgaagaaaaagctcgaaggtttacctgggcgggctggcaaaattgcactcagcatcgagaaaaagcgaatgaatgaaaagattatttcctatgacgaccaaatcagagtcgcgctgtggttgttagacgatcctagggtaactgcactttacagaaaccacttcttcgcggcactcgttgacgagtttcaggatttgacacctcaacagctgagattcgtgcaggcgctttgtggtgagaacatcacgtttgctggggatctggcacaaagcatatattcttttgcgggaggagacgtcacttttatacagcgggagatagccaaatcctctagtacgcagataaaactacttaagtcatttaggtcggctcctgaggtcctagatactgtcaactccttatcgtctctgacggggagtgggcatctcactaccgcctgtcccgctcactggaaatcgggtggggttgctggctcagcatcttttgaaaacgagaattgtgaagctgagtggattgtcgacatgtcaaagtctatcttggagaattgtccagaccacagaattggcatcatcacgaggacggggtaccgcgcattgaccttgaagacaaccttaacggagagtggagtcaactataccgattggggaagcgggatattcagcccagaggtagctagagttcttaaaaatatttgttctggcatacaggctaaatcatgttcaagtagttttgaagttttaccgtatattcagcagcaagcagaaatttcgccagtaagtcacacaagtgaacttgacgacgggtgtgcatggcttcttgaccagttttttcaacgcaatttcgatctatcggaaatacatgaaattgaaaagagaattgctgcgcgaagaggaaacgagactatcgcgactataggaggcgttcactgtctcacggggcacgctgggaaagggcaacaattcgactgggtgtttgtgcttggcttggaagaagggagtattcctcattatagagcaaaaaatcaggaatcgaagaatgaagaagcccgggtgctttctgtaatgatttctcgcgcgcgaatcggcgttttttgtacttacataaaagaaatacgtggtcacagaaagaaaccctcaaggtttatcaagttcctaaaaaagacacctggatttttgtgcggcaaagagagtgtcgaagtatggcgcagaaaagctgactggtcagcaatagcatcgatgtag

SEQ ID NO: 73936 - DNA, 2076 bp, Paenibacillus sp. JCM 10914
gtgaagctaaaagaagtttcgattcaaaattacagaagattcttagatacatcgctgtcattagctgatgacgtcactttgttggctggtgccaacaacagtggaaaaacatccttaattgagctcttagaaaatatcctaaataccgcgaaaacggaatattgtgtttctgatatacctgtggctctctcaaaagaatgggttgaccaagcttattctatttttattaaacatttcgaaagaaatgaagatagggagaagacgattcaagcaatagtaaatgatcttttttgtttagatgcagttccggggaaagacaaacttcttgtttcacctacagtagttaaaataagggttgattatgaagtcgatgaagatataagaaattttgccgattacattatggatttcgatcctgatcaatgttcaatatattttgaatactcatttgaggtaacttctgctacttttagccagtcactggacaaggactttgagaagttgagaagtagatatgaaaagctctctgaagaaagggataaaattacaaaggttggtttcttcaaagaaaaaatattaggtacatacgtttctagtattattgagaagtgttatttttctgataggcaatttcaaaataaaaatgaaatggaactttctcattttcgtaagttattcaatctatacaatatttatgcggggagaccattagaggatcagaatataggtcactcaaaaagtataagcaaaaatgtgcttgatcttgcacatcaagatgatgcatggaaagcatttctaggagcattaccagacaaaatacttcaacctattgaagatctagggataacagacattgtaagaaaggtttcggttgatggacttaccgagacaatttcatcaatagcacaggctaatggggggaatacaggaagtataatgcttgatttggagatatcggaggaaacgattagctctcttataaaccaaattacccatgccaagtatgatctagagggacattatctcaatgaaacatcacaaggattgggatacagtaatatgatttttattcttttgcagcttgaaagatacaaacggaatatcgacccatttctagttaacatttttattattgaagagcctgagtcacacatgcatccacaaatgcagaatgtttttgggaaatttctgaaaaaatactatcaagaaaaaaagattcaagggataataactactcattctagcgagatggtcagagtaactgagatgaaaaatcttagagttgcacgaccaataactcctttcataagcaatattttcgatttttcatcttttaaagaaagtgtgagtaaggaccctatacttgataatttctatgattggttttatgaaattggattctctgatatagtttttgctgacagagtcattatttatgaaggtgatacagagagaatgctaattagaaaactctttacattggatgagtttacagtattaaaccaattatatattgcatttgttcaagttggaggggcatatgctcacaactatagaacgctcatagagtttatgggaataaaaacacttatattgacggatcttgattatgctaaatcagcaaacatcgaaagccttataagagtctcggaaacaacaaatgcaacaattaataatttctacaaagtaacatatccagaagccaaaccaactgtaacagacttatatgagtggaaaaaaaataaggagaacatattatttgatgggtgtgcatatctaaattatcaaggggaaaaggacggctttgctcgtacgttagaggaagcaatgcttgctaagtattataatctaacggcatttgaagagaaaaaccgggaagattggatcaaattaagaaatgatgatgagttgaagtttactgttcctcaagaacagggacagtatacaatcagggatattgttgagcatagttcaaaaggaaaaacagattttatgtattcagtaattctaaacagtttaactaaagatatgctgccagattatattgaggaggggctggcatggttgaaggaataa

SEQ ID NO: 73937 - DNA, 1122 bp, Paenibacillus sp. JCM 10914
atggttgaaggaataacagaaaatatatatttggttaatgccccagctggtagtgggaagacaacaacaattaaatcaatgattttaaagcatctagttgaatatcccaatgacaatattctttgtataacatacacaaaccgggctgcagaagaattgggtaaggacatggatagtaatagagttcatttttcaactatccattcgtttttacacaattttttaaaaatttatttttcacatgaacagataatcaatttgtactttgagatatacggtcctgaaataatgaggagaatttccaatgacgatggggatgcaacgataatcagaagtaatgagagatatattgagaaaaatggaagtttgtcacttgatgttattaaggcaaatcttaagaccattcactacaatgaatctcaatttaactctttatattatggtggtttatctcatgatgatttaataacgttttctaaattagttttcgagaagtttcctgtaattaacagaagattgacgaaaaaatatcaacttattttcattgatgagtatcaagactcatccgcgaatgtattaaaattattttatcaagcagttcatgctacatcgacagagctatattttctgggagataaaatgcaacaaatatataggaattatgatggatcatttgaggataaactattaaccctaaacaaatcaatcaaattgaccaccaattatagatcagtgccttcagttattaatatcttaaacaaattatataataatagcttatacaagcaagcgcctgcagaaaaaagtttgaatacatcagttaatcacttgcctcgaattgtgctatgtgacgatgtgtcggagaagcttaggatagagaaacagaattacccagatgcgttattattattcttgcttaatcaaaaacgatttgactctattggagcaggggatctttatagaaaatacaacaatatggaacgatattcatttatacaacaatatagcgccgttgatgtgcttataaatgattcgctggataatccagatattttagttaaattattattcatggttaaccaaattgcagaggattatcgtgccaagagcttaggaatatag

SEQ ID NO: 73938 - DNA, 2139 bp, Gluconobacter frateurii NBRC 103465
atgcaaatgttcctttccggcggcaaggacagcttctcgctatacgatttcagttcgcacgtttggccggtgctggacgaaattggcgagcgcgtgggcgagatttcggacaacgatgtgccaagcgtctcgctcgacctttggttcgaagtaggggccgacgatctctacctcgttatccctattctgccttcgacagcgtgggccggaacgcttgttggcgtccgcatcgaactcgcgccgaagagcgttccggaattaatacagcgttatcgttccgcgcatgacgatggccgcgcaaaagcggcagcgctagacaacggccctggcgattatgtgccgtggccgaaatcgctttccgactatctgctgcaagaactgaagcgcgaatacgagctgcgctatttcgtgcttgatcacatgcaattcgacgcggcgttccaagccgtggcggggtacgaacccttgccgctcggcagcgatccggggggtgctgcagtgctaaagtccctaatcaaggtcgatttcttgaacgctcagcggcatcttgcggacccgtccaccgccaccgggggcggccgctcagaagatttgtcgaaacggctgagccgcttctatcaacgcaatctcgatcaacgtcaggacgatcatcaggcactcaaagcgctcttcgattctgaagtgggtctcaacaagcatctcgccgaagttttcaaagacacgttggagcggttggggcggttaggctaccccggtctcaacaacccgcgcctcgaaattaagtcggccctcaaccccgcatccatcatgactcaggatgcgcgcgttcactacatcgtcggtgggggcgcgcagcccatcacgctgcccgacacctacaatgggctcggcttcaaaaatctgatctatatggtagttgaggtgctcgaccttcaggagcgctggaaagccgaggaggagaagcgagcgccgctgcatctcattttcattgaagagcccgaagcgcacctccacgcgcaactgcagcaggtgttcatccgcaacattcttgagttgttggacataccggatgaggcgggtggctcatttgcgagccaagccgtcattacgacgcattccccgcacatcctgtacgaacggggtttcaaacccattcgctacttccggcgtgatcttatcgggaccgaccagattacggaggtgctgaacctctccgccttttacgcgcaggaaaccgagcatcgcgacttcttgcaacggtatctgaaactcacccattgcgacttgtttttctccgatgccgctgtgctcgtggagggcaacgtcgaacgactgctcctcccgagtatgatcgaaaaggcagcgaaatcgctgcgatcctcctgcatctgcattctggaagttggcggagcattcggccacaaattcaagtcgctgatcgaattccttgggattgtcacgttgataatcaccgacgtggacagcgtttccttgctgcccgccgatcacgcgggcgacgatgaggacgatgacgagcttgaggtcgaagttgaagcgccaacggccgaggcagccaacgaattcgatgaattgctgggaggcgctgcccccgcgccagccccgcggtacgggaagaagtgcctgccgagcgtgtcgggggcggtgtcgtccaatcaaactctcgtgaaatggcttccggcgaagcagacgatcgccgagctttttgccgccccggatcacgaaaaggaaacgccgcaggagggaaagacccgtgttcgcgtggcctatcaaacgcccgttcccgtcgcatggaacggtcaaaacgcagagcttgccggtcggactttggaggaagccttcgggcttgagaacgccgcatggtgccaaagcgtcgatcagagaaaattgggcctgcgcctgcgaggcgcggtagcggaccccgcggcgctggcgacgggattgcacaagcgtgtcagtggcgcgaagttcgacaaaacgaagtttgcgcttggtgtgcttaccgcgccaccggaacagtgggaggtgccagcttacatcagcgatggcctcacatggctcaaggcgcaggtcgatcttgaaactgaagccgagcttgacggggcgatgctcggtgagtag

SEQ ID NO: 73939 - DNA, 1527 bp, Gluconobacter frateurii NBRC 103465
gtgagtagtcgcgcccaacaacccgacacgcaggctgatttggatcttcgggattgccttcaggcgcagccgccgaccagcttcaacatggtggcgggagcgggctccggaaaaaccacctcactgattaaaggcctggcctcaatactcgcgatccacggcgagcgccttcgccttcgcaggcagcgcgtggcgtgcatcacctacaccgagattgcggcgggagagatttgggcagacgtaggaaataatccactcatccacgtttccacaattcacagtttcttatggtcgatcgcgcgcggttttcagcgggacattgcggcttgggtggcgaacaggattgaggagcggatcagcgaattgcagcaagcagccgccggtttcgggccgcgcgttcagcagaaaacgagggacaaaaacgcccgcgatattgtgcgttatcagcagcaaggtgaagccatcacaacggtcggcagcttcacttacggaaccggtagcgattacgccaaaggtatcctgggccacgacgatattatcaaaatgtcgtcgcagttgatgatccgtcgcccgttgtttcgtacgctcgtggctcagcaattcccgttcgtattcgtggacgagagccaagataccttcccggtcatcgtggaagcgctgatggcagttcaaaagcaagaacaggcgcgtttctgcttgggctttttcggcgatcccatgcagcgcatctatcccaccggcatcggtactattcctaaaccggacgattggcgagcaattccgaagcctgaaaacttccgatcaccctctgcggtgttggccctcgcaaacgccatccgccgcggtggcgacgatctggttcaggtgggggggcggaagcagaaagatggcgagcaggaggtgccggtcatcggcactgctcgcttgttcgtgcttccagcagacgaccatcgcgacgagcgtgtagcgcaggttcggacttggattgctcatgcgaatagggatgaactatggcagtccgacgcaaacaacgatcccgtcaaaatgctggtggtcgtgcatcgcatggcagccaagcggctgggcttcggagacctttatgcggcgttgaatgacagagcgccggaggctttcaagaacggctttctggacgcgactgcttggccgttgcggcctttgatttcgtttctcctccccattgcggaagctgtccgtgatggccgggacttcgatgcgatgcggttacttcggactcactcgccgcttctggcaaaggacaacctgaaaggggtaaatgtcgcccagaggctcaatgaactccgcgaggtgagcaatcaactggcggagttgatggggccccagtcgcaggcgaccattcgcgacgtgttggcgcttgccaaacaacatcggcttttcgcttttgatccaaggctcgccgcctacctcgaagacatggaagccgatgcagccgacgaggatcggcccgaagacgaggaaggggaaaaaagaggaagacccttcgaatga

SEQ ID NO: 73940 - DNA, 1755 bp, Streptococcus agalactiae BV3L5
atggaatttaaaaagttagtaattgaaaactttcgtaattttagttctattgaaattgacttatcaaataaaaatgtgatattcgggatgaacgattcgggaaaaacaaatcttttatttgcaataagatatttgttagatagaagtatcagaaataaaggttttattaaatcagattatcataaacatgatattagtaaacctataaaaatacagcttgaaattgatttgtctgatagggaagaggatgatgaagagtcactaaagtcttcacattcacgtttattaatttcaacagttgctggagcaagaaaaaatgcaagtttagatacattcctcatttccttggaggcgatgtatgatgagaaagagttgtttggaaatccggtattaagttggggctctactttagatgatttagtggaagtacctcaatatggtacaaggagtgatattgataagattttccaaatagtctatgtaaatcctgcgatagagttggatgcattttttaagcgaaatagaaaattattgttctcagatgatactaaaactgatgaagatgtagcacttgagaaagagattgagagtagcattattgatttaaatacaaatatttctaatctaagtttaattactagtgttcagtcacaactgacagatgcctataaaagctatcgtaaagaagatttagagataaaaatccaatcagaaatttcaatttcgggttatttggataatcttactccgtatataaattggaatggagacactcaaaattatccaacatctggggatggacgaaaaaaacttttatcatatgctattaatcatctgatttcagaaaaacagtacagtagtaaagtgataatttatctaatagaggaaccagagaatagtctgcacagatcagtacaagtatcactttctaaacagcttttcattcagaatatatacgaatacttcttcttaacaactcattcagcagaagtgctttatgaaatgaataatactcagctcataaagataactaatcaacaggaagcaacaggacattcttcatactacaaggtcccaagtgagttttcaaatttaaagaaaaaattaaatatttcattagcgcagtctatcttctatgatagagttcttttggttgaaggtccgtcagaatactacttattttcttctatttttgaatatattagccctgattttgaagcagaaggaaaatacttgttacaagttaatggtataaattttaaaccttatgcaaagctgtatagagaattaggtatagaattttttgtgaagacagataatgatttaaaggctagcagaggtgataaacatgaattttctccgatagggttcaatcgatgtattgagattcttgatgacaatatcgttgctaaattaaataattatcgtatagatttctcttcaaaggaagaaagaaatcagaatataaaagctaaaaaggaagaactgtatactatggaatattctttagtatctcaattgaattcaaagagactatatatatcagagattgatttagaaaacgatttagctaaggtactgtccgaaagtgagagaaatgaaatgaatgtatcagattttgtgaattggttacaaagtagtaagcagtataatatgttggaatatattgagggggaccttactccagaaattgcacacaaaattgtgaaatcagagtattttaaagttttagcggagtttttagactatgagtga

SEQ ID NO: 73941 - DNA, 1542 bp, Streptococcus agalactiae BV3L5
atgagtgatattgctacacgagatgaaactatcaaaaaagagttattagagtatcaaggaaacattctaattttagctaacgcaggttcgggaaaaacaacttttttagctgaaaagctaaaaagcgattctaaaaaactagataattatcaaaaactagcagcgataactttcactcggaacgcaactgaagaaataaaacagaaattagttgaaattccagaaaatgttgttgtatctactattgattcatttttagataatgagattattctccctttccttgatcaaaggtataaagttgcaacgtcgttacagtttagttttcagcaagaatacaagtttaataatttcgacattggactaagtcaaataatgcaaaatggtatttttgctacttatgataatccgaccgctcggcaaggtaagaattttaaatgtgaagttgctttagatatactaaaaaatattgtgtctgcatcagagtatctaaagtataaattcaattcactttatatcgatgagtttcaggattgtgatcaatctatgaatgatttattcatgtatttaaaagatgaactgggaattcgattatttattgtaggagatgataaacaatcaatttatcaatggagaggggcttcgcctagatatattaaaaatttatgggaaaacgaaaatgatttaaaaaaagagaggtttattggtaattttaggagtttacctaaaattgtagatttttcattagctctaactccagaagtaaaaattgattctattaatgaaacaggttctattttatatatagagactaagcaatttgctttaaaagaagatgttatcagatctctggtagataatggtgatataaatttagatgaaaaaaattattttttaattggaaacaatcaacatattgaagaaactgtaacacaattaggtggaatattcccaaatgaatttgattatgtcagaaaaaatccttttatagagtgtaccaatggtcgttttttacaatctttagctcaatattattttcttgaaagtttttctgagtatgatgtgttgaacaatctttttcctgattataatgacgattttaggaaaggattattaaaaaaattgaaaatcttgcgtcaaaatcctgagcgattacttatcgaagatatagcgtcatatctaggtgtacccattacacaatttggtgataaattagaaagtcaaatattacttgaagttttaattgatgtagagaatagaatcttatttgatactagttcattgaaaaataacttattaatgacaacacataattcaaagggactagctgcagatacggtgataatttttgttgaatatttgattgacagatataaaaatacattaaagttcgaggaccattatgttgcaatcactagagcaaaatcaaaaataattcttattgataacaagacaaactatgttagcgaaataaatagattattatgcaacaataatggtaatttttcatttgataatttcatagaaagaaggaatttatga

SEQ ID NO: 73942 - DNA, 2139 bp, Pseudomonas sp. FH1
atgcacatttccaaaatgactttggtcaactaccgaaacttcagcaatacaacgctgaagtttcagcggggcgtcaacaccatcatcggcgagaatggcgcaggtaagtccaatatcctacgcgcaatccgtctactactggatgacaccatggtgcgtgccgcctatcgactggaggaatcggacttctgccgatcgctcggcgaatggcgaggccactggatcatcatcagtgttgagttcgaagagatcagcgctgacgaagccgtgcaggcgctattccttcatggcacggctgcgctcgaaggcggaccgctggcgaaggccacctataacctcatcttccgtccgaaaaaggagatccggctcaagctggctgctctcgatgtttttgatgatgaagagcttacgagaatacgtaatgccatcacgattgacgactacgaaactgtgttcacaggaagaagcggtgccgatttcagtgacccctccgtctaccaatcgatcgtgggcgatttcgatacgtgtattttcagtgccgagactgaatttcctgagataggggctaaagtccccggatttctctcggttacgaaagaagtgtcactgaccttcatccaggcccttcgggatgtcgtggccgagtttcacaacaaccgaacgaacccgttgtttacgcttcttaaaagcaagagcggcgagatcgatccagtgtcgatgcttcccataaccgagatggtcaggaacctgaatgcctctatcgaaggcctcgaagacgtgcagtcggttcgtaaccacattcgggaaaccatcaaggatgcggccggagaaacctattcgcctgcttcgctttcgatcaaatctgacctaccagacgaagcagaaaaattatttcagtcgctgcgcctcttcgtcggcgagaccgatgacgggtatgagggtggtatccatgagctgagcttgggcggagcgaaccttatctacctgacgctgaaactccttgagttcaagtatcagcgcgagaagcttgccattgccaattttctgctaatagaggagcccgaagcgcacatccacacccacatccagaaaactctgttcgaccgtatttcctacagcgatgcccagatcatctacacgacgcattcggcccacatctccgaagtgagcaatgtgagtaacgtcaacattctgggacggcaaggctcatattgcgaggcttatcaacccgctacggggctcgagccatcagaggtgagaagcatccagagatatctggatgccgttcgtagcaatttgctgttcgctaaaagcgtgctgctcgttgaaggcgatgcggaggagatactgatcccagtcttggtgaagaagctgctagggctgagcgttgatgagttgggtattagcgtcatcaacatacgcagcacggggttcaaaaacgtcgcggtcctttttcacgacctccgaatccgcaagcgctgtgcgatagtcactgaccttgataccaccttctttgatgtgacgccgcagccaactgaccttgaatttctggcaagcaagaagcgcaaggcgataggttcccaaaaagctggcgccgaacgcaaggttggcctcgatgcctttgtcgctggaaacccttggatctcggtctactatgcaccacacacctttgaagttgacctcgtgtcagcgggcaacgaggaagcgtttgttcgagcagtgagtaagatctataaagcgccgcacactatcaatgaagcggtggaggcccttcgatcaggtcagcctcatctggtaggttttcgtgcactgttgatggctgagcatgaagggaaaggctggtttgcaatcatgctcgccgaagaactggaccatcaggtagcgatccctccctacatcctgcaggccattcacttcgcacatgggcacatatcccctctgctgctcaccagaatcctacactatcgagttgcccgccaaatccatgccgatccctcagggcaaccacgactagcactcctcggggggcaggttgagcgcttccaacgcggcgaaatcgatctgatgttcctaaaagctgcggtcgcccttgcgttaccaggcgatgccattaattcgttcatggcgggcattgcctaa

SEQ ID NO: 73943 - DNA, 1785 bp, Pseudomonas sp. FH1
atgtttgcctgggatccccgtgaattgaacgcggagcagtcagccgcagtggaagaaccttcgagcgtattcctcatcgcatgtcctggtagcggaaaaactcggactttgacctataagatcgcttatgagctttcgcggagcatggacaagcggattgtcgtggcgattacttatacgcaccgcgctgcagatgaaatccaggagcgcatagaagatctcggcgttgacacgtcaaagctgtggatcgggaccattcactcattttgcctcgagtggatcattaagccatatggcatctaccttccagaactttcccgcggctatcgagttttagacaagcacgaccgcgaactcatgcttgatcggctatgcgcgccctacgcaaagatcacccactgggattgcgattactacttcagcgaaacgggctatcacctaggctgcaaagatgtttggaagcatgagacactccataaaattcttggcgagtattttcgcgaactcacggacgcgcgtcagatcgatttcgagctgatcctttggtatgcgcagatactaatgcgcgatcaaaagcaaattgcatcgattctcgcttcggtcttctcatatgttctggtagacgagtatcaggacacgaagcaaattcagtatggtcttcttactgctattttgcgtgccggagcagggcgaacgaagaccttcatcgtcggcgatccgaaccaagctatctacggctcgctcggtggctacgcaattccggtggctgattttcgtgctaaagctggcatcccgataagagaaatggcacttacccgaaattaccgttcgagcaagaggatcatttcccatttcttgaatttcaacgtttatccgacatcaatcgagagcgcaggatcgaatgcgtcgtttccgagcaaggtttcgtacaaccagcacgtaacactccccgatttgcatgacgagctagtacgactgatccaggcaagcctcgctgcagggtatccacctgaggagatctgcgtgctagccccatggtggattttattggcatcgacgacgcgtcaattagtacggatgcttccggatcaacagtttgacggccctggtttagtcccctttagcaacgatatagacaatttctggttcaaagtttcgaaaatcatcctgactgagtcatcgccgaagatgcttgttcgccgcatgcgatgggcaagagatgtgatcagcgacttggttgatcttggcgttgatacatcgcgtctgacgcagcggctcctgttgagggaatgcaacgcaatttcaatctccgagatggatgggattgcctaccttgaccaagccttcaccgcactgcttgaacgactcggtgtagccttgaatagtttccccgcattggtggagcatcgcgatgcgttctttcgcagctcacaatctcggatcgacaggctccaaaaggacggagccccgtacatcaacgacatctctttcttcaggaaggtatttcgcgagcggacaggtatcaccgtttcgacgatccacggtgtaaaaggtgccgagtacgatgtggtcatcgcgttcggccttcttgaggggatggtgcctcatttcactgaggcagcaagcttggattccgctaacaaactgctctacgtcgtaggttcccgtgcccgcaaacatctacacctgatttctgagagcggacgtccccaaggtcgctatgggaactatgcggctacagaggccctattcgcatgtgcctttgactacgacgcagccgagtag

SEQ ID NO: 73944 - DNA, 2139 bp, Pseudomonas fluorescens FH5; identical to SEQ ID NO: 73942

SEQ ID NO: 73945 - DNA, 1785 bp, Pseudomonas fluorescens FH5; identical to SEQ ID NO: 73943

SEQ ID NO: 73946 - DNA, 1920 bp, Pseudomonas fluorescens FH5
atgaagctgtgcagtctgcggatatccaatttccagtcgtttggccctcaacctgttccgatcacattcgaagacataacctacctcttgggcccaaatggcgcgggcaaaaccgctgtcctccaagcgctctgcaggctatttgccttcgagcctggactgcgtcgcgtccgcccttcagactttcacgtcccggtgggcctgagcgatgctgagggtggcacgacgctatggcttgaggccgagttttcctttccagagacagctgacgatgaggacaacgacacggttgctccgcacttcgatcacatgcgtctccaggctacgggcgatgtaccgcgggttcgctaccgactcacagccacagtcgacgacgaaggtgatgtggaagagacgcttgtctatgtcacgcaggcggatgccgatggaaatccaatcgtcagttccatcgttcccaagcatcagcgcaaccagatccaccttcattacatcccggctcgtcgtgatccatccgaccatatcgcctatggcgcaactgcgttgctaggtcgtttgcttcgtgcaacacagtggggtggcgacagaaatacggtcaaggatttgaccgaccaaattaccagttgcctagccggcaatgcttcggtcacagcgcttgggcaaagcttaaatgcctcatggaaaggtctccacaaaggagctttctttgccgagccgaagctcactttcgtcaattctgacatcgagatgctgttgcggcacatgtcggtgtcattcacgccgggccatggtgagaatgaagtcgactttacacgactgagtgacgggcagaaatcaatgctctacctctcacttgtgttggccgctcactcgattaaccgtgacgtgaggtcgggtaaaaatacggccattgatccagcgaagctgaaaccacccgcctttaccatactggccatggaggagcctgagaacagcctgtcacctcattacctgggccggatcgtgaacgccctgaaaggatcaatcggtgtggatgcgcaggccctaatcgcgactcacgcgccctcaatgctacgccgggttgatcccgagaatattcgctacctacggctcggatcgaaccggtgctctgtcgtcagcggcatcgcgctgccagccaaagaagatgtcgcacataaattcgttcgagaagcagtccaggcttttcctgagatctacttctcacgtttggtcgtgctgggcgaaggtgacagcgaggaaatcgtccttccgaggattctccaagctaaaggggcgcctgtcgacgagtccgcagtgaccatcgccccgctaagtggccgtcacgtgaatcacttctggcgtttactttcccaattgggcaccccgtacatcactctgctcgatctggatctcgcaaggtaccagggaggctggggacggctaaaatacgttaatgaccagctgtcgctttttgagccttccaaggttttgccctatacattcccggcctgggatgacgcaaatacccgcattagagaaaaaaatgtccccatcactgggtcttctgagacggtcttcgatcatctggaggctagaggggtatttttttcggcaccgcttgatctggacttcgcgatgctcaccgccttcccaaaagcattcaacgctattcctatggcggcgacaccagaaaaccagaaggcggtgcttggcaaaagccacgaaggcgccgatcaatacactcctcaagagcaatcgtggttcgatgcctaccaccactatttcaagctcaacagcaaacccgcagcacacctctcggccctttcgagcctctctgaccctcagcttttggctggcctcccacccgttctggatcgtcttgcgaatgcagtcatagcagcgttagaggagtcaccggagtga

SEQ ID NO: 73947 - DNA, 1683 bp, Pseudomonas fluorescens FH5
gtgatccaccctgaccgctggatgcactcacctgggctcactctggaagcgaatgcgtggcacgccattaaggacactgagcactcgctcgtccttctagcagggcctggcgctggcaaaactgagatactggcacagcgtgcggactttctcctgcgcacaggcagttgccggtatccaaagcgaatcctagcgatttccttcaaatccgacgcgagccgcaatctcaaagaccgtgtaagcctgcgatgtggctgggaacaggccacccgattcgacagctttacgtttcactctttcgccaatcgaatcgtcagtcgctttcgcgttttattaaccggcccagacacgctcaaacccgactactcgattggcaaagaggccatcccaggcgagcagatcaccttcatgcagctgcttcccatggcgctcaaaattctgcgtatgagcaagatcgcccgaaacactatccgtcagacctacgctcacgtgtttctcgacgaattccaggactgcacctctgatcagtaccaactgatcaaacttctgttcgagggaacgccggcgcttctgacagccgtgggcgacaccaagcaaaccatcatgggttgggctggcgcactgaatggcatattcaagctttacgccgacgacttcgccgcccgaccattacggctctaccgaaatttccgatccaagccgcgactgctccgcatgcagaacagcgtcatccgggacatcgacccttcagccctcatgcccgacgaaatgatcgcgggagacgatggtgtgatccgtgcggggaatttctcctcgagcgcagctgaagccgtttccctggcgaacgttatccagaaatggattgaggtcgaaaatttgcgaccagcccaaatcgccgttcttttccgcggtgagatccatttgtatggcgaagaactgatggagcagctggcggctcggaacataccctttcgcaacgagaatacccttcaggatttgctcaaagagcctgcagccaggctgatgatcgactacctgacctgcctctacacgcgaggtgccaacaaggcatggtctcggctgatggatctcttcgcgcccttcgacgatgaaggcaacagcgacagaactcacaagtcattcgagcgctgttacaagcagcatcagaaacaggtgagagcggctgcgaaaacagcggcccctttcacagattggtgggagctggccaaggcttttttcgataccttgggccatgccgtaatgacgactctttcttctgactacgaaaccaagcgacgcctgaaggaaatcatccgcgatacccgtgaccacatcacttcccttctgcaggtagatcccgacctgaccagagccctcgctcggttctccgacgacaacgctgtccgcttcttatccatgcataaaagcaaaggattggagtttcattcggtgatcattctcggagtcgagcagcaatccttccgtggcaaaataggagaagaacggcaggtcttcttcgtcgcagtatcacgcgcgaaagatcgtctgatcattaccactgcgaatcagagacggcgcccagagggaatctcggcgggcaaaagatgggatgtagcgagacagccgcatgtggccttcgtcacttacgtcactgagcacttgtcgcccaaacagccgcagtga

SEQ ID NO: 73948 - DNA, 1953 bp, Pseudomonas sp. FGI182
atgaaaataactaaaatttctgctgttaatttccgggcactccagaatgtgacactcgatctgcgggatagtctatcgctgcttattggtaggaataatagcggcaaaacttcattgcttgtattgtttgagaagttttatgagcctgggatgtcgttcaattatcatgattttccgttagcggtgcgtaaagatttagcggcaattgaccacaaaactgatgtattgccgttatcgataagcatgaaggtcgagattgaatatattgaaacagatagtttaaggcatctgtcagagtttatgttggatcttgatagtagcaataacaatgtaaaaattttgtttgagtgtgttgtaaataaggacttgttgctgagggatattgagcagttcgatggggagcgagaaaggtttttgagaaaaaacctggataagtatttgcaggtcaacgtatacgcatatgccgatgaagaagatcttttacttgaaaaccgaagtaggttagtaaaaaaagaaatagccacggttagagatctgataaactttcagataattcatgctagacgagatgttgctagtagcgagggcggaaagaaaatgctctctaagttgactacgcaatatttcaataaagcaaacaagaatgtaacagatttcgatccgatcaataacttgcttcttaaaatcgatgagagccttgaaagtagctataaggatttcttcgagcctttcctgaaaacctcaaaggcattcctggggattgaagatattaaggtcgtatctaatctcgagtccaatgaagtgctggagaatagttctcaagtagtttacggggatcgctctgagtatcttccggaaacattcaacggcctagggcatatgaatattctttatctcttgttaagcgtagagattaagaaggagtcatttgccaagacaggtaaaaatataaatcttttgttcatagaggagcctgaggcgcatacgcaccctcagatgcaatatgtttttgctaatcaaataaaaagcatattgaacgagattgagaatattcaggcggtaatcactactcattcgtctcacattgtatctcaatgcgatttcaaagacattagatatttgcagaacttagatggctgtacaaaggtgaagaatttctattcggaattgaaagccaaatatggtaaagacgaagattcatttaagtttctagagcagtatctgaccctgaactcttgtgagcttttctttgcaagcaaggttatatttattgagggggttacggagcgaatgttgtggccgtacttcgtggagttgtttgataaatcgaaaaatcaaagtaaggatcatatttcgttgttctcccagaatgtcacaattctggaagtcggtgctaatgctaaggcattcaagcatttccttgattttttagaaattaagactctggtcataactgatatcgatacaacgaaaaagactgttgatacttccaaggtaaaaccaaaaactatctatccatcatttaaagttttaggtgcggatcataccagtaacgctacgctgaaacactattatgaagcgcccgacttctctgaagaggctaagttttcaagctggtttgaaaagttagtcgaacacaaacttaagcattcgtacccgaaaatccatattgcttatcagaaacaagaagaagggtaccacgctaggagttttgaggatgcctttgtgcacctaaatagggacgtaataaaaaagaaaatcgataaaataaatgggctaaaaaatacacacgaatttgatggcgcgcttgatgcgtatgatctgattgaaaaagttttagataagaagtcagcgttcgcttcttctctattgtacctagcactgacagatgatgaagtcacttggcgtatacctgcttatatcgtggaggcattagaatggatatcggaatga

SEQ ID NO: 73949 - DNA, 1785 bp, Pseudomonas sp. FGI182
ttgcacgctattagcacgattcattcgtttctcaacgggattatcaactcctttcgcatagatttgcataaagtaatacatgagcttttcctattgacagaatttagagtagggcaagccatggaagacgaaaaggagtataagaaacgcgagcatgaacgttataaaaaggcctacggaaaatatgcagataaggcataccacatcctcaagattaaagaggacaaggtcttggggaagccaatgtatgacaaagatccgcaagcggcaaatgctgtattaaatgagaaaataaagcagcttaacataagtgtgcttgaacacattaagaaaacctcacctcaaaaggttcgttataacgaaactgcattcgatagctttcgcgatctaagctttggtcatgacgggcttgttaagttatctgtctcgttgatgtgtgaaagaaaaaaattaagaaaaatattggccgataagtatgattatatattcgtcgatgagtatcaagatacttctcctgatatagtcaaggcgtttcttgattttgtggtaaaagatcaagatatagtatttgggttctttggtgactcgatgcagggtatatatgaggatggtgtcggagacttagattgttatgtacaagcaaaagcgataaaaaaaataaacaaagaggataattacagatgctcggagcaggtagtcaagatcattaacaacctcagggacgatgaactggaacaaaatgttgcattcaaaactcgggagaatggagatttagaaacactggcggaccgccagggtagggtcaagctcgtttattcagtttgcgacgataagcctacccagcacagtccacgcgaagacaaggagttataccttaaaaagcttaataaattgattgaagtggcgcgtggtatcgatagctataaaatgttgatgctgacaaataaggctgttgcttctgaggcggggttcagtcaattgtatgagatatttaactccaggtttggacaggcaacaaatgagaatttagaaaaattgttggcaatatgccattttgctgagttatatgagctgtacgaagattatgaaaataaaagatatgcaaaggtcatccgtttcgtaaaaaaatctggcttcgtgttggattcggtttttcacaaagatgaattgttggccgcgttcaaaggtgtttttgaattgaactctccagcgcatcttgcaatacatgaagcgtttaaattgaagctgctgaagcagtcggattcatatgaacggttcatgagaagaagagaagaatttttcgaaggtattaaggggaatccaagatacgccgctttcaaagatcaatatgtatccgggtttgatagccttagcaagttaagtaaaactggatttgatattgatgagtatgagtttggagatttagagcgtgatgtaaggcgagagctgttttataatgaatattttggagggaaaataaccctgggcgaagtgtttaagtactatgattatttgtcggagaaaactaatttcataactatgcacaaaacgaaaggttcggggatcgaaaacgttttggtggtagcagatgagtttttttggagggattataagtttggtaatgttttttcgcaggggaatgtaacttccgagaatagaaagattatgtatgttgcgtgctctagagctatcaagaatttgacgtgtgtgcggataatgagcactgaagaatcctcaagtattaaagattatttcaatgagatagaatatgtgcatttggattga

SEQ ID NO: 73950 - DNA, 2232 bp, Phaeobacter gallaeciensis DSM 26640
gtgacgcagttgtcttgcttttgtcagcttggtgacattcgcgccgttgcgagcatcagttttgtgtcaaccggcgacgaatttaccttcccgaacacaaccaatgattgctatcatcttcgcagcttacagggggactggatgcgtctaggtagtatatccattcgaaattttcggcgcctgaatgatgtgtccgttgatttcgaaagcaaggaaactgtttttgttggcccgaacaacagcggcaagacttctgcgacggctgccattcgaagctttctcgggaaccgggaattcaagattcatgacttctccattctcgcaattgcctctatcgacgcatacgctccaaggaacgaatccagcctacctcaaatagaacttgatctctggtttcacatcgatccggactcaattgcgttcggtcgggtctttgccctggcaacgagcctttccgctgatttctcggaaatcgggatgcgctgctcgttcgctgcggatgacgcagcagaactctggaagcattacgatgcagctttcccgacaaaggaagacggtacccgcaagcgccctttgagcttcttccttggaatggaaggcaacttgaaaaagtattttggcatcaaggtgtcctcgctggaaaagctggaagaggaattcgtggcaacggcactctccgcgcaagaaggcaagaagattgtccattctctgctgcgcgtcgatttcgttgatgcccagcgaaatattgacgacgagaatgccgcgaggagcaacagactgtcagacgcctttgcgacgtattaccggagaaacctggagcaggcggaactggccgaagaagctgtagcgatcattgaacagaataatgaaaatctgactaggcactacgacgaacgcttcagacccctgatgacaatgatcggaggtcttggccttccctccgacaacgaccgcgcgatgaaggtcgtttcgacactcagttcggaggttgcgttacgcggtaacaccgaactcttctacgtcgatgccagcaccagccatgagctacccgaggcctataacggactgggtttcaagaacctggtgttcatggccattcaggtcgatcatttttatcggcaatggctcgcgaccgaagacaaccgtccgctgtgccagatgatctttatcgaagaaccggaagtgcatttgcacgctcaggtccaacaaacattcattcgccagatgtgggacgtgctcaccgctgacgcaccagaaggcgaaagcaagccccagctcacaatcacgacccactcgtcgcacatcctggataccgtggatttctcaaaaatccgctacttccgtcggtgccatatcaacggtgaacaggatggagtgacctatcagggaacgaccgtgcacagccttcgccaatttcaacctgagccacttgaattgggcggcgatatgattgaaccagaggaatcactttcctttctcaaaaaatatctgagacttacgcattgcgacttgttcttctccgatgctgccatactcgttgaggggtctgcggaaaaactgcttttgccgcgcatgattgacatatcggcgcagaatctgaacaaaaagtatctgaccattctggaggtaggtggcgcttatgggatgcgcttcgccggattgttggaattcctcgaaattccctatttggtcatcaccgatatcgactccgttgatcccgcgagaaaccgggcgagttgcgtcgctacccatccgggagccgtttcgtcgaatgcgactctggggtatttctttggagagacgagagtcgccgaactctccggcaacacctttgacgattgtctgcaagctgaagggatgcgttttgtcgcctatcaaaagccagtagaagttaaccgtcaggacaatgctcaaaccttccacgggcgaacccttgaagaagcctttgtcttcgaaaacctcgaccacttccatgccgatggactcagtatcggcattgacttgccggatggtcgagccgaattgcaagaggccgtctggcgacgcattaaaagcgatactttcaaaaaaacagaatttgctatggatgtccttgccttcgaaataccggcaggcggggacgaagaagcgaatgcgggagagaaccgggactggaatgttccccactacatcgacgaaggcctaaaatggctggagacacgtctctcccaaaacctgggagccggcgaatga

SEQ ID NO: 73951 - DNA, 1845 bp, Phaeobacter gallaeciensis DSM 26640
atgacggcagaactcaagccaactgaggccgataagaaaattgctgagtgcatcgccaaggacgtttcattttcggttatcgcaggcgctggttcaggcaaaaccacatcgctcgttgaagctctgaaaggaatccagaggtcccgtggaaacgagcttcggaaaaacggtcagcgcgtggtgtgtatcacatacacaaaccgtgccgttggagtgatttcgtcgcgtctaggtttcgatgacctcttttacgtttccactctgcacgggttcctttgggcggaaatcgcgcgcttccaggatgctattcgggagacccttcgtgatgcgatcgtcccgcaacatatggaaaaggcccgcgagaaagacaacggggggacgtctcaggccgctcaaaaagcgaggaaagaccttgagcgcctgactgcccaacttgctgcgctaaacgcgcataaaccgccgatatgctacgaagaaaccgttatcagcgactattccaaatgtgtcctgaaccatgatgatgttattgacgtcgcggcctatctaatcacgaacaaaccactcttgcgcaaaggcctcgggttcaaatacccctacatctttgtcgatgaagctcaagacaccttcccgcaggtcgtcgaggcgctcaatgctgtgtgcgcggacgaaggtttaccaatcgtcggatatttcggcgatccgatgcagcagatttacgataagcgtgccggaggttttgccggtccaaaaggctccgaaaagattccgaaggaagagaattttcgaagctcaacctcggtgatcgaccttctcaacaacttcagaaccgatctgaagcaggttccgggtgggaagaactccgacgttaagggcagcgtcttgattacgatcgcgcaggctcccgaccctgccggtccacggaaaacctatacctctgaacaactcgatgaggtaacggcgaagttcgaggaagccgttgaacaatggggatggaccgatattactcctgtaaagaacctttttctggcacgccagatgatcgcccggaggctcggattcgttacactgcacaagctctttacaggtgactattcgtcgtccagatcccaatccgactatgaagacggcacgcactatcttctcaagccctttgtggacggcattttttctttggtcgatgcatcccgcaacaactatcctaaaaagctgattgaaacactccgaagaataagccctgcttttgacgacactggagcgaacaagagcaaaaccctcaaacagatgctcgaggaagcctcaaaacacgccgctgctttggcagaaaaatgggaaggcaatacggtcaaagaaattctggaatactgtagcgcgaacgcgctttatccaatttcggaccgccttgcaggtcagttggctcgcgctccccgccaagcttatgactccggcaatgaggatcaccaaagggaaaaaggagattggctggctgatgaattcttcaagctgaaggctgacgaactcgaaaagtacatcgaatttctggatgagaattctcctttcagtacgcagcacggctcgaaaggcgaagagtatgaaaacgtgctggtcatgatcgacgatatcgaggcagcctggaatacctacagcttttcgaaagttctgacccctggtgtcgcgggcaatccgaccgaccggcagcaagaacttactcaaaagctggcttatgtctgtttttcacgggcggaagtgaaccttaggattttgatgttttcgaaagccgcggaagcggccaaaaaagaactggttgagcgcggtttgttccaggacagccaggtttcaattttatag

SEQ ID NO: 73952 - DNA, 2370 bp, Burkholderia pseudomallei NCTC 13178
atggacattcccgaggtttctgctcattcctccgctacggacccggcgtcgagttccgccccaagtgcaccggcagtgccacccgccgaaacagtcgcgcttccgggcgattccccgatccgacttgcttgcgtcgaagtctgcaacttccgacgcttggcaaagacccgccttgagttcgatgatgccaccactatcttggtgggcgctaacaacagcggcaagacctctcttctcacggttcttcgcaacttcctcagcgactcgccaggctttcgcgctttcgacattagcctctcgcagtgggcgaaattgcggcaactgagcgaactctgggaggcgctggacgaggaccccacgaccgaatcaaaggatgcggaaaaatgggagcagcagtatcggcagcttctaggttgcatgccgttcattgatctttggttcgacgctaaggaaggcgcgtacaactatgttgctcccttcattacatcgctgaaatggcgtggcggtgcagttggcgtgcgggtacgactcgaacctgtggcagactcagatgagttgcggaagctggcttggcgctaccgagaagcgcgttctcccgtccggacgcttccgaaggatggccacgcgtggcctatggatctgcttgattactggttgaggtactccgcggacctgcgccgcattgctgtttaccgcctcgaccctgcgaaggggcccttggcaacggagcagtgcaatgaactacaagaactgccacctgattcgcagccggtcgaactgcaactcctgcgcaagctcgtacgtgtggattttgtgccggctcaacgggggcttggtgcggaagacgacgagacgagatccgagtcggcgggcacgcgtcccgggctgttctcaagccagcttctgaaatttgcccggcaacacctgaacgtcgctccatccggccatggcaatcgcgaggatctggttgcagctattgcaagggctcaagcggaacttgacgattcgatttacaaggcgctccaaccggcgatggaggacgtggaggttctagggtatccgggactgcatgatccgcaacagcttcacttccgtacccgcattcagactgccgaccttctcgcacacagcaccgcggtccagtatcgcctggacgagacggcggtcgacgagtcgttgccggagcattctattgggcttggctatcagaatttgcagtcgctgagcttcatgctcgtgtcattccgagccgcgcgcctcaatcccccgcagggctctccagcggcggttcaccttgtaatggtagaggaacctgaagcccatttgcacgttcaggttcaacgcaacttttcgtcgaatgctcacgaactcatccgcccaaaagagctcgtgcatagcaatcttcgcagccaattgctaatcagtacgcactcaagccatctagcccacggggacagtttcacgcgtctgcgatatgtaaaacggatagcaagtaccggtgcgggcgttaggcccagtagcgaggtcgtcaatctcggcgacgcctttggcgatgacattcaaaccaggacgttcgccgagcgctactttcaggtccaacacacagacctcctcttcgcggacgcagccatttttgtggagggaactgcggagcgcatgctggtgccgcttttcatcgagcgcgactttcccaagcttgccaaaaagtacgtgtcgttccttgatatcgggggcagtcacgcgcaccgcctcaggccgctggtagagcggctggggattccaacggctgttatcaccgacttggaccctgtggtaccgaccacgagcaaaggcgggcgggttgtgcgagcggcggtacatatcgcaggccaagcagacctcgagtgtgggaatgacacacttacgtcgtggcacccgaagctagcggatttccacgcttatgcgaagccaacgtccgcacacttggagtgggtctccgactcgggcgtaaaagtccgcttcgcatggcagcttcccgtcgcggccgcaagcgatcaatggccaagctcgttcgaggatgcactcgtcctgacgaacatcgattggtttaaagcgttggacgaagagaaggattcggtgtccggcaagaagaaggatcaccgaggcactctcgggaaggtgataggtctcgtactcgaccactctgaccataccgagcttcttaaggaactccacgcgatgctgcatgggaacttcagcaagggcgatttcgcggcaacactgtttgaacggttgaacgctgggcaagccttggcatgtcctacatacatcgccgacgcactcgcctggctgagtggtcaacttgaagccacagccggagagaccgagtga

SEQ ID NO: 73953 - DNA, 1731 bp, Burkholderia pseudomallei NCTC 13178
gtgcgcgtcatcacgtataccaacaacgccaccgctgtcgtcaacggccgacttggcgagaattacctgactgcggtgtcgaccattcacgccttctgctgggaactcatcaagggtttcgacgaagatatccgagacgccctgctcgctcgcaacgccgaaagccttgcgtctgcgaaggccaaggcattgagtaaggccaagggggaatctgatagggaccgggagaagtacgcagagatcgaagcgaaggctgaagaaatccggaaaattgatgcatttatctatcatccggaccgcaacacctacgggcaaggcgcgctctcacacactgacgttctacatgtgacagcttggctcattcgtgagcgaccaacgttgcagcgcatccttgaggaccgacaccctctcatcctcatcgatgaatcgcaggacacgatgaaaagtgtgcttgacgcgttgttcgagctctcgatgagccgtcccggacacattacgctcggactcctgggcgaccatcggcagcggatttatcccgacgggcacgacgatctgccctcgcacgtaccggaggactgggcacgccccgcgctgcagatgaaccatcgcagtcagcaacgcatcgtcgagctcattaataaaatctgggacgcggatattgaaggccgtactcagtccaaaactggcgtgcctcagcattcccggacggagaaaaacggcggaaccgtgcgccttttcgttggcgataccaagacgagcacggccgagaagatcaggagggagtcggattgcgccctcgccatggctgcggagactggctgcgctgcctggcaagatggcacgcgtggctacaagacgctagcgcttgagcacaagctggccgccaagcgcggcgactttttcgatgcgtatagcgcgatggacctgctggacaaggacgccgcgatgcctaagagcaacggtgagcggactggtcccgcgatggttcggccgctgcttggcccaatgctcgaacttgccgagtgtctgcaagcagacggttcgctgaacgagttcgctgctgttgacgtgctgcgccggcacggaacccttgcaaagctgccggagaccagcgctgaacgtcaagctgccttggataagctccatgcggcagtcgtgaagttcgcgggcgtcatctccacgccggaagcgacggtccgagatgtattggggccggtcctggaaggagggatattcgatgcggacccccgtctagtccaggcatacggcgatacctcgcctccaccaccagaacccaaacccagaagcaaggaagcaaaggaagatcggcgcaggcgcggatggtgcgctctcttcggcgcgccttggcaacagattgctcggtatcgcgcctatcttagcggagacgcggaactcgcgactcatcaagtcgtcaagggctccgagttcaagcacgtgatggtcgtgatggacgatgaggaagctggtggctcgctgttctcttacgataagcttttcggtgccgaggagttgagttcgaatgaccgcgagaatgtcgacgaaggaaacgagaccatcatcgaccggaccctgcgccttctgtacgttacctgtagccgagcagaggaaagcctcgcactggttctgtgggcaaagaacccgactgcggcgcttgatgcaatcaaacggtcagaatggtttgctgctaacgaggtgtccgctttggaatag

SEQ ID NO: 73954 - DNA, 2136 bp, Sphingomonas sanxanigenens DSM 19645 = NX02
atgcatatctcgcgcgtccagttagtgaattaccgcaacttcgccaacgcgacgttccggttcaacgccgggatcaacacgatcatcggcgagaacggctccggaaagacaaacctgttccgcgccatcaggttgatgctggatgatgacatgctacgatgggcgcacaagctggatgatggcgattttcaccgcggcctcggcaactggcgcgggcactggatcatcatcagccttgagttcagcgaggtctcgcaggacgaagcgatccaagcgttgttcttacatgggactggcgtggtcgaaaatgagcagatcgggacagcaacctacaacctcattttccggccaaacgccgccattcgagccaaacttggcgagttggaaatgggcgatcaggctggtttggaagcgctccgacgaacgatcacgatcgatgattatgagccggtctttaccggcaagagcaccgcggacttcgccgatccggctgtctaccagtccttggtcggcaatttcgatacggtcgagtttcccgacgagctaagcccgccggagatcggcggacggatgccggcagtgctctcggtttccaaagaggtctgcttcaccttcgttcaagcgctacgcgatgtggtgagcgaatttcagggacagcgcaccaacccgcttctcactttgctgcgcggcaagagcggggaactggacgctgacactttggacccgatcactcagcgggtgaaagatctgaacgaagccatcgaagggttgccggacgtcggcgaaatgcgctcgcacatccgccagacgatccgcgacgccgccggtgaagcgtattctccggcgagattgtcgatccgctcgggtgtgccgaccgaggccgataaacttttccaatctctcaagcttttcgtcggcgaaaccgacgacgaatatgagggtgccattcacgagctaagcttgggcggcgctaaccttattttcctgactctcaagctgctggaattcaaataccagcaagccaagcgagcttgcgccaatttccttcttatcgaggagccagaggcgcacatccacacgcacattcaaaagaccctgttcgacaaactgacctatcccgacacgcaggttatttattcgacgcactcgacccagatttcggaggtcagcaatgtcgagaacgtcaacatccttggtcgtgatggcggccggtgcgagtcgtatcagccgaccgccggcctcgcgacgccagccatccgcagcattcagcgctacctcgacgccgttcgcagcaatcttctgttcgcgaaaagcgtgatcctggtggaaggcgacgccgaggagattttgatcccggcccttatcaaagaggtctacggtgtcagcctcgacgagctgggcatcagtctggtcaacattcgcagcaccggcttcgagaacgtcgcagttctgtttcacgaccagcggattcggaagcgctgtgcgatcatcaccgaccttgacgcggcgttcttcgatctcgcgcccgacatgctggacaccgacgatgaaacccgggccaaagaaagggcaacggcatcgcagaacgccggtgccgcgaggcgcgcgcggcttaccgccttcatcgacggaaacgattggcaatcgctgcatttggcccctcacacgttcgaggtggatttcgtcgccgccggcaatgtcgagatcgccgtggctgccttgccgacggtctatgtcgatcccgcgacgatcgcgaccgcaaccaatgagctaaggtcgaataacgcggcgctctacggcacgcgcattctcacgatggcaaagagtgctggaaaaggatggttcgccatccagctcgcgaagctcattacgccgactgcccgcattcccgcctatatctcggaggctgtgttcacgacgcacggtcggctttcgagggccgtggcaacgaacatcatcgagtatcggatgttaaagagtggtctgccagagcttcttggagacgattattttgacgaggtgcgcgcgcttgttcggcaattcagcaacaaggagattgatactcaagcgataattgccggcgtcggcgccgtgttgccgggagacgcggtgctcgatgtgctcggctacgcctga

SEQ ID NO: 73955 - DNA, 1836 bp, Sphingomonas sanxanigenens DSM 19645 = NX02
atggtctttgtctggaataaggacgacctgaacgacgagcaggtcgatgcaatccggcatcccggcagcgtgtttttgagcgcgtgccccggcagcggaaaaactcgcgcgctaacctacaaaattgccctcgaactatctcgcctggagtccgagaagcagtgggttgtcgcaattacctacacgcatcgcgccgccgaggagattgaggagcggatcgagcggcttggcgtggacacgagccgattgtggatcggcaccatccactcgttctgcctggactggatgctccgcccttacggcatcctgcatgaccaactgaaatatggcttccgcgttgtggatcagcacgaaagcgagcggcgcttggaggagctgggatcgcagatgcggccaagggtcgcgcccgcgatttgcggctactacttcacgaccaacggcgtggtgctggcggcacccgcccatagtcaagcatcggtgcatgccgtgcttgaggcattttgggaagggttgagagacgagcgtcgcatcgacttcgagatgatccttctctacgcgtgggagcttgttcgggataacccgacgatctcaatcctgcttagctccattttcaagtttatcctcgtggatgaggtgcaggacacgaaggaaatccagtacgctatcgtcgcctccattttgcgcgcgggcgcgggacggacgctggcattcttggttggcgacgccaaccaatcaatcttcacgtcgcttggcggctacgccatgccgcgcggcgatttccagcagctttccggcgtggccatggcgcacaagagcctttcgattaattaccgttcgtcggaccgcatcgtccagtattactcgaactaccatgttgcgcccgcagtcgtcaccgcagagggcgctttcaaggaatatcccagcaagatcagcttcgaccaacagatcgcgcatcaggggtttgaggacgagatcgtccgcctgatccggtataacatcgagcaactccaaataccgccaaaccagatttgcattgtcggtccttggtggatgtcgctggcggcacttacccgccgcctgatggccgcgatgccggaccagtcctttgacggtccggggatggcgccgttcgctcgcgatcaagacaatttttggtacaaggtcgctcgtctggcgcttaccgagccgtcgccccggctgttcattcgtcggctgcgctgggcaggggaagtcttggccgacctgcaccacgcgggcgtgatgctgccgaatgtcacgcgccgagatatcctcaggatttgtaacacgatccagatcgcctcgcaggacgggctcgagtttttgcggcttttttttgaggagttcagttcgggcgtggggttcaacccgacagcctatgtcatgctggcagaacaccatgagaccttctttgcgaggtccgagcgccagatcgagcggttgcttgcgagtggcgttcagggcgtcaatgacattgccatgttccgccggacatttgccagccgcaccggcatcacgatttccaccatccatggcgtgaaagggttggagttcgatacggtcatcgccttcgcactgctccaaggcatggtcccgcatttcgcagaaccgaatccggaagaaagcgcgaagaaactgctttatgtgatctgctcccgcccgcgaaaaaatctccatctaatcgccgagacagggcgcgttgacgggcgtggcgatccctacgtttgcaccacggtccttgccgcctgtcggcacgcctacgatcagatcgcggctgatgcaggggcaggtgccgacgtggaacctgcggatttataa

SEQ ID NO: 73956 - DNA, 2397 bp, Enterobacter cloacae P101
atgaaaattgaatatattgatatccagaactacagaaagcttaaaacttgcagaattcgtctgacagaggaagaaacactgctcgtcggggcaaataacagcggcaagacgtcagcaatggatgcgcttattttctttctggatcaacgaggaagatcggctgcgagccttgcatcgggtaaatctccgtctttacgaaaattaggcgcagccgatttcaccctatcaaattggcatcagcttaatcaatttggtcaagcatgggcgaacgccgaagaagttggcgaaaaaatcagtgactggcagcctttatgcccaacgctggatgtctggttaaaagtcgagaaaaatgaagtccacagggtacggcacctgataccgacattaaaatgggatggcggactgttaggcatccggatgatttatcaacccaaagatcttgatgccctaaaagcagactttattgcccacttcaaggccgctgagcagcttaggatcacagcagaaaaaaacgccgaaaaagatccaggtggttcagtatctgagctcagtgatttcaaattttcagtctggccgggatcgttgcgtgaataccttgaaagagaggtgtctagagcttttgagataaaatcttacatccttgatcccgcaaaacttgtcacggacaaaggaagtaaattcgtgccccaggtccttgttgagggacaacttccgctggatttttatcctttcaatggattgttcaaagtcgatatcattgatgccactcgtggattttcagatccctatgtgacaaccagctctcagtatggtgcctctaatctggctagccagattaaccagtactacaaccggcatttaaaccctaccgaccttccttgtgacgaagatttggatgctctcgaagccatcgcctttgctcaacactcctttgatggaagactcaacaaggtgtttaacaaacccttgaaagagatagagacgctggggtatccggggttcaacgatccccatatcagattatctagtagggttaatccgatcgataatttggaccatgaagcggccattctctttgagatccagaaaaccagccactccgcaggggtgccgctgatgagtctgtcagagaaatacaacggacttggctacaagaatctgatatccatggtctttacaatgatgagttttagggatcaatggatgcgcgtcggtaaagccggcctaagaaagccagaggaggatgtctttgttgagcctcttcacctcattctgattgaagagccggaagctcacctgcacgcgcaggttcaacaggtgtttatcaaaaaagcttattcggtgctgcgcaatcatgatgatttgcgaacttccacgaatttctcgagccaactggtggtcagcacacattcaagctaccttgcacatgaagtgggcttcgaaaagctcaggtacttcaaacgtaaacccgctacaggtccgcatgacgtgccgactgcagacgttattgatctgtcctgtacttttggcagcggtaaaacttgctcggatgatgtcttacaaacggctcagttcgtggcgcgctatctcaaaaccacacactgcgatctcttttttgcgaacgggataattctagtcgagggggcggcagaacgtatcctgatgccgcattttatccgtaataatcccaacgctaatacaagcctggacaacagctacatttcgattctggaggtaggaggagcccatgctcacaggctgagggcattgattgacatactcgggattcccacccttgtcattactgatacggatgcccaaaagcctcccctcaaattaccggcagatgatcaaaaaggtagctcaggtacaaaacctaaagccatcaggcctgaatttggcaagggatacattactggcagccataccatcaaaatttggctcgatgttgagggagggctggatacggtccttagaatgccggagcatgagaaagttcgtggtaaggtcaggattgcatttcaatacggtattcccattaaatttggaaaagaggaggaggtcgaggctttcccgtatacatttgaagacgctattgcattgacgaatcccgggttatttaaaaaagtagaaaaacctaccgggatgatgaaaaaaatgcaggatgctcttaacctagatacgcttgaacagtgctgtgaaaaactctatttggcactcaaagatgacaaagccgagatggcactcgatttactgtactgtgctgaccccgccgaactcgccgctcctaaatatattcaagaggggctggactggcttaaaaaagagctggaagtggcgagtagagaccttacgccggaagtgccgaaagtaactgacgttcgggagggggaataa

SEQ ID NO: 73957 - DNA, 1869 bp, Enterobacter cloacae P101
atggagacaccatccgcgaacgaacctgtggtagaacagcttttcagttatcttgatctggataatcccagaagttttctgctttttgccggtgcgggatctggaaaaacccgtacgctggtcagcgtgcttgagaaaatgaaaaaaaggtattcttcggaactgtctagatccggaaaaagaataggcattattacgtttacaaatgcagcctgcgatgaagtacaaagacggttattttttgatgccaatttcaaggtctcaaccatacacagtttttgctgggacttgatcaacccatttacatctgacataaagctatggcttaaaaatgaacttgagaagagtattgatcaactcacccgcgacattgaaaaaagcagaaaacctgatggtattacggcgcaaagaaacaggcggagtttagccagcaaaacgaaacggctgcaacacctcgataaaattcaaaagttcagctattcccctacaagcaataggcctgaaaaaggggcgttaaatcatagtgaagtgataaatgtcaccgcctatctcctccaaaatgaagctctgctcagagagattttatttagtagattcccagtacttttgattgatgaaagccaagacacgaataaatatcttatcgagtcgttaattatgacacagcaggagcatcccaccaaattctgcattgggttgttcggcgatatgatgcagcagatattcagcgggggaaaatccgacttagcctctcctttaccccctggatgggagtcaccagagataacaattaatcaccgttcacctgtgagaattgtcaatttgatcaactccatcaggcaatacaatgacgcacatattcaggagccgggccctgacgcccagcctggaaccgcacgcttgtttgtggttgacatgaacacctacaaggaaagagccgatattgagcgtcaggttgctgaatatatggctgaacaggcggctgatactgcatggaataacaaaaaatcagtcatggtactgacgcttgagcaccatatggctgccagacgcggtgagttcgaaaacttctttctgccccttctagaggttgaaagattgggtgatgcagcaatcaatggggatagccaagagataacattcttatcctcacaactatggccacttattgacgcaattcgcagtgatgatgattttaaaattgctactatcatgcgtaagtactcgcctgttttttcgagttcgcgcctcgaatatgcacacgatccactattgctcttccgggaagctcaatgccaaatagacaagataaaagtgcttcttggcgagaacttggctttccccattctagaagtgtgcaaactgattcatgaaggggaattgctgatcctgcctgaggctttcctgcttcacctagcgctggtgccacataaggatgatgaatccacagaggaagtggacgtcaacaaagagcatgaagcctggagccgatctctgagcgcatccacccgtgaactggaaaattacattagctatatttcatccacatcttcctacgacactcatcagggagtgaagggactgcagtttcctcgagtcatggctattctggatgatgaagaggcccgtggattcatgttcagttacgataagctactgggcgtcacaccgcactctaaaacggatcaggaaaacgaaagtgcagggggggactcttcgcctaaaagatcgcgccgccttttttatgttatctgcagcagggcacaggagagcctcgctgtcgtcgcgtacactaaagcgcccgatttagttgaacggaccgtaattgcgtcaggttggttcgtaaaagaagaaattatgcatatgtga

SEQ ID NO: 73958 - DNA, 1827 bp, Barnesiella viscericola DSM 18177
atgtatctatctgagctaaaactttggaattttagaaaatttagtaaaaatgacggaacaatagaatttgattcgccacatttggtagttccttttaagaaaggaattaatatcttaatcggagaaaatgattcaggaaaaacagcaataattgacgctattaaattggttttacgtactcatgctattgagtggatacgtgttgaagaaaaagattttcatgaagctacagactctatgagaattgaacttgttattagtgatatgtctgaaaacgaggcatccatttttacagaatggttaagttgggataataaaacatctaagccatatcttcgcttaatatacgctgcaaatattattaatggacagattattcctggagatgtctcggctggacctgatgcaaatggtaaagttttggcttttcaagctcgtgaataccttaaaactgtatatttaaaagcattgagagatgcaagtatagaattaactgcaaagaagagttctagagtttcacagattttacaaggtcataatttatttaaagaggaacctggacaagaacatccatttgtgacatatgttaaatcagcaaacagaagcattaatagttggtttaatgatgagctacaagcattaggaaaagatggtttaccaattcttgggacaagtaataaggagcaaataaaagataagatagattcatttttacatgcttttattaattctaatataaatagcagtcttacaattacggaacctaaaatacgtaatatactagaaactatttctattgttatagaattcgcacaaaatatggggctaggcactatgaataggctatatatggcgacagaactgcttcacttaaataaagagtgggatggtctaaaattatgtttaatagaagaactagaagcacatttacatcctcaagcgcaaatgaaagttatttctgctttacaatgtcagaaagtacaattcatcatgtcaactcatagtccaaatattgcatctaagataaaaatttcggataaagaaaacacaaacattattctatgttatgattctgacgtgtatccattgaatactgatacgaccagacttgatgaagatgactgtatattccttgatcattttttagatgtaacaaaatcaaatttgttttttgcaaaaggagttattattgttgaaggttgggcagaagaattattgatacctgtaattgccaataagttaggatataatcttaccaataaagaaatttcaattgttaatgttggttctactgcatatataagatatgctaatatttttataaggactgacggaaagatattaaatatgccaataagtatagtaacagatctcgatgtcagtccggaaaaaataaaaaaagaagaggtagagcttgatacaattgaatattcagaaatcagtcacgaagtggagttggaaaagtctaagaaaattttagatagtcttgctttgcccgatgaatcaaatgtcaaaattctcatttctccacattggactttagagtggtgtttatatctttccagcacattaaatgaatgttttaaggagtgtgtatctaaagtccattctaaaactgaaggttttaaaaaaaataaagctgggaaatatgatgaagaaaaattcaaaactacattaataaagaaacttaaagatcgaactttagataaagtagctattgctcatgaattatgtcagcaaatatgttcgttggacaccttagccatacctgaagatgatagtatatattatttagtggaagcaattaaacatgtatctaaagtatga

SEQ ID NO: 73959 - DNA, 1782 bp, Barnesiella viscericola DSM 18177
atggctgaaaatcttgaaataggagatgcaatattagttttatctcatacgaacactgctgttgaagaaatccgaaaacatctttccaaaaaagctgcgaaactgtttgaatatcctcataatgtatcgacgattcaagaatttgtagataaatttctcgcaattccatattatgaaaacaagtataagagaggaatagaaattatcgacaaggatagatatgatgctgaaatacagcgaattttaagtagatgttgggatcgaaggattctgtattgcaaacaccaatttgactttacatcagtacgattcatcagttcctttggagaaccaaggattggattgggaattgaaggaagtgatatatcctataaaattccaactacatggagaggaaatgaagattttaataaacaatatgtttgcaattggttgttaaaggcaaaaaatgagattttagaaaaaggaatattgcattatgatgattgctattatttagctgaggaatacataaaagagtatccagagataaagagtgtattgcaaaaacgttttaaatatattcttattgatgaaacgcaagatatgcagctgcatcaattaaaccttattgataaattattttattcagataattgcatcttacaaagaataggtgatcctaaccaatcaatttataatgctgtaacagatacttgtgattggcttcctagaaatcccatgtatattaataattctctgagattatccaaagagattgcagacgttgtaaatccgttcactcttataactggtgatgatggaacaggtaaagctagatttgttgtaaatggaaaaaatgtattagattctccaatacttcctacgttattattatttaatgaagagacaatgccattattgaaaggtaaatttaaggatttgatagaaagaaataatcttcagaatacaattaatgggaaaaagtatgggtttcatataatcgggtggaatgcaaagatttcagaaccggaatttaacatagaaaaattacggttagataatatatttccaaacacaactaaagtcactacaagtaagacatacgatacaatctctgagtttcttcaatttagtgaaaatgagacgattagccaatgccaaaaaactgtcttcgcaatactatgtcatattttacgactgtctggtgtagttgatgtaaatggacgtaattttacaataaagacactgctcaaacaatataaaaataacgaactgataatattaaaccagacggtttttaagatatctgtagcgataaagcaaaatgattttgaaactgcatataagttattgaaacaggtcgttgatagtgatttaaaatcaaaatttgaacttcaacagaatgcatatgtagataattttattggaaatacttttgtgaagtataacaacgaagaaaaagaggaagaagattcaatcccaataaaaataggaacagtgcattctgtaaaaggaatgactcattgtgcaacaatgtatgtagaaactttttttcataactatgaatgtaaacatttaataaagaaacagaatagaggaggatttcaacctagtccattcttcaaagatatagttgacaaaaaatcttcaagagcaaaacaagctatgaaaatgttatatgttggaatgtcacggccgacacatctattatgctatgctagtttaaaaatgaattggagtagcgatgctttgaagaagatgagagaaagtggttgggaaattattgatttgacaatataa

SEQ ID NO: 73960 - DNA, 2076 bp, Barnesiella viscericola DSM 18177
atgtacctttcgatacttaaactttggaattttagaaaatattgtgctatggctgatggaaagcctggattagaaatccattttcaaaaaggagtgaatgtcctgataggagagaatgattcaggtaaaacagctattgtggatgccattcgttatgtgctgagaactcaaagcggagaatttattcaatttgatgataaagatttttatcaagaccctgctgggaacagaaaggatgaattcaaaatagagtgcgtatttgacggaataaatgagcaagacgctggcttattctgggaatggttgtcgtggagcgaagacaagacaaaatatttactaaaagtatggctatacgttaagcgaaaagataacgtaataatgccgactttctccgcagggatcgaaggtcaaactgatagaatggattctgaagcaagagaacttctaaaagtagtatattttaagccacttagggatgcgctcacagacatgactcacgggtacaagtcaaggctggcacagatactgagtgcacatgaacttttcaaaacggagaaagacgttcaagggaatattacaaaacataaacttgaaacagattatgaaaaactgaaaaaggaaattgagaactatttcaagattggaggtagtggagaaagtataacaagcgaaatcaacagtttcctaaaagatcattttctgttgaaaggtgacccgcggaaagctgaggttaaactgacaggaggggaactgacagaaatattgagactactcgatttgattatggaaggtaataaatcggggcttgggactctcaacttactatgcatagcggctgaaatgctgctctttaacaaccagaagaaaggattgaaattagctcttgtggaagaattggaggctcaccttcatcctcaatatcaattgagactgattgaatatatttcttcccaaaagaaaaatgagcaatttatcctttcaacccatagcattacattggcatcgaagataaagttggcgaatatgattgtgctgaaaggtaatgatgcatttcccatgtcatcagaatatacaaaaatgaagccagccgactacaaatttttagaaagattcctcgatgcaacaaaagccaacttattctttgccagagggctaatcatggtggagggtgatgcagaaaatctgctaatacctgctatagcccaattgattgggaagaatctttatcagtatggcgtatccgttgtgaacgtgggaagtacagcatataaaagatatgtcaatatattcaaacgcaaagatggaaaatcatttggaatgcctatagctgttatttctgatctggatgtcagagcttttgaatattacgatgacaatagtaaagatcgaaaaactccgaaatattggttgagagatgatctaaggcctgagttagagaaaatttcaaccgaagtagattatgatgctatgtcaactgtcttcgagagtaaatctgcctttgaggaagaagttaggaagcataagaacgcgaattttaaacctattggtgaaacaatagaccgcatgaaggatatactaacagaagataagagagtggccttaaatgaagatatattagctcggattcgagaggaaaagagaacgcgattagaaaatgccatcaatgcagataaaatcaaaatattcctaccacaagcatggacgctggaatacgagattgcaggaagtggcttgtataagttattggctacagcgataaaagcagcccaacaggaaaaggaccatccagagctggaaataacagataaaattttgaatcaattatggaatgatgtaacgaatgagtttccagacgaaggcattccaactaaagaagtggcatataagatatttgaacctttgaatgatggaaccgtaagtaaagccatcactgcgcagtatttagcaggaatactggcaggagagctagctcctgttagtgatggaactgtaaatcgagataaagtgaagtctatcgttgagaatgacgacaaactgaagtatcttgtggaggccatcaaatatgttacggaataa

SEQ ID NO: 73961 - DNA, 2145 bp, Barnesiella viscericola DSM 18177
atgccatttgctactgatgaagaaataaaaatagcccacgatattctgttgaaagataagaaaccttttgattctgacaaggtaaatattatcaaagaagatagcagttgctatgttcaggcttgtcctggaagtggtaagacaacgacattgctggcaaaattgattattcttgccaataaaatgcctctgcctgaagggaaaggcatatgcgtactgacacatacaaatgtagctatcgatgagataaaagcaaaacttggcacaaaagcagatgtgcttttccggtatcctaatttttttggaaccatacaaacttttttacacaaatatgttacagccgcagcccttcattatttttatggtagtcaaataacatatgtggatgatgaaatgagtaatgctgtattcttgaaaaagtattataaattacccatccgtgaaagtaaacttagaggactgatatttaaacgaagcactttaaaagaacatactattaatgctgccgagatagaagcattgggtggcgtggatatgctaacggctgcaaatgttattaagaagaaaaagagggttgacaaatatatttttcaattaaaaggttataattggagccaaattcctagagaatacagatcttcgattcaaacaaagggaaatagcatccaaaatagtctaattctttcgtttagagttgattggaatagcaataaaattataactgattctgactcgataagagtagattctccatccggggctgaatatatgaagataaaagaggaaatgtttagagaaggtattttatccttccaggatgcttatgacctggcatttcggtatatttgggagaaggaactcgatttcagccgtttctctgacaagaggtttaaatatttgtttatagatgaagttcaggactgtgacggactgcaagtagatttaatccaaaagatatttgacgagaataaagtggtcattcagcgttttggagattactgccaagctatctatgagagagacgaatgtagcggaccggaaaatgacaaattgaaagataagcaagtcttacatatgcacgacagcatccggttcggagaaaaaatcgccaaaccgttgagatcgttatgcatggtaccgaatgataaacttgtaggcaatgatgagattccatctgtaacccctatcatcattacttatgaggatcccttatctgttcttcccaaatatgtggaactgctcaatactacattgattccagaaatgaataatcgttcaatctcggatattgcaaatcaagagaaacgagaagatccactacacagaataaatgttaaggcttgtggatgggtcggaaagaaaggggccagtgctcaaaaaagatatatagagtcatactttcctcagtttgaaaagaagaatgcaggacctaaagtggaaggagtttctttcaatgaattcatactcaaaaatctccatggaaccattaaggaacatgccacatctatcattcaaggtatattaaaatatctggatttatgtgaaataagaaatggtaatcgacgttacaccaagacctcctttttagaattcctgaccgcaacgaatattgagcaaaaagagaactttctaaaagaagtcatgaattgggccttactcatagccaagagcaatagcgacgatgatataaacaaaataagaaacactatacatcaatatattatagaaacaatattgcccttatataggaaagaagagactccagatgcactcagtttctttaatgcaataaacgaaaatctccccaagggccaagcaacggaacataggaatgtttaccatggtgatagtggtacaatagacattgaggtatccacagtccatgctgtcaaaggagagactcatgctgcgacactctatctggaaacattttacaatagacatcatgaatcagaccgcttagcagaacaatttaaaggcgttgcttatacaggaacagatgcggatacactcaaaaacttaagagtcgcatatgtaggtatgagccggcctcgatatatgttatgtgttgctatccagcaagatcgatttgacaaaattgattgtgatgaattgaggaagatttggaaagtagaaaaagcatga

SEQ ID NO: 73962 - DNA, 2061 bp, Bacillus wakoensis JCM 9140
atgttcttaaaagaattagagatttataattttaggaagtttaaggaaaaagaaaatggtgatcctgggttacttattaaattcaacaaaaatttcaatttgattattggtgaaaatgattcgggaaaaactgcaataattgatgctattcgtttaactttaggaacaatgagtatggataatcctcggatttctgaagaagacttctatagtgatcaacagagttcagtagattattttaggattgaatgtctttttacagatctcagtgctcaagaagcaggagtttatttggaatggttatcttttaatggttgtggagaatacgaactgcaagtaaggttagatgtaagaaaagttaaaaatggatatatcgcaaatagatttgaaagaagtattaaggcaggtcctaagaatgctgatttaaatttggatggcacagcaagagaacttcttaagacaacctatttaaaacctttgagagatgctgaaagtgagttacgtccaggtctaaaatcacgattagcccagattttacaagggcattcagcgtttaaggttaatgaaggtgaacttcatgtacttgaagatatattgagtggtgccaataagcagatagaagaatattttgactcgaaaacatctcatcaggaagaaagtattcgagaagagcttatttcatatctaaatgaattcttccctaaaacgcaagattcacataatccaagttttgaagtatcacctgcaaagttaaatactatacttagaaaattggctttaacattagaggaaaatatatctggtttaggcagtttaaatttactatttatagctgcagaattgctattgttaaacaatagagaaactctcggaccgtcattaacgctaatagaggaaatagaagcacatctgcacccgcaagcacaacttaggttggttaaatatctacaagaaactctattaaaagagcattcgaatggtcaatttattttaacgacacatagcacaagcttagctgcatcagtatctcttaagcatttaatattgatgcataatggttttgcttatccattatcagaagaacacactaaacttgatatagatgattataggtttttagagaggtttcttgacgtaacaaaaagtaatttattctttgcaaaaggtgtaattttagttgagggggatgctgaaaacttattgatacctgctattgctgaagcaatcggaaggccattgcacaagtatggtgtatcaattgttaatcttgggagtacggcttttaaaaggtattcgaagatattttctagatctcaaaattggtatgatttaggatttccatcgttaaatctaccagtatcattaataacagactcagatattaagccgtttgaatattattctgaagaaaataaggattttttcgaatatttgatagaaagtcaggatcacttgcttgaaatactaaatgagtgtggaattgatgataaatttagttatgaagatttaaatataacaagttttcagaaagtctctgatttgaaaaaggcattacatgaagcttttgatttagatgaagcatctataattgataatgtcttagaaaagagtactaaaaaacaaattaaggcagaatatattactcaattggaagaagatcgaattaaatctttgaaagaaaaatatgaaaacgatgctaatttaaaagtctttgtagctcaacattggacgttagaatttatgttggcactaagttcgttaaaaaaacatctagcaacagctattcatgagagcagatataagcacccttacaatactactaataaacaaaagcttgatagtatagtgggattaatatccgacaaggaagtggagcaaaagaaagttggttatttaatatttaaacctttaaacgaaaaggtagtttctaaagcactagtagcgcaagaactagcttcactaatatataatgagaaggaagctcttggacaaactattagcagtgacccctttttaaaatatatagttgatgcaatatataatgtaactgaacctaggtaa

SEQ ID NO: 73963 - DNA, 1881 bp, Bacillus wakoensis JCM 9140
ttggaagaacagaagtttatagagtacatagaacggcagcttttgccgaagggaagttcgtttacagaagaacaaaagcaagttattttttcagaagggagtgcgaatataattgctggacctggaagtggaaaaacaactgtattaattgcaaagtttgcttatcttcttcaagtagtcactacaggcaggggtatatgtataataactcatactaatgttgcggttgatgagataaggactcagcttaagagagttggaatcaataatatagtttaccctcattttattggtactatacatgaatttttcaattatttcttttcatacaaggcttatcaagcactttttacagagaaaactcccgcattattagaagaagatgactatacagaaaggtttaaaattaaatttgaacactatagaacagataattatcggggaagagcacctatttctaaaatgaaaagcagttatctagtttttacacaagataataaaattactcttatgtcagactgccattatagcaatgaaagaattgttctaaatagtttagtagatataatttcaaatggagagattagacataatgataccttatcgttggctaagtggtatattgaaaaacacatagaacaaatcagattagcttttagttcaagatttgcttgggttattttagatgaggcacaagatacatctatcattcaatttgatctgttaaatcaaattattaacctaaatgaaattaattttcaaagatatggggatccttatcaatctctgtataatatgtatgatcacaactccatagatgcatgggttccgtatgaagagaaaggtatgtttgattcaatagaattatcaaatagcactaggtttggtaattctattgcaaagatactaaagacaacttgtatagaggaatatagtagttttaatggtaatccagaggtgaattcctttaagccacatttattaatttataatgataaaagcgatgttattccaacctatttgtcattagtaaatgaattgtattctagaaacgaaagttttaagaggagtaaaagaaaaattgctgttgttggatcagagcatgctcatctaaagcagtataaacaaagttatgataagccccaaaatgttaagattagaacagaaagtataattaggcttctatataatataatcgtaaagggtttctactctagcttgaaatctaatagattaacacaacagatttctttaaaagatttaaaggcattattaagttcagagttaatagaacttaaatcgaatatagctcttatattgaaagaagtaattaacaataatggagtctattccgacgtgaatacggaattactaattgctgtttttaacgaggttataaaacatttttgtccgacagaaaccgtagaattaaattatgcagatatggtcgcattagttactaaagaatcacaatctacttttcaaacatatacatcaagtgaatctagtaagaaagaattaattagtaatgaggaattgttttttggaacagtccatgctgtaaaaggagaaactcataaggctacattgttaattgattcaagtattacagaatttaaattcacaccagatgaggttacttataatttagtagatctaatttttgaatatttaactggggatcatattgattatatgtcaacaggctttgatagaggtctacaacaagctacaaaaaaagctttgaaaatatcgtatgttgctctaagtagacctactcatttagtatgtgttgcggtggaaggaaaaatattaggtgataatttaaaatatattgttgataaatcctctaaatttggatgggaaattaaaataatttaa

SEQ ID NO: 73964 - DNA, 2049 bp, Bacillus wakoensis JCM 9140
atgtacatatctagggtagaaattaaaaactataaaaatttcaaagctaatataattgaatttaacgagggtttaaatgtaataattggtcataataatgctggaaaatcgaacttattaagagctatggcactaatatataatccatctgttaaaaagaacctatcaattgatgattttaataagcaacttacattagaagaattaaaaaagcagccaccacgcatcaacgtatcaattactcttagtcaagaaaaagaagaaaacctaatgggagatgatttggtagtagtaagtcaatggttaacgaaactggaagaaccatacgaagctaaaattcattatgaattttgtcttccgctaaaacatcaagacgagtatgaacaaaaactttctactgcaacctctgtaaatgatgcatgggaaattatagataaaaattttctgcgtttttatacatacaaaatttatggaggaaatttagaaaatcaaattaccgtggatagtgagtatatgaaaaaatttgattttcaattcttagatgctattagagatgtagaaagggatatgttcagtggaagaaatacattattaaaaaatgttttggatttctttatggattatagtataaaatccaatcaaggtttagatgacgatgaaaaagagcaacaaatcaaagaggaaaaaaagaaatttgaagatcaagctaaagtactgatggattctttgaatcagaggatgttggaaggaaaaaaacaaattttatcgtattcaaaagagattggggcttcatttgataatgctgaaccaaactttgctggcggtataacagatgtcgaactctattctgcacttaaactaatagtggagcatcatgatggaattcaactacctataacgcataatggccttggctataataacttgattttcatgtctttactattggcaaaaatgcaagtaaatgcgagtgaaacgtatttaggaagcaacgcaaaagtctttccaatgcttgttatagaagaaccagaagcgcatttacatccttcgatgcaaaagcaattattaaagtttttgaaaaagaatttggcagagaaaaaggttcgtcaaatattcgtaacaacacattcgactcatattacaggagcgttagagttagatgaattaatctgcttatataaaggtgagaatgaaacaaaagtcagctacccaggtaaagtttttggtactaatgtagaaagtaaaaaatatgtacaaagatttttagatgcgacgaaatcaaatatgctttttgctgaaaaacttatattagttgaaggtttagcagagcaattattaatgtctatttttgcagaatatcttggaaagtttttagaagacgaacatgtagctgtaattaatgtaggaggaaagtactttgaccactttttgaagttgtttaattctaataattctgctgcaataaatagaaaagtagtttgtattactgatagggatccagtaaggaaagagcgtttaattgagggggaatcctatacaaaatgttatccatttgagatgaatatagaagctgataaatatgaatataaaattagtaagcaggatgtggattattcgacgaacattaagttttattttcaagatgaattaaaaggtaaaacacttgaatatgatttagtgcgattcaacccaatgttgaagatgttagtaacggattcaatgtctaataaagaagaaattaaagcgctaatgaagctatttcaagaaggtaaagatattgataaactttatagccgattaagtaaatcaaaagaaaatacgagaataatagatggcttaaaacatgaagaattaagttggtcagaagatgataaaaaaatagcactgatagctgctaggtatttaaattcagttggtaagggagttaacgctttggaattagcctacgcattacaagaaaacttagctaagcgaggttctgaagactttgttgagtttgtcgtcccagactatattcaagaagctatagattgggtgtgtgaaaattga

SEQ ID NO: 73965 - DNA, 1740 bp, Bacillus wakoensis JCM 9140
ttgattactattacatctagtgacttaattgatattgaacagcactttaaaataacagctggtccaggagcaggaaaaacacattggttagttaatcatataaaaaatacagtgaaaaattctgcgcgattggagaagacgcgaaaaatagcttgtattacctatacaaatatcgctgttgaaacgattttgaaaaggcttggtgctggtgtaactgacagagtagaggtatcaactattcatagttttttatataagcacgttgttaaaccatacttacattacttatcagatgaatttgaaataaatgtctcaaaagttaatggacatgatacttatggtccaagatattcaatcgtgaaaaattggttagaaaatcataaacgtgtagatgaacttactcatcctaattcatataaacaattgctattcgggcaaaagttagactctttgtttatctggctcaataatctacagtacatgtacgactcagacggaaatttaaagttagtgggtaatcaagaaaaagtaggtggagtaagaaaagtaactgatattttagcagatgatttgattagttataaaaaaatattttggtcatcgggtaaagttgatcatgatgatgtattattctttagttatttattaataacgaggcatccttttatactaaacgtattaagagccaaattcccatactttttcttagatgaggtgcaggatacaaatcctattcaagcaaaaattattaagttgatagctaaagaagaaacaatagttggcattattggagatccggcacaatctatttttgcgtttcaaggggcgagtatagatgaatttattaacttcaaattagaaaatatggtcgaatatcaaatccttgaaaataggcgtagttcgaatcaaattatcgatttgttgaatgaagtacgaaaggatattgcgcaatctaaatataaaaatgttgatggtgaactaccaattttatttattggagatactgtagatgcttataaaaaagtaaaggaactatgcggagaaggttcatcgattcatacactttcaagggataatcccactgctaatgcaatgaaatcgttggttgcattaaatggaatagatacgaagctattaaagaaattcaaagaggccgatagtaataaagatagaccgaggataattttaaattctatagaagcagttgaatttgcacgaataggtgattataaaaatgcattagaaaaaatgaaagtactatttacagattgtcctgagaaagaccgagttaataactcaattaaattacttcaagaactattaactaaatatgatagttataatgaaacttccttaatcgcgttttatacagtgataaaatcccatattccaatgagtacctttaaagcgggtgcagccaaagacttttatgatggaattacatacacccaacttgcaatatgtataaattataaagaagataccagtcagcacagaactattcacaaagcaaaaggtgatgagtttgaaaatgttttactaataccaagttctttagattttcttcttaaccctgatttggagaacgaagaagatagggtttactatgttggattaagtagagcaatcaaccgtttatatattgtcttttctaaacttacgaagaagaatcaaaagttcatagaagaacaatacaacattaaagtggaggacttaacaaaagttcatcatttgatttga

SEQ ID NO: 73966 - DNA, 2064 bp, Bacillus akibai JCM 9157
atgtatatatcagaactaaaagttactaatttcagagggtttactagtgagccaactgctattgaatttaaagaaggaatcaacgtgattattggtcaaaacaatgcaggtaagaccacaataattaaagctttagaaatcttgtttgataatagatcaacaaagaaattaaatattaatgattttaatcacgatattgaaattgaaaagttaaaatctgttccaccaaagatttgtatatccgcaaaattattagaatcggataatgaagaaccttattcagatgaattggttactgtcgcaaactggttaactaatatcggaactccctatgaggctattattacgttcgaatttttcttgcctgagaatgaagtagataaatataaaaaattaataggtagtatgataagtactgatataaatgattattggaaagcaattgaacagcattttttaaagaaatatattagcagaatttatgttggatatccagatttacaaaatcaggtgaattcttcagaactctcacgattcgattttcaatttctgagtgcgataagagatgtggaaagggatttatttaaaggtaacaatgcacttctaaaagaagtaattgatttttatatggactatgatattaaaaatgatagagaattagatgaaaacgaaaaactaaagaaaattcaatctaaaaaagataatttcactcaagactcacggcaattattgaaatctttgaaagatagaatgagtcaaggtgaggaacaaattctgaagtatgtcaaaagtacaggtgcgggtatcgacaactctaagccaatttttgaaggtgaaatactcgatactgaattatattcggctttaaggttaattgtagaaaaggagactggaattaaattaccggcaacaagtaatggattaggttataacaatctaatctacatatctttactactttcaaaaatgcaaaaagattcttcaggagagtatcttggatcaaattctaaagtgttttcaattctggcaattgaggaacctgaagctcacttacatccaagtatgcaatataaatttttacaatttttaaaaagcaataaagagtctgaagtaagacagatattcataacctctcattctccaaatataactgctgctgtagatcttgaagatataattgtacttcagaaattaaatattgaaactgaaactgaagaatttaaagacgtaataaaagctgcttacccatatagagtttttgaaactaaagagggtaatgcccagtatgaagaggataaaaagtctaaggattatgtgaaaaggtttttagatgtaactaaggcagatttatttttcgctaaaaatatcatactagttgaggggatagctgaacaactagttgtaccagagtttgctaggaaactaggcttagacttggaagatagtcatacaacagtaataaatattggaggtagatacttcgatcatttccttaaattatttgatactgaaaaatctccatatgcaattaataaaaaattagcttgtattacggatctagatccagtaagaaagaaattaaacgaagaatcatcagatgatacacaagaggaagtagatgatgattcaagcaattgggaaaaatgccaacctatatttttaggtttaaataatgaattatacgagtacaagaaaacctcgaataaacttgtaaataacagtgagagctattcatctaacataaaggtattctcacaaccaattgggttgagctcgacttttgaatatgaattggttagaacaaatccaactaataatgtttttgtgacaagttcaatttctaacaaaaaagagttaaccgaactatttgagatggttaatcgaaataaagcattagaagaaataataaagagaatcaggaaatctaaatttaaaactgagttaatggattcgttccaatctggagtcttagaggatcatagagataataaagtggctcttcttgcaagtaggtatcttttatctgttaaaaaaggagaagctgcacaagaaattgctatttaa

SEQ ID NO: 73967 - DNA, 1662 bp, Bacillus akibai JCM 9157
atggatatctctgtagcgattgaattagaatctagtataagtgaaattcctgttgatgaaaactttaaactatatgcaggtccaggtgcaggtaaaacaacttttttgactaaccatataagacatattctcaaaagttcaagaaagctaaagaaaactagacaaatagcgtgcattacatatacaaataccgctgtaaatactcttgttaaaaggttagaaggctgtacagattctacagaagttagcactattcatagtttttgttataagtatattgttaagccatatatgcggcttttaaatgaagattcaattcctttagataagatagatggtcacgaagaaattaaactaagaaggagtcagttaagggaatttaagtcaagtagtcagcagttacattttaatgatgacaaatatttagtagaggcattgggaaaactaaaatgggtgttagaagatggagaacctgtccttaagtttttaagatatactgatgggcgaattggagaatattcgattaagaaaaactcatacattctctataaacaattacattggtcggaaggaaaattgagtcacgatgatgtcctatattttgcctatagaataataaaagaaaaacctgatgtcttagaaatcataagagctagatttccttatattctaattgatgaatttcaagatacaagtcctattcaaaccgaaattattaaaatgataggtgagagagaaacgtatgtaggtgttatcggtgatatatgtcaatctatatattccttccaaggtgctaatgtcgatttatttagagaatttactttagatgatatgaaagtatacattttgtctgggaatcgaagatccacaaatcaaattattaatgtattgaaccatatgcgtgaaagggtagattttaagcagcattcacctactgatttagaaggtcaagcacctataatattgattggagataaatccaggctagattcttttttaaaagataagttcgagaaggttatgtttttatcttataaaaatatcaatcatactaatgtaaatattttggtggaagattccgatggagatagaagttggagaatatattatttagtacaatccctggaactagctaaaaaccttgatatgaaacaggcaataaaatttatgagacaggcctatcggaagattgaagaatttactgaaaaagaagctttagaaaggctaagaagactatttgatagttacgatgactttcaaaataaaaatattactcatttacacaatgaatatattgttggtcattatcaagtatcagggaaaattactagaggtagagtaaaagcattatatgatggattaacatataaacaccttgttacacaaataaagaatacagaaactggatcgatagacttcaaaaccattcatcaatctaaaggtgaagaatttgacacagtttgtataactctcccttctgaaaatgaaggtaaagaactagatttcctaataaaccctgatatgaataaagagtctcatagggtttactatgttgcaatgagtagagctcagtataaattaataattaaattggaaactgtaagtgaagaaaataagtcgaagcttgaaaaaataggattcgaaatagtacaagttacttag

SEQ ID NO: 73968 - DNA, 1788 bp, Pseudomonas aeruginosa MH27; identical to SEQ ID NO: 72168

SEQ ID NO: 73969 - DNA, 1818 bp, Pseudomonas aeruginosa MH27
gtgacgccatcgcgtagtgtcagcacagcctacttggctcaggctgccgaactggctgggaatccgggtcagttggcagcctacaactctcaaggacattgtgtggtactcgccggtcccgggagcggtaagaccaagacactcgtcctaaagctcgcccgcatcctagccgaagacgtcgaggcccctcgtggcgttgcgtgcatcacttatagtcaggagtgcgctcgcgaactcgctcgccgaattgaaagcttgggacttcagcaggcacctaatcttttcattggtacggtccatgggttctgtctgcgtcatctcttgatgccgtatggacgcctggccggcctgcccatatctttcccactttcggtggccactcaacgagtcagtgatcggttgttgaagcaaactggagatgcgcttttcggccagaaccatccgtacaaagttattgacctcggacggcatcgccgttccgtgctcaatcgaaatagcgtcgcttggcgtagcgaggaggaactcgctgcctgggccgagacctacgaggccgctctgcgcgacgaggggctgattgactacgatgacatggttgtcttcggccaacgtttgatcgccgagcacgactgggtactacctctggttcaggcaaaattccccgtgctcgcggtggatgagtaccaggatttaggtgtagcactgcatcgcatcgtcaaacgccttgccttcgacgggggtgtccgacttttcgctgtcggggatgcggatcagtcgatatatggatttacgggggctgatggcgcgttgctcatggaattggcggctcgcagagacattgagcctgtccagcttcaattaaattaccgttctggtgcagggatcgtgactgcgtcagagatggcgcttggagaagcccgaggctatcaagcgagcgatcctgcgcgacaaacgaccatcgaatttgtcctgcgcccgggtggtacggcggaccaggctgcgcacgccgtcgcgcagatcattccggcggccttagcctccaagccgggacgaacactgggcgatatcgcgatcctatacaaagactatcgcgcaggcgatatcgtggctaaagctgtggcaaccggcggtctcgattacatccgtgtggataccgcagcaccttaccgcaaggttgccctaacaagttgggtagaagattgtgcggcgtggtgcgcgggtggctggcgtgttggacgcccacaattgcgtggactactcgaccgctatcgcgcatttcatcgggcgagcttggacgattcacaggccaagcgcgaagagcaagagctaaccgccttgctatgggagctgcgcgctgaccagcaacctgcgcgagaatttgttgcttcgttgcgcaacggtgtagtggatcatctgctggcggctgaattggcgctcgctgatcagaaagagcaactggatcgcatgacggcagcgctcgccgaaggcggtgcactggcttcgctagacatcactagtttgggcggtcgggacggttcgcccgatcacctgaatctgctgacactgcattccgcaaagggctgtgagtacgacgtcgtcatcatggttggactcgacctcggaaatctgccgtggcgcaatgaaactccagagaagttgcgcgaaagtcgccggctcttctatgtgggactcacacgtgctcgcgacgaggtccacatgctgtattcgggcttcgttgatggccgctatggccctatgcgctttgggcgctcgccattccttgatgagctggaggcgcgaatgcgtgccgctggcatttga

SEQ ID NO: 73970 - DNA, 1905 bp, Pseudomonas aeruginosa MH27; identical to SEQ ID NO: 72778

SEQ ID NO: 73971 - DNA, 1677 bp, Pseudomonas aeruginosa MH27; identical to SEQ ID NO: 71997

SEQ ID NO: 73972 - DNA, 2337 bp, Pseudomonas cichorii JBC1
atgcatattgagaccgtttgggtgcgtaatttccgtcgtctgaaggacactcgcatcgatctggcgtccgatatttcaatattcgtcggggccaacaacagcggtaaaacatctgcggcgcacgctttgcagctttttacctcagcttcgaaggatcgatttaccctccatgatttcagctcagagtgctgggatgccatcaacgctttcggagaaggggcggacggagtcgaactgccaaccatctccctcgacatctggttttgcgtcacgccagccgatctgcatcgagttgtagatctgctacctagcctagattggcaaggtagccgggttggtattcgagtggagctcgcagcagcagatgccggccttctgagaagcagtttccaagaagcacgggccagcgcacggcatgctcagttgcagcctgcaggggaaggcgtggcacaggaagacatggagccagccattgcgcaagacgggtacaacccgcgaccgcgtgacctttgtgacttcattgcagacaccgtaggtgacagactacggcgtgatttcgaattgcggtactacatactcgatagcgccggatttgacactgagtttaaacagcttgatggttacgtgcctctacgcttggttcctgataagggtcgcagtggcagggatgtgctgggtagcttggtaaaggtcgactgtttacatgcccagcgtcacctgtccgactccaatgctggatctcgatccgaagatctctcccgctgtttgagtcgtttctatgaacggaaccttgagaagcgcggcgaggattatgacgctcagcgcgcactataccagtccgagagtctgctgaatgaccacctggaacgtgtcttcggtcccactttggagcgtttggccgatctgggctatcccggggtcaacaatcctcggctgctgatcaagactgcattgaaccctgcgaccattctgagtagccatgaaggggcacgtgtgcactacgcgctcggcgctctcggagcagcagaggtcacggcaaccttgcctgataggtacaacggcctaggtttcaagaacctgatttatatggttgttgaactgctcgatgttcacggtcgatggttggacattgaggaaaaccgcccaccgctccacctgatattcatagaagagccggaggcgcatcttcatgctcagttgcagcaggttttcattcggaaagtgttagacatcctcgccgtgcccgaggaagacagcccatattgcaccagccagcttgtagtctcgacgcactcgcctcacgtcctttacgagcgaggctttaaacctattcgatattttcggcgagtagcggatgccggcatacagcaatctcaagtgctcagcatggcagctttttatgaggcggccgtagatcctaacgacccaaatgaccgcactagggattttcttgagcgatatctcaggctaacgcactgcgacatgttcttcgctgatgcggccattttggttgaagggaacgtcgagcggctgctgatgccgcaaatgattgctaaagctgcacctcgacttcagtcgaactatttgagcgttttagatgtgggtggcgcgttcggacatcgattcaaaggcctcattgatttcttggggctcacttctctgatcgtgaccgacattgacagtgtttctccgcctgcagcgggcgctttagccgcaaacggcgagttgccggttgatgaggatccagcggatgcagagcctgacgacaatgaggacgcggaggaggctgaagcgagacgtaaagggcgcaaggcgtgcatggttcatgaagccggggctcttacttcaaaccagacgttgatcaagtggctgcctgggcacaccacgattgacgatctgctggctgcgactgccgaacagcgcactcaactccgagacgaagaaggcggcgcccttgtacgcgttgcttaccagacaccagtagcggtggtgtggggcggagcgactcaggtgaggacaggcaggacgttggaggaagcgtttgcactgcaaaatctaacctggacgcagcatctggaccgcaaggatctcggcctacgtatcaagggttccaacaatctggaaatcgcaggtattgcggagcgcctttaccgtaaggtcaaaagctcaagttttcgtaaaactgatttcgctctcgggctgctggctcaagagccgtcggcatggacggtgccaaattacatttcggacggtcttcgttggttggaggatctggtcgccccgccaccgcccgcagtagctgaggcggaggcgcctctcaacgggggtgaggtatga

SEQ ID NO: 73973 - DNA, 1899 bp, Pseudomonas cichorii JBC1
atgactgcgcgtatcggtcagccggatactcaagcagatatcgaactaaggttgtgcttggaccagcgtcctcaacgcagctttgtcatggttgctggcgcgggttctgggaagacgacgtcgctggtaaaggcccttgcgcacctcggccagacgcgaagactaaagctcaacatgcgtggtcagagagtcgcttgcattacctacactgaagtagcggtcaaggagatctggggggacgtaggtaacgatccgctgttccatgtctcgacgattcatagttttctgtggacggcaatcaggccattccaagtgaacttgaaggcttgggtcatcgcaaggatccacgagaaaatcgccgaggcgcagcagcatcacgacaagcctaggactcgggcagcaactcgtgagcggctcgtgaaagatatcgcgcgttaccagcgtcaccttgaggccgtaaggcatttgactcattttaactacggtgccggaagcgatttcgggcgaggtgtactcgggcacttcgacgttatttcggcggcggtcgagctaatcgagcagagccagttgcttcgtgatgtcatcgccagcaggtatccagtccttttcattgatgaaagccaagacacgcgtccggaagtagtggctgcatttagaaggatcgccgagacgactcctgtggagttctgcctcggattttttggcgatccgatgcaaaaaatctaccttgaaggtgctggagtcattgagacggccgcaggctgggagcaaatcaccaagccagaaaatttcaggtgtccgcagcgagtgctccaggtagtgaatgctatccgggagcccgatgacggtttgtctcaaacacgaggccggatgaactgggtcgacggcaatcctgaacctgttatgggatctgttcgattcttcctactgagagcagatgaccatcgctctatgaagctagctaaagttcgtgaatggatgcggcgtacgaacgatgacgatcattgggtgagtgatgatcctgccgctgacttcagggttttggttgtcgtgcatcggatggcggcagcgaggctcggctttccgaatctttacgctgctttgaatgacaacgatgcaccaccgtccatcaaggagggccttaaggacggcaccgcatggccgctgcggccgtttctgaattacttgctccccttggcaacggcggtttcagaaaaccgaaagctcgacgtcatgacttttctgcgttcggaatgtccgttactgcagccaacggctctggtcggtagcgatccggtagcggtgcttcgggcattgcaagcatccacaacagagttggccagactcattttttcgagcgatgcattgctgcaggacgtgctcgttcactcccaggcagcaggtctgctacaactggacgaagcgtggacaaaatacttgggcccagaccgcacagccgacgatgatgatcctgagatccccgccgtgtcggctttcctacgttgcggtgtcggtgaattggctggctatcgtcactacctcgaagatctttcaccgtttgcgacccagcagggagtgaagggggcggaattcgaacgcgttttggtgctcatagatgacgaagaaggtagaggacaaaggcagttctcctacgaaaaatacttcggcattgtggagccctcagatactgatctggaaaaccttgcacagggcaaggatagcgtgatggatcgcaccagaaggcttttctacgtgtgttgctcccgagcgactagggatctcgctgtggtcatgttcgtgcaggacatcgaaaacgctcgagaaaaaattgccgagaccggcatcttcgagtctgacgacattgtggatgaggaggctttggaagccgctctaacttag

SEQ ID NO: 73974 - DNA, 1401 bp, Bacillus boroniphilus JCM 21738
gtgactggagaaaaacaataccatttcgaagcgggtatcagtccaaaagatttagaagaaatcaaaggaagatattatttaaaaactttaaatttaaagtatctagccagtactagggacttgaactccttcataaagagagaacggaagaatttgttggtcgatataaaaaagaatagaacacctgaggaaacagtttatgatgaaaaatatctagataagattgataaatcactcgatatcatcaacaaaagagtgagtaaccttaactatgtgaaaaaagcaatgggaaatattaatgacgaattaaaaggtttatcgtttcaccatctttcgcaaaagatagaattcgatgtaggagcttgggattcctcgcattttgtcgataatttaaatttagtgtcaaaggtaagagataaaaacctttcaataagcggagatggaagaagtaatcaattatttattgcattatgggctaatcgcaatgaagttaataaagatcatttgttagaagtgacgttttattgtattgaagaaccagaggcgcatttacatccacatcaacaaaggaaattagctggatatctctccaataatattaatagtcaagttattttgacgactcattcacctcaaatagccgaagagtttccgcctgattctataattagattatataataaggacctgaaaactaaagctgctttagatggatgccattctttaattaatgattcctttgttaaatttggccatagaatgagtattattcctgcagaagcgtttttctccaatgttgtattactagttgaagggcaatcagaattacttttttataaggcattagcagaatcgatagaaattgacttagatcgaatgaatatcagtattttgatggttgatggagtaggttttgattattatattgatgttctatcaaatttagagattgattttgttgtgcgaacagataatgacttttttaagttaccgaaaaaggataaatactggtttgctggaattaaaagatgtataaaaatttataagactttttatgaggaagaagagggaatggaagacttactcacccaagaaaacgccctgacagatgtcccattggatgtaacccaagatattaaagaattaacagttaaactacgtcaagaattggaacagctctctatgtttttggctgaaaaggatcttgaacacgatttaagagattcgccagtttccggacaactggagaaatatttcggtttactttttgaggaaaatgcagacccagaaataatcaaggagatgcaaaagaagaaagcaacgtttatgtttaactttatcaatgatcctaacacagatttatcagttctaaaaaccatacattggcaaaacctttgctga

SEQ ID NO: 73975 - DNA, 795 bp, Bacillus boroniphilus JCM 21738; identical to SEQ ID NO: 73897

SEQ ID NO: 73976 - DNA, 2088 bp, Streptococcus sp. BS29a
atgaagttaacaaaaatggttattaataattttagatcttttggggagtgtcaagcaattaactttaataatcaaactgtactgatagggaataatagttcaggaaagacaactgtattacaggcattgagtaagttgttttcagataaacaaagtgaaagaatcattcgaaaaagtgattttcatttaccaaaagggttaaaacctggtgaaaacacaagaaatctttttatagaaactatttttgagtttgatgaacttgctggaactgtctatggaccagccattccaacatttttcgagcactttacagtttctcaagatggtgcaaaaccttttttacgaatcagattagaatcttcctgggaagatgatggaacagttgaaggaagtattgatactcaaatttattatatttcatctgatgaagatactattagagatgaagacaaacatcgtgctcctagaaaggatttggataaaattagggtactttatgtaccagcttcaagaacacctgagaaggagttgggtaatgcttcaggtagtatgttaagtaggctggtaaatagtataaattggactaaagatgagataaatgaaattaaagataaaattgatgagttgaataacacctttttatctgaaaatggagcattaactcagattaacaatgagattcagaaatcatgggaattatatcatgaagataaccgtttttctcaagcagagttaattattaattcttctgagatggcggcagcacttagacagattgccttaaaattttcaccaacaaccactgaagaagcatttacagtttcagatctaggagatggactgagatctattttttatttttcacttgttgattcgatacttgatattgagttagaaattaccaaagaccgtgaagagaatcctgataatccaagatttaagttggtacctccaatactaactatcttagcaatagaggaaccagaaaatcatattgctccacatcacattggaaaactagtaaaaaggtttaagcaattaagtaataatgataactctcaagtaattttaacgtcacattccccagctattgtaaaaagaattgaaccagaagaattgaggtatttaagaattgaaagtaatggcagagttcttcaaaccattgtttctgatataaaactacctcaagatactgatgaatcttataaatatattaaaggagcaattcaagcatatcctgaactatattttgccaagttagtagttctaggtgaaggtgatagtgaggaactgctattaccaaagttttttgatttacttgggaatgagatagatagctctcagatttcaattgtgcctttaggaggaagacatgttaactatttttggaaattattaaattctctaaaaatacctcatattactttactagactttgataatgaaagatacggaggtggttgggggagagtacaatatgttatccaacagttactaaaaataggtattgcgcgtaatgatttagtgagaatgaaagatggtagaatattggacgatcaagacattgctagaattagttctaatcagatatctgatatcctctctcaaccattgttatcctggataaatcatttagaaaaattcaatgttttcttttctgcaccccttgatattgatttcttaatgttacagtattataaggattattatctggaaactttatctaccaatgagggacctgttgtttcttatactgacgaaaatagtgacaataaaaaaataaaaataactaaaatggacagaacaaatgattatcaattaattggttttaaaaatcgcatcagtgaagctatacaagcgactttaaaagataagagtggccctggtgatagcttcactgaagaagaaaaggaactcatgatttggtatcaatatttctttttaggtagaggcaaaccgacgactcatatgcaatttttattatctattcgtgatgaagaattaatcgaaagcctaccttctgtatttgagaaaatagttaaacgagctaaagaattacttggagatattgaatatggtgaagagtga

SEQ ID NO: 73977 - DNA, 1818 bp, Streptococcus sp. BS29a
atggtgaagagtgatgattggcttcctaaaggagatattattttagagaatgcagctttagaagctgttaagaatgtaaacaattgtttagttattgctggaccaggtgcggggaaaactgaattactagctcaaaaattagactatcttttttctacaaatgaatgtatttctcccaaaaaaattttagctttaagttttaaaacagatgctgcagcaaatatgaaaaatagagttaaaaaacgttatggtgatgagtatgcttcgcgatttacatctttaacctattcagcatttgagaagatgattttagatcaatatataaatgctctcccagaagaaataagaccagatagagactatctggttgatgattgggatgttataaaagcaacacttattaaaaatggtattaatgttaatgggaggagaatgtcagatataagaaagtctgtcgaaaaaaccgtacttaatgatgaggctaatttaaagtttaaaaaggacttattaaaagggacacggaataataaggctgtgctcctttataaacaaataactaagctagctacgtatataatatatacaaataaatatattcggaaagcacttcaaatgacatatgaatttgtctttttagatgaatttcaggatactacgtatgaccagtataatttattaaaaacatgttttttaggttcgacgtgtaaattgactgcagttggagataataaacaagcaattatgagatgggcaggtgcaaatcctgatatttttcaagattataagctagacttcaaagcaaatgaatatcaattattgatgaatcaccgctctgtacctaaacttatagaatttcaaaaagaggttcatcagatattaaatagtaatcacagttctattcagtcaaattattatccagaatttcaagagggtgaaataacattatttgaatttgaaaatgaaagtttagaatctaagttaattgcaaatgatatagaatcaaaaattcaaggaggtatacgaccatcagaaatttgtatcctagcaaaacagaaggttgatgattatagttcaaaattgataattacattaagcagtaaagggattaaagcaagaattgaaaatgaatatcaagaacttttaaaagaccctacttgtaacttattattagatttaatatcatgcagtcaaggaaaacgagatcctttaatttgggaaaatattagtaatttttatggaaatatcaatggaatagatgaacttactgatgaattaattttagcaaaatcctataaggagattgacaatatagttagtgatattacttacctaatttcaaatgttattcccaatgaagaaagtatgctaaaattaattgattgtattattgaaaaaatagatgaaaaaagaattatttcaaatttttcaacatacaatagaaaaagtgacctagatatcattgtcaagaacttttcaaagttattatacaaagaatattctcaaacacaaggtgaatggctagatacagtctctagtttcaagggtgaaaactcaattccaattatgactatccataagagtaaaggattagaatatgaggtagtctattttctaggcttggaggattctgcattctggagttttaatgatcaaccggaagaagataaaagtgcgttctttgtcgcactttcaagagcaaaaagtcacttaatattcacatactgtaaattgagaaataatagtccgcaaaataatagaaatattaatgagatatattcattgctgactcaatccaatttagttgatgttattaattaa

SEQ ID NO: 73978 - DNA, 1686 bp, Veillonella sp. AS16
atgagattttcttcgattagaattaagaattttaggaattttgaagatattgatattaagttatcaaacaaaaatattatttttggacttaatgatgttgggaaaacaaatttcttatatgcgttaagatttttatttgatcgtaatattagaaaaaatggctttatagatagcgatttttatcaaaaaaatactgaaaatgatattgaaattgttgttgaagttgatttatcagatatagaaaatgatgcatctaaactaattagatctatagtaaaaggggcattgcgtagtggtgatgggtcactatatataaaactaaaggctagttataattaccaactccaatatggagagccacaattaatgtgggcgggaaatgaaatgaattatgagagtgtaaagcagatagggtcatttactgatttagataaaatttttaatgttatatatatagatgcgtatgttaatttacaagaattgtttagtcgtagcttacgctacatattaccggatgcttctgaggcggatgctgatattcaaaaattaattgatggagatattaaatcactaaatgagcatatttcatcgctttctaatataaaaagtattgaagaagagttaacgcccctatttaattcatatcaaggaaaggaacataagatttctttaaaatctgaagtttcagttaatggatactattcaaatcttactccatatatagaaggggctgatagtaatggggtatatccaactgctggagagggacgacgtaagcttcttgcgtatgcattatataaattgttgatgaaaaaagatgaagggaaaaaaataaatttattccttttagaagagccagagaatcacctacataaaggaatgcaactatcattatcgagtgtaatttttaatgataatacatatgaatatctttttgttacaactcatagcccttttattctttatgaaatgaataatgtgaacttggttagaatttataacttaggtaatatcagtagcaaaagttttatttataaagttcctactgaatttgaaaagtcgagaaagcttttaaatagctatttagctgaggctatatttgctaatagagtattattggttgaagggccctcagaagaattactttttaataaagttttattaagtgttaagccaaattatgaagccttaggactatatattctttcaattcgaggaatctattttaataaatttatagatgttctacagccactgggaataatatgtattattaaaacagataatgatattaatgcaataaaaaataagaagagtcagtatatgccagccggttttaagagatgtaataaattattgaaaaagacgcttttacctgaagaaacactatcgagtaaaagtattaaccaacgaaaaaaattatatagagataatatagataaaataaaggaaatgaataatttaaatatatttatatctgaggttgatttagaacatgatttacaagctactttaaaacttaaacattttaaagaattagttggtcataaaaatccagttaaatatttacaagagaagaaacaaacttatatggttgattttattcatagattagaagaggaagattgtaagaaaatattaaagtcatcatatttttcatgtttaaaggccctgttaaatgaataa

SEQ ID NO: 73979 - DNA, 1524 bp, Veillonella sp. AS16
atgaataatcataaatggacagaagaacaaaaagaaataataatagataaaaatacgttaatagtatctgcgagtgctggtacaggaaaaacatttgttattacacaaaaaattgaatatgagatccagttaaatcgaagctttaaaaaattagctgcattgacctttacaaataaggctgctgatgaacttaatagtcgattaaaaaaaaataatgatggaaattttataggtactattcataactttgtgcttcatgaaattatcaatcctttttttaaagacttatatgacttaaagtatgaaggagaagtttcatatggtactactttaaagtttcatacaattaaggatggaataaacaaactttctgaattgggtcaagtaggaaattattatgataataaaaaatcctttatatttgaattagcattgtcaattataaagagttcagaagcttgccaactatttttgaagtcgaaatattataaaatttttattgatgagtatcaagattgtgatgttagtatgcataatcttttcttgtatatattagaaaattttgatattccattgattattgttggtgatgaaaaacaatccatatatagttggcgaggtgccgaccccacattattccaatcgcttttaacttcagataaatttgaaaaatacaggttgtctaccaattttagatctgatgcttcaattcaaaactatgcaaatttaatattcggatatagagtaaattcttataaagaagctgagagtaataaggttttatttttggtagcagataagtctaataatgttattttaaatgttctagattatattgataataaagcctcactagccattttaactcgtaaaaatgatatagtaaaaaaaattggtagtattcttaatgaaaatggcaaaaagtgtgctataattcaaaaatctccaattgagaatattcaaaataaggatagcaacatatatttatcaattgcaaaatacataattattaaaggatattcagaatatgacttttctagagatgttgatttagaaaataaatttaaagaagtatctcttgaagagttaaaaatgcatttaaataaatttaatgaaatagttgacaaatcgtataaggacgtggtctgctcaatagtaaagttatttaaattagattttaacgaagtattatattcaatgttagaagaaactataaataataatatattccattatggttttaatatcgaccaatatcaaaatgttgtcatgacaattcatgctgccaaggggttagaatatgagcaaattatattatttgcagatgattttgactttactagtcctgaaaatagagaattacattatgttgcctcaacaagagctaagtcaaaattaattattattgcctataatgattggaatagttataaattctggacgtatttaaaaagtcgagctgaaatagaaggagttgaattagataagataataaaaagggttaatttgaatctaaaaaggtaa

SEQ ID NO: 73980 - DNA, 1278 bp, Paenibacillus sp. FSL R7-269
atgtttctgctgaagaaccatttgatgcaagtagaaaaaatacaggtttctgagaacgtacggggaaatattgaacttcaattgcagcggctaaacaaaaaaataattcgtgaaagtgaaatattgaaatcaataagtcaagaactaaaagtcactacttccgataaggaaagtgttgtagatattagccctattacaaaggacatagaatctctttataggggaatgaatatctactatagcaataaaagctctatgcctacttctattgaaaatttaggattaggcgttcgtagttgggcagtattttcaactgttaaagcagaaatcaacagtaagatgaaaaagaggcaaatcgatgattatgcctatttaccactaatattagtagaagagccagaagttcatgttcatcctcaggcacaacgtcaactcttttcgaatattaatgaaatgaacggacaaaaaatcattacaacacattcgccttatattctatcacaaatagatttagataaaataaggtatgttagaaaaactggcgcaacttctgaagtactgcctttattaattgatgggttaagtgaagatgatgtacgtaaaataaaaagaactgttatgaatacaagaggtgaaatattatatgctaatgcagttatcttggcagaaggagaaactgaggagcaagcattgagcgtttttttaagagagtatttcaaaaaagaaccgtttgagttgggtattaacgttattggagtaggagggaataactacactccttttatgaggattttagatcgattacatataaaatggtatgtatttagtgacggtgaacctcaaccactaaatgatttgaagacttgtttgaaaaaattaaaagatacacaagtacaacctaaccttgatgaatttgataatgtttttgtaattgataatggtgaatgttttgagacctattgtctatctcaaggctatgttaaagaaataacgaaggcaatttgtcaaattgaaagtgatcctaactatatgaaatattatatcgaacattataacgagcaaaaggctaaaggtggagttattagaaactataaagctgatgctgatggaggatattgtcgagctataagagattgcattatgtccgataaaaccaaataccctacagcaattgcagaagagatctgtaaatcaaagttgaaatcgaagagaatcccaaaaaaactaaaagatttatttattaaagttgaaaatgacatgaaagagggtgggatgtga

SEQ ID NO: 73981 - DNA, 1884 bp, Paenibacillus sp. FSL R7-269
atgagtatttctttatcaagagatcaagaagcagttgttaattattcaggtaaaaacttattagtgatagctggggctgggagtgggaaaacaagagttcttactgaacggataacaaaactaatcttgaatttaaaaagaggcgagaaaatactggcaattacttttagtaataaagctacagaagtattaaaagaaaggcttatagcctcattgggggaaaagaaattctacgattacacatatgttggaacgatacacagcttttgttttgatattattagttcaagaggaagtgcaattggattgccagatgagttgcacatttgtgagtcttataacgacagacttcatatttttaaagaagcaattgagaatgtcccttcttttaagacagagtatttaagtggggattcgaaagagaatcaaaaagtaataaaggctttccttgatgatttaagtaatgcaaaaaggaatctgaagtttgcagatgattactctgatgatccactaatccagacgttatttgaagaatataacaatcttctattgcaacaaggagtcattgattttgatgatattcttaggtacacatatcaaatactcactgagagagagagtgtatctcgattgtatagaaaagtgtacaagtatatttgtgtcgatgaggcacaagatttaaataaagcccagtatgaggtaattaaggcgcttgctggtgagcagataggaattacaatggtaggagatcctaaccaatcaatttatggttttagtggagcttcaaatgaatatcttgacaagatattcttggctgagtttaatgctcataaaatgcaactccatgagaattaccgctcatcacagttagttatagaagcagcccatattatcgaaccatcttttgaggtttatggaacatgtaagtatcaaggcgaatttgaaatacatgagtttcaagatgaatttaaagaagcagaatatattatgtctaaaattttattcctgttgaaaaatgggcatccagatgttgaaaattgttctatctcactaggacaaattgctattattgcaagaaacagatatgtatttagtcgagtagaggaattactaaaagcaaatgatttggaatatactttaaaagtatctgcaaaaggctcttttacaagcgaatcggattttattaaagcgtttgaattgggtataagattattagtaaacaatcgggatagattgcattttattgaactggaaaaactcattaattctaaaataaaaaatggaacatttgaagaactaagatgggataataacatttcggatcattggaaggctttaatgcttgctttaaataatgcgtgggatcttttgttaaaaaatgacagagaggtaaaatttcatacagcaataaaacttctaaaaacttttattgaagatgcagaaactaaaatagatgaacatgaaaaaatactcattaatgaagacataaaggcatgggaaataaattggaaaagttacatcaaaaattccacttctggagaaagatcattaggcaattttgtgaggactgtttctttaggtagtgcacagagcactaatgataaaggtatagtattaagcacagtgcatatgtctaagggattagagtatgacgttgtatttattatgggattaaatgatggggtttttcctgactatagagcaattaacgcgtataatagttcaaaagataataaacagattactgaggaacgacataacatgtttgttgcaataacacgttcaaaaaggctctgttatttaacatatccattggtcaaagagacaccttgggggaaaaagcgacagacaccttcaagatttgttttagaactagagagataa

SEQ ID NO: 73982 - DNA, 1950 bp, Paenibacillus sp. FSL H8-457
atgtatcttgaaaggatatgtatttggaactggagaaaatttgaagtagtagataatgagaaagctagtattgagattgtattcaataaacatttaaacgtcattgttggagaaaacgactctggtaaaactgcaattatagatgcaataaaagcaggcttaagtacgaatagtcaagatgtaacatggatacttgaatcagatttttttgatccatcattaccaataaagattgaatatttttataaagaattaacagaagatgaagaggcgtttctatacgaatggttgtattttgtagaaaaagagtcaatttttagagtagtgctagaagttgagaatataaaggatttaaatggtaagcaaagaattagtagagtcttattaggtggagaggcaggaaaagaaagtgtaattaatgataatgttagacacttgttatcagtaacatacttaaagccactaagagacgctgagtctgaattaagtccaggtaatagatctagatttgctcaaattctgaaaaatttaaatgtttttcaagagaatgatggagtaataaaaaaggagatagaagagatactgactgtagcgttttcggatgttcaacaaaaaattgatgatccagtgctaaataaaatggaagatgtagttcaatcattcttcgataaaagtcgtgaaaggaagccagtaatacagccgagaaatatgaaatttgatgaatttgtaaaaaaattagagcttaacttaggcgaaattggaactgggttggggagttcaaaccttctatttatggcagcagaattgttgctattaagtgagaataagttcggtccccaattagcgctaatagaagaaattgaggcgcatattcatcctcagtctcaattaagactgataaaatactttgagaaaaaaagtaaagaagatggtatacagtacattctaacttctcatagtccaattctggcatcctcaatatcattagaacatataattttaatctataataatagagcttatccaatgcatgctggtttaactttactagatgaagatgattataagtttttagaaagattcctagatgcaacgaaatcaaatatgttttttgcacgaggtataattatggttgaaggtgatagtgagaacctattaatacctgcactcgccgaaataattgatagacctctctatgattacggtgtatctatagtaaatgtggggaacttagcatttaagcgctatgcatcgattctgttgagagcggacagtcaggcactgaattttcctgtatccattgtaactgatgtagatcttaaaccgagatcttactttgataagaattatattacatattttgaagttgataactcaatcgaaggagaaattggtgcattgtttgactatgatttcgatagttctctcgttgggagttattttacatttgatatattgttgcaacgtattaaaggcaaggtagatgttgacccagataatttcgtgaaattgattagtcttctagaaaaatttaaaaataagaaatatgaagacatactgcttcaaaaaatacatgagttagaaacaagatattataataacgtggaaagtactaaagtatttattagctcaccatggacattagaatttgccatagctgaaagtggattatcggagtatttacaggatgcagtcttggaaattaatttcgtaacccttaaaaatagagttgcaaaaaaagcagaatggaatattattggtagcgttgaaaaaaaagcagtcgaaatatatcggttcatgctaaccaatcaaatttcaaaagctgcagttgctcaaatacttgcaaataaacttattgaaaataaaacatcggtgagtactatttttagaagtgatcctaagcttaagtatctttatgactctatccttcacgtaaccgggggatgttaa

SEQ ID NO: 73983 - DNA, 1782 bp, Paenibacillus sp. FSL H8-457
gtgtacttcacagaaaaagaatttagaatggttgaagaggctacattacacggtaatttttttaatcataaacaacgagagtttatagagttaatggaatcgaaatatatcatagctggtccagggactggaaaaacaacttcattgtctgcaaagatagtcctgctattattaaattccattaaaaataactcaaaagatggaatatgtgttatcacaaaaaccaatgtagctgttgatgaaatcaaccgtatactaaatcatgttggaaagtctaaaatgaaacatccacactttgttggtacaatacatcagttttttaatacgtacttagcaactccattcattcaaaaggtgttgaatccaaagcaaattcgatttgctaaggagagtgattatcttcaactgttaacacagcttgctgaaagacacccgtactttagaagatggcaagaaaggcccagaagtattgctgttcaaaaaacgagtattagcaagttgtattttgattttacaaataaaaagtttgatattgaaaattcaactggttgggataaatttgatcgtcatagaacccacatgttcgaacttaaatggagcttaaagaagttaggttgcttttcatttgatgatatatttcttttttctaaagctgccatacaaaatgaaaaaggattatcattgttgcgtaaaagatttaaatatgtgtttatagatgaatttcaagatactgaaaaaggtagtatagatttaatcactcgtatttttaattcgaagagtaatgtaattcagtatatcggagaccctaatcaaaccttggactttgaaggtgaaatgccttcaatagatctttcaaatgcgtttaacttaaatatatgtaatagatttggttatcaaattggaaaccagctaccatatatagttgacaacttaaacattcaatgtcttgaggataaatattcatttaatccaatgcttctaatctatacttctaaaacaaaattaatcgataattacaagattcagtttagcaagtatttaaaggatcagcgtttctcagctgttaagaaaaaagattcgatactggggatacaaaataatactatcaacgaatatctggaagaaccaaataatataaagagttctagaaccaggattaaagatactgaatcgtttaccatacagataattaacttacttcaagaaatactatttcataagatacctaatgtaaggaataacaacataatccttagagactggttaaaggagcatcccacatatcgaagtcttaagatttgtatagtgaggagtattaaagctggaaagttagaagtttctctattagtggattatttaaacgagttgatttatgaaaaaggaggacagggtgttaaagcaagcaatagtgtattctctaagatatcttcaataatagatcacatatatataaatcctgtacagactgaagaagatcataaatttacttttagtactattcattcagtaaaaggagaaacacatagatcagtattacttatcgattcagagaaagataagaatccaaagattcacacaaaaatgataaaatcatacttctgtgaatgggatgaggatttatcaggaaattgggttgagagaaatcttttatatgttgctatgagtcgaccaacccatttattcacatttgctatggatagaaactttattacaaatgaagaaattgaaatgtttagattgaagggatgggacatttcatttacaagggaaactgaatcataa

SEQ ID NO: 73984 - DNA, 1992 bp, Vibrio parahaemolyticus 3256; identical to SEQ ID NO: 72330

SEQ ID NO: 73985 - DNA, 1752 bp, Vibrio parahaemolyticus 3256; identical to SEQ ID NO: 72331

SEQ ID NO: 73986 - DNA, 2355 bp, Pseudomonas aeruginosa PS42
atgaccacagaccagatccctgcttcctctctcaccgatagcccacccttgatcccagcggggccttcccccaaagcagctgcagctatcgacaccccaccgatccggctcgcctgccttgaggtctgtaattttcgacgcctggccaagacccgacttgagctcgacgaggtcactaccattttggtaggtgccaacaacagcggcaaaacttcccttcttacagtcctccgcaacttcttgagcgagtcacccggattccgcgcgttcgacattagcctttcgcagtgggcgaagctgcgcgaggtatgccaccgctgggaggcacttgatgaggatcccacgacggactccaaggatgccgaatcatgggaggccgagtatcaggaactccaggcgtgcatgcccttcattgatctttggttcgacgctaaggagggggcgtacagccatgttgcgccgttcatcacctcgctgaagtggtcgggtggcgcagttggtgtacgggtacggctcgaacctgttgcagacgcgaacgaacttcgcaatctggcttggcgctaccgtgaggcgcgcgccccggtccgagagcttccgaaggatggccatgcctggccgatagatctgcttgactactggcttagacattctgcggatctgcgacgcatagccgcttaccgtctcgaccccgtgaagggccccttggccgataaatcgcgccgtgacttgcaggagctgccacttggatcacaaccgatcgagttgcagcatctgcgcaagctcattcgtgtggattttgtaccggctcaacgaggactcggtgccgaagaagacgaaatgcggtcagagtccgcaagttctcggcccggattgttctcaagccaactcatgaagttcgctcggcaacacttgaacgtagccccatccggtcacggacatcgagaagacttggtcaaggccgttgctaatgcacaagcagacctcgacaaatctatctacaaggcgttaaagccagcgatggaggacgtggagattctgggttacccaggcctgcatgaccctcaccagttccattttcgtacaagaatccagaccgcagaccttcttgctcacagcacggccgtacagtacctcctggacaaaactgctgttgatgagtccttgcctgaacactctattggcctcggctatcagaatctgcagtcgctgagcttcatgctcgtgtcattccgcgccgcacgcctcaatccgccgcagggcagtccggcggcagttcacctcgtgatggttgaagaacctgaggcccatttgcacgttcaggttcaacgaaatttttcgaagaacgcccacgagctcattcgtccaaaggagcaggtgcatagctacctccgcagtcaactgctgatcagcacgcactcgagccatctggctcatggagacaacttcacgcgtctgcggtacgtgaggcgggtggccagcacggtgcttggcgcaaaacccagcacgcaggtcgttaacctgggcgatgcgttcggcgaagacgctccaaccaggacgttcgccgaacgctactttcaggtgcaacacaccgacctgcttttcgctgacgccgccatcttcgtggaaggaacagcagagagaatgctggtgccacttttcatcgagcgggatttccccaaacttgccaagaagtatgtttctttcctcgacatcggcggtagccacgctcaccgccttaaacccctggtggagcgattggggattccgacgatcgttatcactgacttggatccggttctgccaacccgaaccgataaggggcgcctagtccgggcagcggtgcacatcgccggccaagaaaaattggagtgtgggaatgacacattgacctcatggcatccgatgctggcggagtttcaagcttttggtaagccgacgcctgcccagctggtgtggacatccgacacaggcgttcaagtccgcttcgcgtggcagcttccggttgcggctgccagcgagcagtggcccagctcgtttgaggactctctagttctctccaacatcgattggttcaaagcgttggaagaggaggttgacccaatcaccgctgccaaagtaaagcaccgcggcaccttggcaaaggtgataggtcttgtgctcgactacccagaccacgccgagctgctcaaggaactccatgcgatgctccgcgggagcttcagtaaaggagatttcgcggcaaccctgttcgaacggctaaatgctggccaagacctgaaatgccccgcatacatcacagacgcgctcacctggctgagcgggcaactcaacgtcactgcgggagagaccccttga

SEQ ID NO: 73987 - DNA, 1953 bp, Pseudomonas aeruginosa PS42
ttgagtaccgctctgccatcgtttggaaacgatcgcgacgctcatgtcgtcgaagatatctgcggctacatcacgacaaccccgcctcggagtttctttctcttcgctggcgcagggtccggaaagactcgcacgctaattgaggttttgcgtcgagttactggagtgataaagcatgaagcgggggctcactatgccgaacgacttaggtctcgtggacagtcggtgcgtgttatcacctacaccaaaaacgcgaccgccgtcgtcaacggtcgtctcggcgaaaattacctgaccgaagtatcgaccatccattccttttgctgggaactcatccagggctttgatgatgacatccgggaagccttgcttgcgttcaatgccgaagatcttgtggctgccaaggcccatgcgatgggtaagaaaaggggcgagtccgacaccgaccggcggaagtatgcggagatcgaggcagaggcggaggaattacgaaagactgatgaatttaggtatagcccggacagaaacacattcggtccgggggcgctatcgcacaccaacgtcctggacgtgaccgcatggctaattgttaaacgcccaacgctgcagcgcatcctagaagaccgtcaccccctcatccttattgatgaatcccaggacacgatgaagggagtacttgatgcactatttgaactctccaaaaaccgtccggatcgcatcacattggggctcctcggggatcatcggcagcgaatctaccctgacggtcaccacgacttaccgtcacacgtgccggaagattgggcgcgccctgcattgcagatgaatcatcgtagccaaaagcgcattgttgaactcattaacaagatttgggactcggacatcgagggccgtactcagcccaagactggtgtcccccagcaccctaggacagagaaaaacggtggaaccgttcgaatctttgtcggcgatgctaagaccgattccgccgaaaagatccggagggaaacggaatgcgcgttggccatgtcggccgaaactgccttatccgcctggcaagagcgtgggagtggctacaaaaccctcgcccttgaacacaaacttgccgccaaacgaggcaatttttacgaggcataccgcgcgatggagctgctggacaaggatgccgcagtgcctaagagcaatggcgagcggacggggcccactatggtgaggccgctcctcggcccaatggttgaacttgcagaatgtctgcagcctgatggttcagtgaacgagttcgccgtcatggatgtgttgcgtaggcacggcgcacttgcaaaggtcccggaatctcgcgccgagcgtcaggccgcgctggacaaagctcacgctgcagttatgaggttcgcatccgccgccaccaagcccggaataaccgtgcgagaagtcttggaaccgatcatcgaagccagcctcttcgaagtggatagtcgcctagttgaggcctacggtgattcgtcgcctcctcctccagagccaaagacaaggagcaaggaagcgaaggaggaccgacgtaagcgtggctggcacgccctcttcggcacgccctggcaagaaattgctcgttatcacgcctatcttgggggtgaaaccgaactcgcgacgcatcaagtcgttaaaggctctgagttcaagcatgtcatggtcatcatggatgatgaggaagctggcggcacgtggttctcctacgacaagctcttcggcgctgaggaattgagcccgactgatcttgagaacgttgaagggggaaaagagaccactattgatcggaccctaaggctactttatgtcacctgcagtcgagccgaggaaagcctcgctctggttctttgggcgaagaaccccgctacagcgctcgacgcaatcaaacagtccgaatggtttaccgagaacgagcttaccgctttgtag

SEQ ID NO: 73988 - DNA, 1785 bp, Pseudomonas aeruginosa BWHPSA045; identical to SEQ ID NO: 71894

SEQ ID NO: 73989 - DNA, 1815 bp, Pseudomonas aeruginosa BWHPSA045; identical to SEQ ID NO: 73827

SEQ ID NO: 73990 - DNA, 2424 bp, Pseudomonas aeruginosa BWHPSA044; identical to SEQ ID NO: 71738

SEQ ID NO: 73991 - DNA, 1932 bp, Pseudomonas aeruginosa BWHPSA044; identical to SEQ ID NO: 71739

SEQ ID NO: 73992 - DNA, 2292 bp, Pseudomonas aeruginosa BWHPSA041
atgcgaatcaagtttgtggagatttccaatttccgaaagctgaagtctacccatctcgatttagataaaaacacgacgattctggtcggtgccaacaacagcggaaagacctctgcaatgctggcgctgcgcatcttcctactatcacctacgcgcttgaatcttcgcgacgtcacaattgcaaattggaccaagattgatctactggggagcgagtgggaagccggtgcggagcccaccgtcgatctggattcgctgcttccctcgctggatgtctggcttgacgttccgctccgcgagatccagcacgtcgtcgatatcctaccaacgttagattggtccggcgggctgctgggggttcgactagcgtttcgaataaaaaatctcgacaaactcaagagcgaatatatcgcgcaacgaactgcggcgcgggacgcggctatcgttgggccgaacggtgagtcgatcaagattgcagtctggccacgcaaccttacagactttctggagcgtcggctgcgagcacatcttgaactcctagcctatccccttgacccggctgctgttgttccgccgggaagaagcggcctcgcgacgccgcaaaggctccccgccagcgcacttgcgttcgagcatccaccattcaaaaaactcatcaagattgacgaaatcgccgcgcagcgcgacttcgccgacgctagcagcagtgacggcggtgaagacaagggggaggcgaacaatcgtcggttcaaacgtcgcctctcagaccagttacgctcctattatgatcgccatctcgacccgacgaagacgccatcggacaaggactatgaagcgctcggagcaattcaagcggctgagcgcagttttgacgcgcgacttgaggaaggcttttccgctgcctttcaagagctagaggatctgggttatccaggcatgagtaatcccaagctcaagatctcgacccttcttcggggaacggatgggctcaagcatggatcgtccgtgcagtaccaggttgcagacccttcaggggacggcagcaacaccctccaactaccagaggactattcggggctcgggtatcagaacctgattgccatggtgttcatgttgatgggcttccgcgacgagtggatgcgcgtagagaaagccggcattctcgagggggccgacgtgtcacacgagatacagccactgcacctcgtgctagtagaggaacccgaagcccatcttcatgcacaggtccagcaggtcttcattaacaaggcctatacactactccgaaagcacgccgatctgggtgtcgcggaaaactattgcactcaactgatcgtcagtacgcactcgagtcacgtcgcgcacgaagctgacttcgccaatttacgctattttcggcgccggccggcggccagcatgggggagacgccgaccactacggtggccaatctgtcctacatcttcggtgatggggacgagacaaagcgcttcgtgaaacgctacctcaaggcgacccactgcgatctcttcttcgcagacggcgtcatcttcgtcgagggacaggcggagcgcatcctggtgcctcacttcatccgccatcattttccagagctgtcgcggcgctacgttacgttgctcgaactcggcggaagtcacgtgcacagcttccgcaatttagtcgacgcgctcggcatcgcgacgctgatcattggcgatctggatgccacaacggcggttaagattatcgataaaaatatgcgagaaacaactcgttggaagtcggctcgccccgagcagggcaaagctcagcaaaccgcaaactcagttctcaaagattggcaccccgggaaaaagcttattgatgaactcgtcgcgctaccgcccgatggacacatttcaacggctggcggcgactatgagctgtatgtcgcctatcaaaagccagtcaacgtgaagggtgcttccgaagacagcgacctcatcattccgcgaacctttgaggacgccttgatcctggagaatttggcagtcgctggaaagatcgaaggttcgatcacctcggccaaggttcgcggcattgtcgctcaggatctgtccggagatgagcttgaggatgagctgtttgagctgttgaagacggccgagaaagcggcgttcgcgctcgactgtctcatgttggaggaccccaaggcgctcaagcctccaggctatattgcggccggtctcaagtggtttgaaggggcggtaggtaaggacatcgcccagagcgaaatccagggagcagaggattag

SEQ ID NO: 73993 - DNA, 1911 bp, Pseudomonas aeruginosa BWHPSA041
atgatcattgaaacggccgcgccagacttcgatgagagcgccgacgtacagatacgggcctgtctgaatcccgccgcgccgcaaagcttttttctctacgccggggcaggatccggtaagacgcgctctctgaaaagggcgctcgacacctttcgcgaagatcatggcgcgacctttaggcggactggtaagaagatcgcggtcattacatatacgaacgtcgcggccgacgaaatcgccgaacgtgtcggagaggatccgctgtttcctatatcgacgatccacagcttctgctggcgccatatcgaggcctaccatcgtgatatccaggcgtggctcctcaacagacttccggttgagcttgccgacctacgcgagaagcaagcgaaggggcgctctggcaccaaggccgcgcaagaccgcgagagggccatcgcttccacgatgcaacggattgagtggctcagtgttcctcggcggtttacctacagccccaacggcgataattttggtcaggactcgctatcccacgcagaggtgctgaaaatcaccgctgcgttcattgaaaccaaaccatcgatgcaagcgatcttggttaacagatttcccttcttgcttatcgacgagagtcaggatacgaatagagggctgatagaagccttctttgccctagctgccgcacacaagggcaagttcgcgattggcctattcggcgataccatgcaacgcattttcttggatggtcatcccgagctggagcgtctggttcccgcagactgggcgcgtccggctaagcgccttaaccatcgttccccccaacgcgtgattgccctcggcaatgtgctaagagagcctgttgatggccaataccaggtagcccgcgaagacagcgaaatcggtattgtccgtctctttgtgtctcccagcgatgtccttgataagcctgcacttgagcggcgcgcgcgcgatcgaatggccgacttgtgtaacgatctccagtggcgtgaggaggctgcggtcaaagcgctgacgctcgaacatcacatggcggcatcacgccgtggcttcttggagatgttccaggcgctcaaccaggattcacgcctatcgacaggtctgcgcacaggggacttagccgggctcagattattcaccgatagagtcgccccgctgattgccgccgcgcgtatgaaggatgacttcgcagtgatggcgcagctgcgcgcgacctcgccgcttctccagcgtgcagctatcgctcggctcgcgcacacggatgatccgttattaccgattcgcgccgctgtagaagcactgcttaccctggatactgacggccaggaaaccactttcctcgccgtgttggaatgcgtcgcaaaacatcgtttattcgagattcctgatgcgctacgcccatttgttgcgaatggagctgaagaaaacgatgtcgagctggccggcgatgagagcgcaccgggcgaagaggacgcgccggaagagaggtctcctgcgagcttggaggcctggcgagcattcctggaaacaccgtacaggcagtcgatcccattcgcggaatacgtcagtgataaagggcccctcggtacacatcagggtgtgaaaggcctggagtttgaacgtgtcctggtgatcctcgacgatagcgatgcacgcggctttctgttttcttacgacaaattattcgaagcgacaccagcgacaggagctagtcgtaaaactcctgctgacacggctgaagagggcaccgtgcgcacgcgtcgcctgttatatgtgacctgcactcgtgcccagaaaagcttggcgctggtggcctacacgaaggatcccgaagcgctcattgcggcggcgctgcgcaacaactggttcagggcggaagaaatcgagcgactatga

SEQ ID NO: 73994 - DNA, 1647 bp, Roseivivax atlanticus
gtgctgctgcacctgcctgaagaaatggaaaagaaactcttctcaaagacgcgcccatggagcgacagcaaaggcgggtttgttgatgaagatggcgcagagcctggggatgctgatggcgaagatgtcgtccgcgctctgccgctgacctttatcggctattatgaccgcaaagaggatgacttcgttgggacgacgtatttcgcacaccccgttgaagagcttggcgaagacgaggaacactatggcaagccgtttgcggggctgagcttcttcccgcgcgagtggaaaatccagtgcggcttcatctatttgcggaccctgcgcaccggacgccgcgccctcagcctggaacgcggctcgctgctcgatacgatcttgcggctcggcgacaccgggaaggagtcgatgtgggaaagcacgctgaagcaactgcgcgcccttgatccgccgattggcgacattccccagctcgaaggcattcaaacacagatcaaggatcgcatggcgcgctttgtcggtctgtctgccgacaaggatgcaacaggcttctatgcctctgacctgacgcgggagaatttgcgggaagtggtccaactcttcctgaagagtcaggacagtaaccatgccgtgccgtttaatcgccttggcacgggcgctgtgaacgcgctggtctttgctctgctgacccatatcgcggacttgcggggcaaccgcgccatcatcttcgcgatggaagaacctgagatcgccttgccgccccatgcgcagcgccggatcgcgaaatatctcctgaagaacatgggacaggccatcatcacgtcgcactctccttacgtgatcgaagagttcgatatggcgaatctacgggccgtctcacgcacggcaggggtgctgtcatcggacagcattccggcgggcgccatcaaacacagcgcgctgcgcaccaatcgcaggcaattggctgaggccgtcctggcgcgcggcgtgattgtcgccgaaggcgacaccgaagccaagatgctgctcgcggcgagctacatgtacgaacatctggacccgtcaggcgaatatgtcccactggaccttatcggcgtgagcgtcttcgacgcgggaacgcagtccgacgttcccaaatgggggccgttcttcggggcactaaaaaagacgacttttgccttccacgatcagcccaagaaagcctggacggcagaccagacggcgaagctggacacttaccacaacaatttcgaaagcgcgtataagggcacggaagacttgctggccgccgaagtgccgcctgcggtccatcggcggtttctggatcaagccaaggaccatcccgactacccgaccgataaggggtatctgaaaggcggcgaaagcgatgacgacgtgatcgcgctgtccaaacaagtcctcaaagccaagaaaggctcgggcttcgcggccatgttgatcgaacaatgcactgcgctggacgagatgcccgtgacggtgaagagctttctggagaaggtcgccgccgacatggcactcccaaagctggacgatacagagggggaagcgggagacgacgaagggcacggcgaagacgggccggacgagcccgacccgctcgatattgatatcgaggacattctgtag

SEQ ID NO: 73995 - DNA, 1734 bp, Roseivivax atlanticus
atggcctttacgatctgcgaaaaacgccaatcggttatcgatgaacagggacacgcgctggtcattggcgggccgggatcaggcaagacgacgctcgccctgctcaaaagcaagtgcattctggacacgctcgcgcccggtcaaagcattttgttcttgagcttttcgcgcgccgccgtgcaacaaatcctgaagcgctgccgcgaaatcctcaccaaagaagaaatgaagcgcatcgatgtgcgcacctatcattccttttgctgggatatcctgcattgccatgggcgcttgctgggcggacggcctctcaagatgatggccccgtctgaggaaggcacgcggcgcacgcagttcgacggggattgggccgctgaaagcaagcggctgaagggcgaggaagggatggtctgcttcgatctcttcgccgcggccacggcagagctcttcgaaggcagtacgcatttgcgctcatggattggacggctcttcccgcttgtgatccttgatgaatttcaggattccgatgacgatcaatggcgttttgtccagcaactaagcgccgtcactcaaaccctgtttctcgctgatacggaacaacggatattcgaagggtcgttccggcccggcgtgcgggcggacaggctggatattcttaagagtgccatcgtgcttcgtgaagttgatctgcgcgatgacaattaccgcagcgccgacagcgacattctggcctttgcggattgcgtgcttagcggcaaaggcccgctgcccaacaccgaagatgtgaagcggctgccctacgactataagaaccagttcccggcaacggttcacttcgcggtcgcggtcacgcttcacaccctgcgcaaacgcgggatcgatgatccgaccgtcgccgttctggccagaagcaatgatttggtcgcagaaatctccgatactctcgaagtcccgcacagctataacggaaaagagttgaagccgatccctcatgacattgtttgggatcaggaactttcagcatcggcaggtgtcgccatggcagcggcgttggaattcgtctctctggacacgcctgctgcacgcgaggcgatgcacgccaagatcgaagagtatttcctgatcaaaaaggatttctgccaacgctatggcgggcgcggcgcgaaggcggcaggtacaaaggcggaccgctttggcaaagcaaggggcaagatcgcagacagcaaggctttgacgaaaggctcgccgaagacctttgaggcggctctgtcggccattccggccctgacgggcgatccggtcagagactggaaggcggtgagaacctcgttccaagcgcatgatgatctgaaagcgatctttcaggatgcgcggatggtgagactgttccgcgcgtccgacacgctggcgacggccctggctgggcgctggatggagcgcgggacctatgaaggcgcagcgcgcatgatccgtagcgtactcgatcaggaaaggctgattggcctcgagcgtgatcccaagggcgtttccgtcatgaccatgcataaatctaaagggaaagagttcgacggcgtggtgatagtggagggtgtatactccagcccgttctttctcgaacacgaagcacccgactatgccccatcgcgacggctactgcgcgtcgggatcacgcgggcgcgaagcttcgtgctactagttcgaccgcggaaatcgaaaccgttggtagagagctaa

SEQ ID NO: 73996 - DNA, 2157 bp, Chryseobacterium indologenes NBRC 14944
atgaatataaaaaaactttttattaaaaactttagaatactttctgattttcaaattgacttagaagatgaaatttcgttggttataggaaaaaataactcaggtaaaacttctattcttacagttctggataaatttttaaatcaaagtgataagaataatttttcaattgaagactttaatttgtcctttaaacaacaattgcaaattcttattgaagatactacagagctttctgaagaagagtatctgaaatgctacaatggtatttcattaagaatattagtattgtataataatactgatagtttcatcaatattcaaaaattaatgttagaccttgatcccgaaaataaccatattgtattaggatttgattattatttaagttataaaaattatttaggaatcaggaaagatttagcacaatatagacatcgtgaaaatgttaaaaaagctgaggcagaagcctgtgagccacctaaaaaatataatgtaaaaggattttcggaatttttcaaattacattatcaaaaatattttgaaactaggaaaaaatcaattttctatgacaagacttcacaaaaaataattgaggataactatatattaattgaagacttgaaaatatctgatttcattagttttaaatacatttcagctagaagagatgttactaacaaagaaacagataagacattatcattacaaacttcaaagatatacgaaagaaaagaaaatgatgaaaatgaagctaagaaaatagatgattttcatgatactataattaatactgatgaagaattatcaaaaatttacaaagttttttttgaagacataattgaaaaaataaaaagtctaggtggaatacgtgaaaatgaatcagtattaagcgtactttccacattacagtctagagaacttttaaaaggtaatacaactgtttactataaacatgaactgtcggatttaccagaacactataatggtttgggatacctaaatcttataagcatgatctttgaaattgaaataaaaaaatatgagtttcaaaggtctttattagaagctcccgcagatattaatttattgtttatagaagaacctgaagcacatactcacccacaaatgcaatatgtttttataaaaaatattagaacaatcgtgggagataaaatatcaaaaacaattaaaaatgttgataatacagaatttgagatttgccgtagtttacagacaataatttctacacattcttctcatattgttgcagatagtgattttgatgaaattaaatatttaaaaaagacagatactataacttctaaaaatttaaaggatttaaaaaatctatatgatgaaacgggaaagcaatatcaatttcttaaacaatatcttactataagtagggcagaaattttttttgctgacaaggctattttaatagagggagatacggagcgtatacttctaccaacaataatgaagaaaatagatattcagttatctcactctgataaagaagagaaaaaaatcccattactatctcaaaatatttcaattatcgaggttggagcttattctgaaatatttgaactttgtatagattttataggcgttaaaacacttattgttactgacttagatagcactcgtaaagttaaaaaactaaataaaaatgataaagaaatcacaaaaggtgaagcctgtcgtgtcgcaattggagataattatgcaaatccagcacttaaatttttcttaaataacaaaactcttgaagaattaaaatctctcacattaaaagataaatgtttgattaaaacagatgataaatggattccaaatgaaaatggaactgtatgtattacttatcaaactgattatgatggatataccgcaagaagctttgaagattcttttttagctataccacaaaataagaatttagttattagtaaaatagatagctttaaaggaattaaaaatcctagacattttaataatgaaaataaagattcttatgatttagcaaatgaatgtattaataagaaaccccattttgccttagacatcttatatcatagtaatgatgattattctaattgggaaattcctgaatatataaaagaaggtttgttatggttgaaagagaattaa

SEQ ID NO: 73997 - DNA, 1950 bp, Chryseobacterium indologenes NBRC 14944
atggttgaaagagaattaaaaagtgaaatagatcagatttttgatcatatagaaaaaggggataattttttattaagtggtggagctggaagtggaaaaacatatacattagtacagtgtataattggaataattgataagtttccaaatcataagattgcctgtattacatatacaaattctgctgttaaagaaattgaagagcgtatagatcataaaaatttacaggttttaaccattcatgatttcttatgggattgtataaaaaattttcaaaacgaattaaaacatgcaatagttaccctagctaataatcccttgcagaaaaaaataaatatagagagccctagtgtagaaatgttttccgaaggtattagatatatggaaaatctaaatttatctaaaggaataatttcacataatgaattattagtaattgctgaatatttatttgaaaactatgaaaaattatgtgatataatcaaagacaaatttaattttatattgattgatgaatatcaggatactagcgaattagtgataaggatttttctagatcatttcagaaagggttcaaaaaagaatataataggttttttcggagatgcaatgcaatctatttatgaagatggtatcggagatttaaataagtataaagaaaatgcgggtggtttggttcaagaagttaagaaactagaaaacagaagaagtccacttaatgttattaatttagctaataaagtaagaagtgatggtctagagcaattaccgcaattggaaaaaacaaaccctattcccccgaatatgaatgaagatggtacaattaaggaaggagaaattagatttttatattctgcggaaaataatttggataaagttagaaaatatttagaatgggattttaatgagagggataaagacggaaatttaaagtgtaaagagttaaatcttactcataatcttatagcaaaagaatctcaatttggatccttaatggatatttataacaatgaccaaatattagaatataaatatcttgttgatgttttcttaaaaaataatttacaaattcaaattgatgaaaatgatacttttggagatgcaataaaaaaatctggacaagttcctaatggtggtaaaatgtctgacttcattaatgcaaatattgatctatttaacgaagctaaatcatataagtttaatttgtttagaaaaatttacttaaatagtgatattcttacggacgataaaaaacaaaatgaaaaagacttaatcaagaaaggaacaaaaagagataacttattaaaacatttatttaaaatccaaaattgtataaggctatacaatgaaaagagatataatgaatttttgaaaattacagattataagattaattcaattgaagacaagaaaatattacaagatcatatagaagctctttcaaaaactgatgaaaaaacgattggtgatgtaattgaaaaagcagatgaatataaattggtttatgctgacgataaactctatgagtttatacaaaataagcgatatgtttataatagaatttctaaggttaaatattctgaatttattaatttatataattatttagaagggtttactccgttctcaacccaacataaaacaaaaggaagagaatttgaaaaagtccttgttatattagatagaggaggttggaataattataattttgaatatgtttttgatgatggtacagtgtataaatctttagttgaaggaaaatcaaaaacaaaatcaaaattgtcaagttatcctaaaataaaagaaagaacggaaaaaatattttatgtatgctgtactcgttctaaagaaaaactagctgttttctatcataatccgcaaccatctgttataaacactgcaatagcttggtttggtgaagaaaataccataaatattgatgacttctaa

SEQ ID NO: 73998 - DNA, 1983 bp, Rhizobium leguminosarum bv. trifolii CB782
atgcgtattgaatccgtcaccttgtccggcttccgctgtttcggtcctgatccgattacggtgccaatctccgcagagatcacagctgtcgtcggtccgaacgcggcgggcaagacagccctcctgcatgcgctctccaagctattcggcgtgtcgcgtgcgcagcgcaccgttcagcgttcggatttccacctgggcgcagaggacgatcccgacgatcgtgaacccaaggatctgttcatcgccgtactgatcggtttgccagaactggtcgatggcaccgcgacgccggagacgattgcgccctcgttccggcatatgcagatcgaacgggaaggcaaatcgccggtctgccgcttgcgtctcgaagcgcgatgggaagatgacgggaccgtcgagggcgaggtttcgcaggagcttttctgggtcgatacgcttgatgacgatcccgccgaggacaaatgccatccggtctcggcggcggatcgcggtctcatccaactctattacacgcctgccagccgggacgcggcggcccagatcaaggcgacgactggcgcactcgctgctcgcctgctccgcgccatcgaatggtcgtccgaaaccgaggaggcggttcaggaggctaccgacaatctggcaactgctttcgagggcgagtccgcgattgctgcgatcggcaaagccttacaggcgcgctggtcaggccttcacgacgatgttgtcgatacgaagccccggctcagtttggtcagtcgtcggttcgaagatgtggtcaacaagatcgccgttatcttcgagcaggggccggatgggcaggaacgcggtctcgacgctctgagtgatgggcagcaatcgctcttctatttcgcactggcggccgctgtcttcgatttggagcgcgaggttgtcgcggggacagtcgagggcttccgcgacgataccctgcgtatcccggcgcttacgctgtttgcgctggaagagccggaaaaccatctctctccttacttcctcgcgcggatcatccgtcaggtccgctcgctgacagatgccggcggtgcgcaggccatcgtcaccagtcattcgccggccgtgctgagccgggtcaaaccccgtgaggtccgctactgccgctgcgatccgacgacacgcgtctcgacggtcaagaagatcaagatcccacctggcgttgacgaggccgccaagttcgtccgtggcgccatgctcgcctatcctgaactctacttcgcgcggtttgtcctgctcgttgaaggcgattcggagcggatcgtcttgccgcccttagccgaggcgctggacctcctgatcgatcctgcctttgtcgccatcgttccgttgggcgggcggcatgtgcagcatttctggcgattgctgaagcatctgggcattccgcatgcgacactcctggatcttgatctgggccgcgaaggtggcggctttggcagggttaagactgcgatcgagaagctcatcgaatttggcgcgccaaaagccacactcctgaagatcgacaaagggattttgcctgacgccgacttcgcggcgatgcacacatggcaggatgcggaagaccgcaagaacctcaaagcctgggtcgattcccttaagccatatggcgtctacttttctgcgcccctcgaccttgatctggccatgttggaggcgttccccgatgcttacaaggcgatcattcccaagggcggcggtccgaagatgggtgccgataaggccgcggaagtggttcttgggacggcgggaccagggctcacgctctacaccggcccattcaaggactatccggcgcttctaccggcctaccgttatcacttcctcaccaacagcaagccggcgacgcatctcgccgccctgacccacatcaagaaaaaggacttggcggagaagatgcccgcagtactggcggggcttctcaagcacatcgccaagtcgttgcggcgggactag

SEQ ID NO: 73999 - DNA, 1860 bp, Rhizobium leguminosarum bv. trifolii CB782
gtgggcgtggaagcgctcgaagcgaatgcgttgaaggtcgtccgctcggcagacaaccgatcagtcatcgccggccccggtgcgggcaagacggaattgctagcgcaacgcgccgcctatctcctccagaccggtacctcacctgcaccaaggcgcattctcgctatcagcttcaagcgcgacgccgcaacgaacctcgccgcgcgggtccgtcagcgctgccatcgcaatcatgccggacgcttcgactccatgacgttcgacgcctttgctaaggggctgatcgatcgcttcggtcaggcactgcccgaacgctggcggccacggcccgattacgaaatcatatttcccaatgatcgggattaccgcgacttcctgtatcagcaggtcggcacgcctccgacatcggtcggcacttatgctgacctccaggcgatagcggtgaagactttcgagcgccatcatctggttgggtcgccgctcccagtggacggttgggcaaagccgacaccgggcgaatgggcggcggaccgctactggcaaacgtcgcttcacgacggcaagaagagcgtcctgtcgttccctatgatcgggcggctcgccgaactcctgctgcgggtcaatccgatggcgcgtgacgcgcttcgcctgacctattcgcacctgttcatggacgagttccaggatacgacgcagattcaatatgatctggttcgcaccatcttcctcggcaccgatacggtgatcactgctgttggggataacaagcagcagatcatgcgctgggcgatggcgatggatgatccctttactgcctttgacgccgacttcggcgggaagcggacgccgctctataacaactatcgctcgtcgccagagttggtgcgtatccagcatgttctggcccaggctttggacgcccgcgccgtagcgccggtatcgaagaccgcgggcacgatcgcgggggacagttgtgcgatctgggacttttcaacaccggagatcgaggcggatcgcctggcggcgttcgttgccgccgagatgaacatccacaagctcggcccgcgtgatttcgttctgctcgtgcgccagaaagccgccgattatgcggctgtactcgaaccggccttcacggctgccggtattcccctacgtaacgaggccggtgccgtcggcgcggtcatgctgcaggaactgctggcggaagaagtatcggaacttgtcgtcgccattctgcgcctcgcgatgaccaaacgggccggccgatactggacggactgtcaggaagcgctggccgcgctccacggcgttgcgcctgatgaagaggctgcgcaggccaaacttgcccgcggactggacgcttacgcgatcaaactcaattgtgcctaccccaacccaccaaatatgaaggcggtggcgcgatccatagtggacgacattctggcgttcatcgaccgagaacggctggtcgcggttcatcccgcttatggccagggcggctggctcgacaaggtgcttgacgcggccgcggtacatctgctgcagtcctcggtcggtcgagccgactggccgtcggcacttgacgcctatgaaggcatccacgcgattccgctaatgacgatccataagagcaaggggcttgagtaccacagcgtcatcttcgtcggtctggacgatggcgcatggtggagtttttccgacgatcagatcgaggccactgctgggttcttcgttgcctttacgcgagcgagacagcgcgttgtttttacgtactgcgcgcggcgcggtgcccgaacaaagattgcgacactttacaatctcctgggaaaggcgggtgtcccgaggatacaggttggttag

SEQ ID NO: 74000 - DNA, 1749 bp, Streptococcus thermophilus TH1436
atgaaattaaaaacattatcaataaaaaattttagaaatttcgaagatatttctattactctctcaaataaaaatgttgtgtttggaatgaatgatgttggaaagactaatttcttatatgctttacgatttttattcgaacgtaaaatcagaaacaaaggttttctagaaagtgatttttttcaaaaagatacaactcgggttattgaaatttgtttagagattgatattagtgatcacgagactgattttgactcacaaaatattatttcaaaaattggtaaagagagggatagtgggaacttaaattctgtttttataaaagtaatcgctaattttgatgaaaatgaattttttggaattcccaaattattttggggaaatcaagaagaagaattacaaaagattccaggtgaggggactttctgtgatcttgatagattatttcatgtagtatatgttgatcctttgattgatttagataaaatattttctttaaataagagaaagatctttagtaaacaaaaaactcaatcggatggagaattattggaagatataaatgtattagctgaacaaattaattctaagatttcaacaatggagagcgttacgaaatttcaagaaatattgacaaatgaatatcataacttaaaaaatgaggatatttctgtagtattacgttcagaaatggtaataaatggagtatttaatgatttacatccatacatcactaaaaatacggatgtaacaaaaaagttatatccaacatccggtgatggacgtaagaaaatattagcgtattcactactaaaccatataactgaggagtttaacactaacagaactattccaatatttttaatcgaggagccagaaaacagtctgcaccgatcaatgcaaattgctctatcgaaacaattgtttaatcaggaaatttatagatattttgtaatgtctactcattcttcagaaatgttatatgaaatggataaagcaacattaatccgattatgtaatgaggatagaacaattgctaagtcatttttatataaagttagtgaggaattttcaaaaataaaacgtgaactaaatgagtcattgactactgctttatttgctgatagggttttattaattgaaggtccatctgaaaaggtattatttgaaaaaattcttcaagaaattcaaccgaattatgaattagaaggtggatatattttacaggttgatggaataaaatttaaaccatactataaaaccttgattaatctgggtattatttgtattattaaaactgataatgatttgaaagaaacgacgaagaatagtagtaagcaatttgaatacattggttataatagatgtgtaggcttgcttgatgggaatgaatggaaaaaatgggaatatgaaaacggttatatagcgattgattacagttctagtgacagagaggataaaattaaagagtggaagaaaagtaattttactcaaattcaaaaaattcaacaacttagaaataaaaatatttatttatcaaaagttgatttagagaatgatttaaatgaggccattccagaaactttggagttatggcgcaaccttaatcatgatgctgtaccttatctccaaaagcaaaaattaattcgaatgattaaactttgtgattttttaaaagaagaagattgtcagaaaatatataatcatagtctttttgagtgtttgaagaaactaacaggagatttctaa

SEQ ID NO: 74001 - DNA, 1614 bp, Streptococcus thermophilus TH1436
atggagattagtgatcagaaaattaggaatgatattctaaattacaatggtagccttgttgttagagctagcgctggttctggaaaaactactattatggtagaaaaaattaaaaaagtattagatgaaattaaggatcataagacggtagcggcaacgactttcactagaaaagctactcaggaaattcgaaagaaatgtagagaactaggaggagaaaaaacatttttagtaacaacaaacgatagttttgttgagcaagaaattattaggccttttattaatgatgcacatagaacacaagaagttaaatgggatgaagtagatctgagcggattgaacatatctaattataattttaactcattagatttatcggattttagtaattcatatgatagaaaagattcaaaggcaacatatggtttactcctaaaagaactaatagataatcacatattagcaaaatattttgataataaaaataatttcaagtttgaattagcattatttattctaaaaaatagtaaggcgtgtaaagaatatttaaagtataagtataaaatgatctttattgatgagtatcaggattcagatgggacgatgcatgaactatttatgtatttaaacagtgaattaggaattgatatttttattgtaggagatgtaaaacaggctatatatttatggcgaggtgcaaaagaggatatttttgaaaaaataccgacgaatattgagcaaaaagaattgtggcataattttagatctcactttgaaattgttaattatgctgctgtgatacatgaacctaaagcaatatactctatatcagggcagacaagcggtcgagtgaagattgttgatttagaaatacacagattaggagaattattgaattcgtcattagtagacttaaatagggaaattacgattattatcagaacaaatcaagaagctcaaaaattaaaagatgaacttctagataattatgatttgaattttgaatttattccaagtacaccattggatcagaatcagagtgaaaatacatttattttgagattgatagctaaaaaattttatgatagaaatttttcaatgtttgattttgctgaagaatgtggattagaaataagaaaaaacaaaatagaggaactcaataggacatttaatgagctaataaatttatttaacctttctatgaatgaagaatttaacttagatctatttaataaaattattcaagatgtaagtattcaaatagaaatatcattttctgaaagtgagcttatgtggttaaaggaaacactatcaaatcacacttttcgtgatgcatttgtgccttcgaaaaataaacataagattatgacaattttttctgccaaaggtttagagtttgaacaagttatcggatttgggaaagattataatttaaaggatacgaatcaaagaaacaatcattatgttctagtgacaagggcaaaagacaagttaattttaattaatgaaattaatggaattaatggaatgaattatttagagcaagttgatgaaaagataagtaaaaatagtaaatcgacttcagatttcttttatcagcatagttatttttaa

SEQ ID NO: 74002 - DNA, 1992 bp, Vibrio parahaemolyticus SBR10290; identical to SEQ ID NO: 72330

SEQ ID NO: 74003 - DNA, 1752 bp, Vibrio parahaemolyticus SBR10290; identical to SEQ ID NO: 72331

SEQ ID NO: 74004 - DNA, 2076 bp, Fusobacterium sp. OBRC1
atggttttaaagaaaatagtagtagaaaattttcgtttgttaaaaaattttaaattagagcttaaagatgagctatctttaattatagggaaaaacaattgtggaaaaacatcagtccttgtcattttagataaaatgttgaattcatatgagattgcatgggaagatgtaaatttagcaaaacaaaaagaactatacaatgaaataaatgaatttaatggaaccattgaagaaggcaacaagtttcttgaagcaattaaacttcaattgtatgttgaatacaatgatactgattcttatgaaaatattcaaaattttataatggatttagagccagaaaataatattattcttttagaatttatttcatcaataaatataaaaaatattttagagttaaaagatataataaaagaaagagaaataaaagatttttcaactttttcaagatatatgagtaaaaattttacaaaatattttaaaataaaaaagtattccagaggttatgataaagaaactaaaaagttaatcctagatatgaaagaggaaatagatagtaaaaatatacaaaaagtgattaaagttacggggataagagctgatagagcggtttctaatgatgaaggaaatcatgctctatcaattctaacaaatagatattatgaaacttatagaaaaaatataaaagatgaaagcaattccatatttcaagagcttgaagtagagttagaaaaggcagataggacactatataaaatttataatggggaaaaagcagatgatggaaaagattcagaaggtatatttagagacattatagatgttgtaaaaaactatggtggttatgataatgggattaatatttcaatagaatcttcaatctctgaaaagaatttattaacaaacaacactagtttatattataaacatggtgatggggatagttcttcacttccagaaacttataatggattaggatatttgaatttaatagggatattatttgaaattgagactaaactacaagaattgtatgaacaacctgctgatataaatattttgtatatagaagaaccagaagctcatacacatccagaacttcaatatatatttataagaaatattaaaaatcacattaatagtcatagaaataagttgaataaagaaaaaaataaatatcttcaaataataattacatcacattcatctcatattgtctctgaatgcaattttgatgatattatttatttaaaaagaatagataataatattttagctaagaactttaattctttgaaagaggaatatggtggagatgaaaaaaaagaatttaaatttgtaaagcaatatttgacattaaatagaagtgagttattttttgcagataaagttctttgtattgaaggagatacagaacgcatattaatgccagcaatgatgtataaagttgataaaatgcaaaattcaaaaaatgaatcaactattccattgttgtcacaaaatatttctataattgaggtgggagcatattctcatgtttttataccattatttaaatttttagggataaaggtcttaattattacagatatagattctgccgtaaaaaataataatggtaaatatgaaaaatctcatccaaataatgcaacccatacaagtaatgcttctataagagaattttttaaagaagatggtttagactatggaaataaccaatttaaagaacctatagaaaagaaaggaaaagataaaataaaagacagaataagaattgcttatcaaattcctgaaattgaaggagattatcaagctagtagttttgaggatgcttttatatcactaaataaagattttattttaagaaataaagataatctttatgactatggagcattaaaaaatttcagtaaaaaggaaataaataatgatttttataagttttctttaaataaaattgaaaagaaatcaacatttgcatctgccttattatattttgatgaagaagaaaatgatatggaatggaaagttcctcgttatataaaggagggcttactatggatacaagaattttag

SEQ ID NO: 74005 - DNA, 1908 bp, Fusobacterium sp. OBRC1
atggatacaagaattttagaaaatgaagtaaaggtagctttaaaatgtatagaaaaaggagtaaattttatattagagggtggtgcaggaagtggaaagacatattctctaatttcactaatagaaactttaattataaaatcatctgaaattaagattgtatgtatcacatatacaaataatgcagttgcagaaattaaatcaagaattgataatgaaaatctttgggtttcaacaattcatgagtttatttggcatgtaattaaaaaatatcaaaaagaaataaaaaatgagttagtacttcttattaatgatgaaataattaaagaatttaaaaagccaaaagacttagaaaataatttaattacaatagattattttaataatatagatgttgaatatgatgaatattattctatgaatccgaatgctgaaaataagattaaaattagccatgatcatattttaattttggctgaaaaaatgcttgataagtataaaaagctatcagatattttgaaagatatagctaattgtatttttgttgatgagtatcaagatacaagcccatatatagctaaaattttattagaacatcttaaaaaaagtaaaaagaaaaatgttataggattttttggggattcaatgcaatcaatatatgatgaaggagtaggagatttaaataaatataagttaaaaaaaatagtaaagaaacaaaatcgtagaaatccaagaatagttatagaaatagctaataaatttagaaatgataaaataacacaaattccttctaaggataagaatactcctaatatggacgaaaatggagttattattgagggtaatattaaatttatatatggaaaagagcaagaggatataaattttcttaaaaataaagctcttttcaaatcatgggattttttagacggaagaaaaactaaggaattaagactaacccataaatataattctgagatggctggatttaaaaaattatatgatttatacaatgatgatttaataattaaattaattgataatattcaaaaaaacattgataataatgaaaataaagaaagtgtattaaatgaattagtactggaattaagaccaatttataataaaaaagatttatttgaagaaattactggtaatgaaatatataacttaatttaccaagatataaaaaatttattatggaaaaatgtattagaaaaatgtaaaattagtaaggaatcattgatgtcttataaatttaatggaataaatggaagatacgagactaattcacacagagataaaattttgaaaaaattagatgttttaaatgaattaatagaattgtatgaatctaaaaaatttaatgaatttttaaagaaaacaaatttttctattcaaaataaaaatgataaaagtaaactaaaagaaataatgaatttttttatgcttgaagatagaaaaacaatagaagaagttttagatttctcaaaaaaacaaggtttgataagagaagatgtggactttgataactatattagtgcgaaaggtttttatttatgggaaagaataaaaaaaatatcttttaaggaatacagaaacagtatcctttatttgaaagaattttcaccaatttcaactcagcatagtattaaaggaagtgaatttgataatgtacttgttgtgctagaatcaaattggaataaatatgattttaaaacactatttggaaaaggttcaaaaaatgaaaatgttaaaaaacgaacaagaaaattattttatgtttgcatgacaagagcaaaaaagaatttagtaatatatatgcctactgaagatttagaaataataaattcagcaaaagattattttggagaagaaaatgtactttcaatagattcaatgttatga

SEQ ID NO: 74006 - DNA, 1767 bp, Shuttleworthia sp. MSX8B
atgagattagaaaaactgagaattaaaggatttcgcaatttcaatgatacagaagtagtgtttcaagagaagtcccttatcattggtgctaacgatgtgggaaaaacaaatctcttatatgcattaagactcttatttgacaaaacaatcagcgagcacgatttggaattgtccgatagtgactataatgcatattctggtacggatgctattgaaataaccgcgttcttctgcgaagttactgaggagtgcttattaagtacttttggcggtgcagttaaggatggtaaagtggttattagatactcaaatcataaaggcggtacgtataagatttgggccggttacgacactacaactctttctgaacttcagactaggcaatacattaaaagactgaatatgcagtatgttgatacaaatcgaaatctgttttctttcctaaatcatgagagaatcagaatgctgcaaatggcaaaagagaagttatctgctgaggatgtcgcttcagacactcaaaagatacagcaaatacaagatggtttgaatgcaattaacaatgatattagttctttgcattatatttccacttctctggaacaagtgaatagcgaattaggaaagttatcggtacataacgaagaccagactgttcgctttatagcaggagagagtaaggctgataagctactcgacaatctgatcttagcatattctacgggtgatactcctttgtctataggtggagatgggagaaacaaccaaatttttcttgcaacatggattgcaaaacaacatattcaggaaagcattgatcatgtaactttttatgcgattgaagaacctgaagcacatttgcacccgcaccaacagcgcaaattatctgcgtatattcaagaaaactttgatgctcaggttttcgtaactacacattcaccgcatattgcatcaagattcgatcctgccagtatcgtaaggctgtatgccgagaacaagtacacttttgctgcttgcggtggatgcagtcacatactgaaaaccgtatttgataacttcggatatagactgaattctttatcagcagaagccttcttctctgacggtgtttttctggttgaagggacttcggaagtgttgctgtatacggctttagcgaaagagatagaccttgagttggatcgacataacatatctgttctctcagtcgagggaataggctttaagccatatgtggcagtattcaatgcgctgaatattccgtgggtgctgcgaaccgataacgatattttctcaaagccgaagaatgctccaacaaaaaaatactttgccggcatatcacgaataatggggattattgagggtatcggtgacaacagtaccggattactcaattattgggagtctcattctcaagagaatgagtgggataaagataaggaaccccctgaatctgctgcgaagttaaatgtttatataagggcattagcggagcatttgggcattttcctgtctgaaactgacctggaaaatgatcttgcaaatagcactttggctggtgcacttgtaacgcattatgggaaaagtgaacattcagctctcgtaagttcgatgcaaaagaaaaaagctgaaaacatgcttgaattcataaacagcaattataagaatctctctgttctcaaaggaagtaaaatagcagcgcctcttgaaatgatagttaacacagttgtgggaaaggtgcgtcctggtgatgataagacaaccgactga

SEQ ID NO: 74007 - DNA, 1593 bp, Shuttleworthia sp. MSX8B
atgataagacaaccgactgatgagcaaaacagaataatcagtcatactggcaatattgtagttactgctaagcccggatcggggaaaacatacacgatagtcgaaaagatcgcagatatactccctggtttgcctgcgcacaagggagtaattgctatatcgtttacaaacaaagcaagtgacgaattaaagaaacgctgtaaatatcggtgttccgatacaaaacaatccttctttgggacaattgataaattttatatctcacaggttatcattccttttgcaagtcatgttacaggcaaaacaactgactttgaaattattgacacagtttccgaagaaagccgatttgctgctctttcaaagtgtgagggcgagctgtcttcgacaaaaactgcacttttggttgaggggttgtgcgaaggtaagatttttctaaaatacaccggtgaaacagcaatgtatctgttggaaaatgtgccaggggcgctatattatattaaggcaaggtattcccatattatcattgacgaatatcaggactgtggggatattcaagataaaatctttctaaagttagttgaaaatggtttgattggaattgctgttggtgacattaatcaggcgatatacggatttacaaaccgatttcctaaatatttgattgccttaattgggcgaaccgattttacacattttgagttgaccagaaatcacaggtgccatcctgggatttctgaatactcgctatgtctttttaatgcatcaaaaacaataccagaagacaagagagtttttctagttcgtgttgcgggggatgaacgtaatattgcagcagcaatagatgctcgtattgatgcaataaaagaaaagtacgacgtttccaataataatcaaatagctgttctatgcagaagcaatagcactgtttctataacaagcaatgccttgcggacgccgcataaaatatttgaagagaccgtgcttgatagagacaactctgaatccggacggttttttcgggagcttctctcttcttgtttcgacaaaaatacgtttgctgttgactatgctgaacagctattctctgaagaatttgagccaacaaagtatagatcagctcttctattgtgccagagagttttcacatatccccttgacactttctacgaagcagaaagtgacatcaaagagctcgctaaattggtttgtgcacaaaagataaccgcagcttcggtgaataatcttcaatcagttataagagatacccaacaactaaagaattatattcctgcgttggacgatgagattaacctgatgacgctacataaatctaaggggctggaattcaatattgtctttcacatggacctgtacaaatggataatgccaaatgaatacggcgatgaaacgtccattcttcaagatttaaatcttcactatgttggaataacaagagcaaaagacgtgtgttatattatgaatgggagtaggcgttataggaaaagacaaaatgattttatttccgctgagccatccccttttcttaacagacccggactcgtagaaagaagatacgatgtttgttggtaa

SEQ ID NO: 74008 - DNA, 1758 bp, Streptococcus sp. ACC21
atggaatttaaaaaactagtaattgaaaattttcgtaattttagttctattgaggttgctttatcaaataaaaatgttatatttggaatgaatgattcagggaaaacaaatcttctatttgcaataagatacctcttggacagaactatacgaaataaaggttttattaaatcggattatcatagacatgatactagtagacctataaaaatacaacttgagcttgatttgtctgatagaaaaatggagggggatgaagaatcactaaaatcttcacattctcgtcttctaatttcaacggtagctggagcaagaaataactctagcttagatacattctttatctcattagaagcagtttataatgagaaagagttatttggaaatccggtattaagctggggctcaacactagataatttagtggaagttcctcaatatggtacaagaagtgacattgataaaatattccaaatagtttatgtaaatcccgctatagagttagattccttttttaagcgaaatagaaggatattgttctctgatgattctaaaactgatgaggatgtaaagcttgaggaagagattgagaataacattgaaaaattaaatgaaaatatttctaacttacatttgattactagtgttcaatcacagttgactgaagcctataaaagttatcgtaaagaaaatttagaaattaaaattcaatcagagatatctatttcaggatatttagacaatctcacaccatacattaactggaatgatgatactcacaattatccgacgtcaggagacggtcgtaaaaagcttttatcatatgctattaaccatttaatttcagagaaacaatacaacaagaaggtaattatttatttaattgaggagccagagaatagcttacatcgttccgttcaaatctctctttcaaagcaactttttgttcagaatatttatgaatacttttttctaacgactcattcagcagaagttctttatgaaatggataatactcagctcattaagataaccaatcaacaagatgcaacagggcaatcagtctattacacagttcctaatgaattttcaaacttaaagaaaaaattaaataaatcgttggctcagtcaatcttttatgataggattcttttggtcgaaggtccatcagaatattatctattttctgctatttttgaatatgtaagtcccaatttcgaggctgatggaaagtacttattacaagttgatggaataaattttaaaccttattcagagctatataaggaattagggattgatttttggattaaaactgataatgatttaaaagctagtcgtggagataaacatgtattttctcctattggcttaaataggtgtattgacttgcttgaccatagtgcgactcctagattagataattatcgtatagatttctcttcaaaagatgagagaaaacagaatataaagtctaaaaaagaagaattatatttgactaatcataatctagtattacaattaaatgcagacggaatctttatatcggaaattgatttagaaaatgatttagctcaggttttatccgatagcgagagaaatgaaatgagtaaattagattttgtgaattggttacaaagcagtaaacaatacaatatgctagaatatataagtaatcatcttactaaagagattgcgcttaagattgtggaatcaggatattttaaagttttggcggagtttttagactatgagtga

SEQ ID NO: 74009 - DNA, 1539 bp, Streptococcus sp. ACC21
atgagtgatattgctacacaggataagaatgtcaaaaaagaattgttagaataccaaggaaatattttaattttagcgaacgcaggttcgggaaaaacaacttttttaactaaaaagctaaaaagtgattctaaacgattaaataattatcaaaaattagcggcaataacttttactcgaaatgcaacggaggaaataaagcaaaaattagttgatattccggacaacgttgttgtatcgaccatagattcgtttttagataaagaaataatccttccttttcttaatcagaaatacgaaattcaaacatctgtacagtttagctttcggatagaccataattttagcgactatagcactggaataaaacaaatattacaggatggtattttcgggacttacgactttcctacttctaaacacggcaagaatttcaaatgtgaagttgctttagatattttgaagacaatagattctgcgtcagaatatataaaatataaatttaatactttgtatattgatgaatttcaagattgtgaccagtctatgaatgatttatttctgtatctaaaaaatgagttagggattcctttatttattgtaggagatgataagcaatctatttatcagtggagaggagcatcacccaaatatataaataatttatggaaaaacaaaaatgattttagaaaaaagagatttattgggaattttagaagtttgcctagaatagtggatttctctttagctctgactcctgaagtgactgtcgataatattagagaagagggttcaattctatatttagaacctaaacaggattatccaaaagaagatattattaagtaccttattgataatggtgatataaatttacaagaaaagaattattttttaattggaattaataaagatattgaagaaactgcgacacatttgaatgatattctttcaaataaagttgattacgttagaaaaaatccatttatagattgtactaacagtaattttttgcaatctatggctcaatattattttcttgaagacttttctgagtatgatatattgaataatctttttcctgaatataacgatgaatttaggaaagaacttttaaaaaaattaaagaggcttcgtcaacgacctacacagtcacttattgaggaaatagcttcgtatttagatgtttcaattacaaattatgaagataagttagaaagtcaaatactgttggaaattttgagtaatttggataataaaaaattgtttgatacaaatttaatgagtaataatttattaatgactactcatgcttcaaaaggtttggctgcagacactgtagtaatttttgtagaatatctaattgattggcgcacaggattgaaatttgaagatcattatgttgcaattactagagcaagatcaaaagtcataattattgataatcgaacaatttatactagtgaaatcaatagattattaagtaacaacaatgggaatttttcttttgaagattttatagaaagaagatatatttga

SEQ ID NO: 74010 - DNA, 1767 bp, Providencia alcalifaciens R90-1475
atgagtattcagatagatacagttcgtatttccggatttagagggatatcaaatattgagataactcttccaagagtaaccgttttactagggcaaaacaatgctggaaaaacgtcagtaattaaggcattacagttggcattaggtgactattcgcgctttttgtcagatgaagactttaatattggagaggatgataagcgccaagaaaaaatcactgttgaccttcgatttatagccttggatggtcatgccagaacaaacgagttttcggaagagtggcaacaggagtttggcgataaaattcaagctgaggcagatgggaagcaatttgttgcgatccgaactacagccgaaccagacaagatgaaagggggttatattgttgaacgctatcatcttgactcatggcctgaaaaaaacggttggaatgaagtaataatcactaaaaaaaatcgacttggaaagcgtttagagtctgttccatttatatccatcgatgctcaaagggatatacatagcgaactaaaagaaaagacttcctttatcggccgtgtattatcaagtgtcgaatataacgatgatgatgttgttgcgctagagaacatggtggcaaatattaacaaagaggcaattgaaaagagtgagcctcttaaacaattgaagagtcatctggacaacctgaatcaatccttcgaaggtaaagggcaaacagagttaactccttttcctaaaaagattagggacttgtctaagcgctttagtgttcactttggtgagtcagataaaagctcattttccatggagtatcatggtatgggaacccgcagttgggcatcaatgttgacagttaaagcatttacagaacttatggtaaaaaaccatgaggaagaagtagagccattttttcctattttggcagcagaagagccagaagcacatttgcatcccaatgcccagagaacgctgttcgaacaattgcgagataacactggccaggttgtcattagcactcactccccttacttggttggaatgtcagaccttaaagatctacgaggactgattaaaacttcacataccgttcgcgcaactggtttgattgaagggttagatcccgaggatattaacatcctgcaacgagaaattatgagattccgaggggagttgctattctcaaaagctctaatattatttgaaggggtaaccgaagagcagattatccctgcaatgtttcaagcatactttggtaaaactagcttctcactcggtgttaattgcatcagtgttgctggcaaaaactacccaccattcataaaaatggcacagagcttcggcattcctgtatgtatcattagtgacaatgatggtgaaactaaaaaagaagttgattctcagattaataaaatcaaggaaaacacgcctctaactcttgcagatgacgagttttcgctcttctatctttctgacggtaatgatattgaagcagaattactccttgtacttgggttacgagatgaagttattgaggccttggttaaaactgaaacgagagggagcgataatactcgctacatagaggctaaaacggcagagctttctgcattgaacaatgaagctcttgtcgagaaaatgagagcttcaaaagcttcatatgctggctttttggctgatgtgataaataggaaccccatgaatcgtcccatcgatgaactagttccttctgctgcgattgaagcattcaagaaattgaaggagtgggagtag

SEQ ID NO: 74011 - DNA, 1896 bp, Providencia alcalifaciens R90-1475
atgttgaacttatcagagagtcaggcccagatagtcaatgcatcattggctaatccaatacaggtgttagcatcggcgggctctggaaaaacccgagtattgaccgaacgagttcgatacatcctggataacaccaaaagagatggaattattgctctgacgtttacaaataaagcagcagaggagatgacggctcgccttgctgactgtgatgatgctgaagatagagcatggattgcaacaattcattcggttgcgcagcgtatcttggaaaaatatggccatacagtaggtttgccaacagaactttacatctatgatagagacaaagacagaatggaagtttttatgcaatcgctacgagatgatggagttgatattgacgagtatctaaacatagctgattcgaaggagctaagaaacagagaaaaaaatcttcaggactacatggatattttctcaaaaatcaaacgagagttactcacagagctggaagtggctgagctatatccaaacagcaatatttggaaagtatttcaggactatcaaagttcattgatcaatagtggcgggatcgattacgacgatattttggtatatgcccacagaatattgctgacccatgaatggatcgcgaaagtatacagatctaaatacaagcacgtttgtgtggatgaagctcaagatctaaatcaggctcaatatgaatttattaaagctctttgtggagatgtcataaaaagtgttttgatggtaggtgaccctaaccagatgatctatgggtttaatggttcatcgaaggactatctctgcacacattttgtagatgacttctctccccaaaagtttgaactgaaagaaaactatcgtagtaccaaggctgttatcagagccgcgaatagattgaagcaagattctcaaaaggagattgagtacgccctggaggggaaaattaacatttcggaattcgacaccgaagaagctgaggctgattatgtcacttcaaccattcaataccttttgagtttgcaatcacacgatgaaatcgagggagaattatcactggataagatggtagttattgctcgaaatagatttgtatttagcaagctagaacgcagccttaaagagaagtcaataccctactctttacgaaaaggtgagaggcaactggagccttcaacaacatttggtaaggttctggactatgccttgcgtatcaaattaaacccaaaagattgggttgatggtaagaagctctgtcaggtactcagtatcgcagaacctgaaagctggacttcagaaactttgttgagtatggccgctcaagtctctttcgtcaagggagagagagcagagctattgtcaaagcttctttctgcgattgacggcttagatattgaaaaccctaagattccaaaactcgtacaggaatttaatgactacctgacttctttggttgagaaccagagtgaggttcctgatgataaatctgaagacgtcaagttaagcctcgaagagcttaaagagtttagtggaatgtggacccggttcaagcgtaagggcttcggtgattcattggtggcatttagaaatgcattggcattaggtcaactttctgagagcagtatagatgaaggcctaactctaagtactgtgcatacaatgaagggactggagaaggatattgtatttttaataggcatgtgcgagggggtttttcctgattacagggccagaacggccaaagaacttgacgaggaacgcaataacgcctttgtggcggtgacaagagctaagcgttggttgtatgtgtcttatcctaagcagagaatgatgccttggggcgatcttaggtttcagcagaagtcgcgtttcatcagtgaaatcgagtaa

SEQ ID NO: 74012 - DNA, 2190 bp, Staphylococcus aureus M0630; identical to SEQ ID NO: 71982

SEQ ID NO: 74013 - DNA, 1794 bp, Staphylococcus aureus M0630; identical to SEQ ID NO: 71697

SEQ ID NO: 74014 - DNA, 2190 bp, Staphylococcus aureus M0636; identical to SEQ ID NO: 71982

SEQ ID NO: 74015 - DNA, 1794 bp, Staphylococcus aureus M0636; identical to SEQ ID NO: 71697

SEQ ID NO: 74016 - DNA, 2190 bp, Staphylococcus aureus M0645; identical to SEQ ID NO: 71982

SEQ ID NO: 74017 - DNA, 1794 bp, Staphylococcus aureus M0645; identical to SEQ ID NO: 71697

SEQ ID NO: 74018 - DNA, 2190 bp, Staphylococcus aureus M0658; identical to SEQ ID NO: 71982

SEQ ID NO: 74019 - DNA, 1794 bp, Staphylococcus aureus M0658; identical to SEQ ID NO: 71697

SEQ ID NO: 74020 - DNA, 2190 bp, Staphylococcus aureus M0668; identical to SEQ ID NO: 71982

SEQ ID NO: 74021 - DNA, 1794 bp, Staphylococcus aureus M0668; identical to SEQ ID NO: 71697

SEQ ID NO: 74022 - DNA, 2190 bp, Staphylococcus aureus M0671; identical to SEQ ID NO: 71982

SEQ ID NO: 74023 - DNA, 1794 bp, Staphylococcus aureus M0671; identical to SEQ ID NO: 71697

SEQ ID NO: 74024 - DNA, 2190 bp, Staphylococcus aureus M0709; identical to SEQ ID NO: 71982

SEQ ID NO: 74025 - DNA, 1794 bp, Staphylococcus aureus M0709; identical to SEQ ID NO: 71697

SEQ ID NO: 74026 - DNA, 2190 bp, Staphylococcus aureus M0729; identical to SEQ ID NO: 71982

SEQ ID NO: 74027 - DNA, 1794 bp, Staphylococcus aureus M0729; identical to SEQ ID NO: 71697

SEQ ID NO: 74028 - DNA, 2190 bp, Staphylococcus aureus M0730; identical to SEQ ID NO: 71982

SEQ ID NO: 74029 - DNA, 1794 bp, Staphylococcus aureus M0730; identical to SEQ ID NO: 71697

SEQ ID NO: 74030 - DNA, 2190 bp, Staphylococcus aureus M0511; identical to SEQ ID NO: 71982

SEQ ID NO: 74031 - DNA, 1794 bp, Staphylococcus aureus M0511; identical to SEQ ID NO: 71697

SEQ ID NO: 74032 - DNA, 2190 bp, Staphylococcus aureus M0524; identical to SEQ ID NO: 71982

SEQ ID NO: 74033 - DNA, 1794 bp, Staphylococcus aureus M0524; identical to SEQ ID NO: 71697

SEQ ID NO: 74034 - DNA, 1785 bp, Klebsiella pneumoniae subsp. pneumoniae SA1
atgcggatttcccgaatccggttaattaatttcgccaacttctccgacgttgatgttgaaacgggtgagagtattgttattgttggtgaaaacaaggttggcaagagcaattttattcgcggcctgcaactgattcttgacccagcgttgtctgagcgtgaccgtcaactgggttttgaacatttttgggatggattgggcgaagacaaattgggggagaccattgaaatttcagtagatttcactgatttcactgacgatccccgattgatggctcatcttaatgactgtgtccttaatccggggcctccgatggtggcccgccttacctatcgctttcagcccaaaaccgagttaaatcgagctccagaatcgttaaaagattatgagtatgtgatcttcggtggtgctgatcctgacatgcatattggtggtgcgtttcgtcgtatgttgcccatcgatgttcaaggcgcgttgcgtgatgctgagaaggatctttcaagttggcgcaattcacccttgaggccgcttattgaagaactttccgcatctctggacgaggaggatcgtgaggagattcaaaccctggtcgatgaggctcagcgggaactggctgggcatgatgaggtggtggcgacagccgaacgaattagcgaacggttgattgctatagcaggtgagcaacatgccgttccggtatcgctcggacttgcaccgactcgcgttgatgcgctgctacgtagcctgcgtttgctgctcgacagtggcattcggggcattggcgatgccagcttggggacagctaatctgatttttctggctctgaaaagcctcgaacttgatcgtcttgttgatgacggagagcgagaccatacgtttttcgtcgtcgaggagcctgaggcacatttgcatccgcacgtacagcgcctagtctaccgttatttcctgggtactgacggggagaatggtgatgaaagggcaccgctgacaacgatcctgaccacccattccccacatattgccagcgtcacgcctgtcagatctatcgttctgctgcgtcatgacgcagaggacgagaagactattgctgtttcaacggcgaacgcaccgtttacgcagcgggacgaagatgatctgcagcgctatatcgacgtcacccgcggcgaaatattcttttcacgtggggtgatcctagtggaaggggatgctgaacgctttcttgtccctgcattcgccgatgctcttgatattcccctcgatatgcttgggatcacggtgtgctcgatcggtggaacaaatttcactccgtatgtgaagctcctggggccacgggggcttaatattccgcatgtgattttgacagaccgcgatcctatggcggttggagagccgctggttcgtaggagacttatcaatattttagacgtgcttgagggagatgttgaccatgatgatatggataccgatgaagtgattgcacgtgccggggtgtatggatgctttgtcaatgagatcaccttggagcctgagctgtttaccggtggactggccgaagccatgcagtcggtcattgagcgggaactatctctggcgcaagttaccttagatcggatacaggcatggggggatgacacggaccagcttgatatagcccggttgttgaaactaattgagcgaattggcaaagggcggttcgcccaggcgctggcaacttcggtgtcggaggatgtttgtccggattacattcgcgaagcactggagcatatccgcgatgccgttgcgtag

SEQ ID NO: 74035 - DNA, 1818 bp, Klebsiella pneumoniae subsp. pneumoniae SA1; identical to SEQ ID NO: 73689

SEQ ID NO: 74036 - DNA, 2316 bp, Klebsiella pneumoniae IS46; identical to SEQ ID NO: 73440

SEQ ID NO: 74037 - DNA, 1878 bp, Klebsiella pneumoniae IS46; identical to SEQ ID NO: 73441

SEQ ID NO: 74038 - DNA, 2190 bp, Staphylococcus aureus M0284; identical to SEQ ID NO: 71982

SEQ ID NO: 74039 - DNA, 1794 bp, Staphylococcus aureus M0284; identical to SEQ ID NO: 71697

SEQ ID NO: 74040 - DNA, 2190 bp, Staphylococcus aureus M0352; identical to SEQ ID NO: 71982

SEQ ID NO: 74041 - DNA, 1794 bp, Staphylococcus aureus M0352; identical to SEQ ID NO: 71697

SEQ ID NO: 74042 - DNA, 2070 bp, Peptoclostridium difficile T17; identical to SEQ ID NO: 72494

SEQ ID NO: 74043 - DNA, 1866 bp, Peptoclostridium difficile T17; identical to SEQ ID NO: 72495

SEQ ID NO: 74044 - DNA, 2070 bp, Peptoclostridium difficile T14; identical to SEQ ID NO: 72494

SEQ ID NO: 74045 - DNA, 1866 bp, Peptoclostridium difficile T14; identical to SEQ ID NO: 72495

SEQ ID NO: 74046 - DNA, 2190 bp, Staphylococcus aureus M0002; identical to SEQ ID NO: 71982

SEQ ID NO: 74047 - DNA, 1794 bp, Staphylococcus aureus M0002; identical to SEQ ID NO: 71697

SEQ ID NO: 74048 - DNA, 618 bp, Xenorhabdus szentirmaii DSM 16338
gtggaaggggatgctgaagaggttttgctaccgagcttcgctgaatccattggatataatcttgaccagcttgggattacggtatgtaacgtagcagaggtgaattttgaaccttatgtaaaacttacagccagcctaagaataccctttgctgtaatcaccgattgggatcccctagacggaacaaagcaacccttgggtaaaaatcgttcaatcagtatttgggatgcatattgttcagtcaggcctgaagccccaaagttcacacctgaaaatataacttggttgaaagcagtaacttttgatgagtgcaatccttgcttcagagatagaagtatctttttaaactcattaactttcgaaatagctatagccaatacgccaggtctaaaggaagcacttttggatattctcgatgaacagggatttggtgcattgcgctcatccagaattaagtcatggcgttcaggtcagcctgtagtcccggcacaacttctaacaatggtttctgacgttggtaaggggcgactggcagccaagctcaagaaaaaagcacctggtctgacgccaccggaatacatttcagcggccattcattatgtcacatccaatgtttaa

SEQ ID NO: 74049 - DNA, 1587 bp, Xenorhabdus szentirmaii DSM 16338
atgatgttatggatccacgaggcgtggcgtgtatcacttataataatgaggtgtgcagcagagctcgagaaacgattaaccgactttggtgttgcaaacagcgaaagaaactttattggcaccgtacacagcttcgcacttaaccaagtaattatcccttactcgcggtgcataccaaatctactgccaaaagattttcgtgtggctacaaggaatgagtgtcgtacagctgtagaagaagcttataaaacattattcggcaatagcggggatccccatgcacgctggcgttttgctgaagagaaacgacgtcgggatgtgaatcgtcttttacctgtctggcagaataaaaaccctgaactggcaaaattcatagaaacttacgaggctgaactccgacgttctggcctgattgactttgatgatatgccactcatcgcttttcgtatgatcaacgaacatatttggattcgtaatgcaattcagtctcgctatcctgttttgtttgtagacgaatatcaggatcttggttgtgtccttcatgagcttgtactgcttctttgctttgaaggtgggattaggctattcgcggttggtgatgctgatcagtcaatctatggattcaatggagcaaatccgagcttactcgaaagcctccaatcactaaaagatgtgaagactttcaggctccgattcaactatcgctccggctcgaaaattatcagagcatcactgggcgctcttggtgaagaaagggattaccgcggcccctctggtacggctgagggggaattggggtttcattcagtaaatggtgattatgattcgcaggcccattatatcgctaaaaaattgttaccctcattaactaaacgcggttttcaacttgagcgaattggattgctttaccgtgcagcttggttgggagacaaacttgtggatgcacttcaagcagaaaacattgccctaattcgtgctgacagtaatgctttgataaaacgcaattcccgcctagcgcgctttatagaggcctgtagccaatgggttacgggtggttggaaagaagcttcaccatcatttaaccagttgctgggtcaagctctttcaatagcttacggtcggagcgtaaaccaagctgaagaacaaaatattactattcaactcatcaattttttacgaaacggaattgaacggagcgaaactgctcatcagtggcttaaacggttatacactgaacttattattaaatggcagttgctttctcagaacaatttccaagagtgggaagtttgtgctgagttattacaacggactgatcctgacaggagcctggatatgactctggaaatctttgcaggaaaagtggatggcgctgggagagtaatattaagcactcttcacagtgctaaaggtcgtgaatttgacgttgccattatgtatggcgttaatagctatgacttcccaagtaaacgcgactgcataacaatacatacaatgcgggaagcccgccgactgttttatgttggcgtcacacgaccacggaaagaactgcatatggtttacgaaaaagggaaacattctccatga

SEQ ID NO: 74050 - DNA, 2088 bp, Peptoclostridium difficile T15
atgcaattaacaaaaataattcttagtaactataggtgttttggaaaagaaccgacaactattgaaatcaataatttaactggattcataggtcataatagtagtggtaaaactgctttattaagtgcacttataaaacttttcggagaaaaatctagtgatagaattattgaaagatcagatttccatatacctgaaagcactgatccggatagtgttgatatgaatgaattatatattgaaacacaatttgaatttcctgaattggagagggatgaagataacttatcgataccagtattttttaaaaacatggttgttaacgaaccgggaggaaaaccttatttaaggattaggcttgaggcaagttgggaaaaaagttcaaatcctgaagggagtattgacacgaatatatactatataacgtctacaacagaggatataaatcctgaagataagcgtaatattaaaagacatgatcttgatcagataaagattatttatgtacctgccattagaaagccagatgaacaattaagaaatgtatcagggacaataatttcaagattactgaatggtataagttggtcagaacaaactaaaacaaaaattaaaacgaaagcaaatgaaactgagaaaattttctttgaagaaaaaggggtcgaatctttaaagaaatcattagaaactcaatggaatagttatcataaagatattagatactcaaatccaaagataaactttaatagtactgatttagaaacaattttaaagaaagtggaagtaactttttcacctacagagacacatcgggactatcgtgttgaagaacttggggatggtttacgttctttattttatctttcgcttgtaaatacatttttagaaattgaagaagaaattctaaaatctattaatgatgacaaagaagaagagatatttacattaataccacctgtgttaacgattgttgcagttgaagagccagaaaatcatatttcacctcatcttttaggaagagtagttgaaaaattgaatcttatttctaaaaaagaaaattcacaaacaatattgacatcacattcaccagctatagtgaaaagaattgaaccaacagatataagatattttagaatttgtaaggaacatgaatgtacaaaagtgaagtcaattatattaccaaataaagaaaaggaagtagaacaatttaaatttgtaaaggaagcagtattagcatatcctgaactttattttgcaaaacttgttgtattgggtgaaggtgacagtgaagagattattattaagaagatgattgaattaaaagcagaatctgtagattcatcagaaatttcaatagtaccattaggtggtaggcatgttaatcatttttggcgtttattaaatgatttagaaattccatttattacactattagatttagatagagaacgagatggaggtggttggggacgtataaagtatgcaatacaacaattgataaagattggtcgtgataagaatgtattacttgatacaaaggatggaattttacaagataatgaatttaaagatatgcatacttggaatgtaactaagactgaaattatgttggaatggattaaaatgcttaaagagtatgatgtttatttttcatctccgttagatatagattttgcaatgttacaaagttttaaggataaatatattgcaacattagaaagtagtcaagggcctataataaaagggtatgggaaaatacaaaatcttgaaattaatgaagatactgaagagggactgaaaaatgcttatcaagctagaatagttagcgatattaaatcaacattaaaacaagaaggtggcgatggatctacttatactgaagaagagaaaaaacttatgatctggtattcatatttctttttaggaagaggtaaacccactactcatttatctttattttcaaataatactgatttagattttgaaagttttccagaatgtctaaaggagtttgtaaatagagttattgaaaagatgatagatgatttaggggatgaagaagataatgaagaggaattggattgttaa

SEQ ID NO: 74051 - DNA, 1872 bp, Peptoclostridium difficile T15
atgaagaggaattggattgttaaggaagagtggcatccagcatcaggatttaaattagaagttgaggcgatgaatacagttattaatgataaaaatacacttgttgtagctggtcctggagcgggaaaaacagaattattagcacagagagcttgctttttgttagagactaatacatgtaaatatcctaaaaaaatccttgctattagttttaaaaaggatgctgctgataatttaaaagagcgtgtagaattaagatgtggcaaagaattagctttaagatttgaatcaaagacatatgatgcttttgcaaaagaaatcgtagatagatttagaaatagtttagatgaaaaatatagacctttaaataattacaatatagctacaaatggtgatgttagaagagcatttgagatatcaggattaaatttcagaggaaatcaaactgaatttaataaattatatggaaataaattatcgataaataaattgcctttacatacaaattttgtagataagatttttatagatgcttggaatgtactacttaaaggtaaagaagataataattttgaaagttcacttacttttgaaatgatatcacgtttagcagaatatttgataagaaccaataggtatattaaaaaagcaattgaaatgacttatagtcatgtgtttttagatgagtttcaagatactacatctattcaatatgatcttgttaaagcctgtttttttaaaacagaaacaataattactgctgttggtgatggtaaacaacgaattatgttatgggctggtgctagaaaatcaatatttgaagattttcaaaatgattttttaagtcaaaaaagaacattaattatgaaccatcgttcagcgccaagacttgtagagattcaaaaagcaatgtataacagattcaatgaagatgcaattgatttaaaaactaatgaaaagtggaatcatgaagatggagaagcttatttaagactttttgaggattatataaaagaagctgatatacttagtgaagaaatagtcggattggtagaaagcggaataaaaattaatgaaatatgtatattagtaaagcagagcgtagatatttattcaaaagagattatacataaactttctgaatgtaatattaaggcacgtaatgaagcagtatatcaggaactattaaaagaagatataataaagatacttgtttcgctttttaggttgtcattaaatgacagaagccctgatgattgggattatatttacgatattctaggtgaattatatggaatagatgaaggttataatccaaaagtattaaatgattttattaccaaagtggaattaatgattaatgatatcaaagtaaatttaaatattactgatgaaaaacagttctcagatttagttgattctaaggttgagtatatttcatacgaaaaatttgcatcaaagtttcaacaatataaatctaaagattattttgatgatttggtagataaatttaaaaagctagtatggagtgaatataatgaaactaaggattggattaaagcgattgataactttgaagggaaaaattcaattccaataatgacaattcataaaagcaaaggacttgaatatgatactatcttttttgttggtttagaagactcagcattttggaattttaaaaatcaaccagatgaagatagatgtgcattttttgttgcattatcaagagctaaaagaagaattgattttacatttagtttagatagaccagcaggattttcgaattcgcagacgcatgattgtattaatgaattctacgaattatttgatgatactaagattgtaaaaaggatagagtattgtgattaa

SEQ ID NO: 74052 - DNA, 2070 bp, Peptoclostridium difficile E12; identical to SEQ ID NO: 72494

SEQ ID NO: 74053 - DNA, 1866 bp, Peptoclostridium difficile E12; identical to SEQ ID NO: 72495

SEQ ID NO: 74054 - DNA, 2190 bp, Staphylococcus aureus M0047; identical to SEQ ID NO: 71982

SEQ ID NO: 74055 - DNA, 1794 bp, Staphylococcus aureus M0047; identical to SEQ ID NO: 71697

SEQ ID NO: 74056 - DNA, 2190 bp, Staphylococcus aureus M0059; identical to SEQ ID NO: 71982

SEQ ID NO: 74057 - DNA, 1794 bp, Staphylococcus aureus M0059; identical to SEQ ID NO: 71697

SEQ ID NO: 74058 - DNA, 2064 bp, Peptoclostridium difficile E9; identical to SEQ ID NO: 73604

SEQ ID NO: 74059 - DNA, 1287 bp, Peptoclostridium difficile E9; identical to SEQ ID NO: 73609

SEQ ID NO: 74060 - DNA, 2154 bp, Xenorhabdus cabanillasii JM26
atgaaaatttcctctttcgttttgaaaaactatcggcggctagccgacgtaactttagtacttgatgataaaacaacagttcttgtcggcgctaataatagtggaaaaacatcctatattggagcgatatacacatttctgagaagctcggacaatttaaaagttcgtgatatatcgaagctaaattggaagaaaatccaaaagctgggcgaacaggttgaacgagaattccccactagcgagaaaatgcaggaattattggaagctttcatcagtttattaccaagtttagacatcgagatcacagcgaaagcgagtgaagcatataaggttcgtgacatcctcccggacctggaatggtgtggtggtgtcctatccgttcgcataacttacgaaccaaccgatatttctaaattatgccgtgagtttgttgatatgagaggtgtagtgtccgaacacaaaggcaaggtaagcctgtggcccaaagatctatgtgattttctggagaaaggtcggaacttcagtaacttcataaaacaaaagcactacattttaagcaaagagacaaagcctattccgaacgaagttttgcaaccccttaaatctgaagctttgaaaaagttaattcgggtagacgttatatccgagcaacgcggattagattccgaagataatacatatcaaaaagggccatattcagaaaaacaacgtcttaataagttgcttcgagcatattacgatcgtattttgaacccggaagatttccctgagatgcaagaccttgaagttttggggcaacagcaagcgctagaagaagggtttactgagagattgaataagcaatttgaggctccttttaacgagctgaagaacatgggataccctggtatcggcggcaatccgactgttgaaattgctgcaaaaattagcggtatggatgcattgaaaaaatcgtcatcgatccgataccgttttgacaaagaggaagaagagtttgttccagaaagttacttggggcttggttaccaaaatcttatatatttgaccttcaggcttctggaatttcgcgacaaatggatgcgcgttggaaaatcggctgcttttgagtataaaattgaggatcagatagaaccaatccatttagttttactcgaagagccggaagtcaatctgcatgctcaagttcagcgggtattcgtatcgaaagcttataatactttgcggagccatcccgacttgtgtgacaaacaagatgaatctgaataccaaacacagcttgtgattagcacacactccagccatattatcaacgatattgacttcaaagagttacggtacttccggcgaaataatgctaactcttcaattgcaatggatcatacgtcaatcacaaatatgtcagagctattcttggacgcaaaaaaagaacttcagtttgtcagaaaacacctgaagctcactcattgtgacctcttctttgccgacggcgttatatttgttgaaggacaagctgagcgtcttctggtacctgagttcatttccaatagctttccggacttatcgaaacgatacatctcgatacttgaggtaaacggtgcacacacgcataaatacagagatttaatcgaaaaacttgggattgcgactctggtactgacagatcttgactcagttaataacgaagggaaatcatgctccccgcaaaagaattcaggtcaaaaaaccagtaataataccttgaagatgtggcatccaaaaaaagaagatttggatgacttggtggccttatcaaaaggagaacatgcaacagaaagtcaaggcgcaccgctttacgttgcctaccaaaaaccaactcagatttctgggaaggaaattttatcccgaacttttgaagatgcattgattttggcaaattttgaggatgaatatttccagagtaaagaaaaaattaaagccgcaaaagacgcctttgaaaatgacagtaatcccctatcaaagtcactctatgactatgtgcaagctttaaagaagggggactttgcctttgactgccttttctatctcgctaataaaaaaggaaatagcttcaatccccctgaatacatgagtgaaggtcttaagtggctagactctcagcttcagccaaaaatgtag

SEQ ID NO: 74061 - DNA, 1944 bp, Xenorhabdus cabanillasii JM26
atgtcagaagaattttacttagcggaaaccaaacctattgatcatgacaatagggttgatgaaggaatccaagagtgccttcgtataggttcagggaaaagttttatcacctttgcgggggcgggatcaggtaaaacctattctctaaaagaagctctagattttctgaaaaaagaacattctggtaactttattcgtcaaggaaagcaaattgctgttgtaacctttacgaacaacgcagccgatgaaatcatggatcggattgagcaaaatcccatctttgcggtttcaacaattcatagcttttgttggtctgctattgctggttttaatgaagacattcgcaagtggtatctggagaaaattcctgcggttcttgccgaagtagatgatttagaaaggcgtggtcgcgcaggtaaagcgtcagatgctcgaaagagaacaattaccctcctaaaggaaaaaatggattggttgactgaacctcgctcattcatttacgacccaaatggcgttaactctacaaagaatgcgttgtcgcatgcagatgttttaaaaattttctcaagttttttgactactaagccgatgatggcagaagtcattgtaaacaagttccctttcatatttatcgacgaaagtcaggatactaacaaagatgtaatccgtgcattctttgaactgcaatatgctaaatcaaacaaagttgtcatcggcttgtttggagatacgatgcagcgtatcttcggtgggggcgaatctgagctgggtaacactaagtccagcggttggatcactttcgacaaagaaatgaaccatcgctcagcgcgacgcatcgttgctttgggtaatcaaatccgtagtgaatatgataaacgtaaacagtttgcccgagatggggctgcaaacggttacgttcgatatttcttattgtcgaacgatgtttcaaacaaaaatgaaattgaagcaagaattcgtgaggttatggcagaagttacggatgacgcggactggacagatattcaatccaaagatacagctatcttgcttttggaacataaaatggctggacgtcgtcttggttttgatgatctttggaacaagcttgaaaaatcagacaagattaaagagcggatttctaacggtgaaaacaccgagctaaattttttctctgatattgtttttcctatggctgaggcgagtcgtaatgaaagacgagctgaattgatgtctatcctgagagaaaggaattcgccgcttttggaagccaatgtgcttgactctaacaaagatgatccgctctcacttgctcgaactgctgaacatgcgtttaaaaatgtggtttcaaataacaaagtcagttttcgcgcagttctggaagttctggctaagcataatctgctgagaattccggagaaattgctgtcatttgtagtggcctccgaagaaaggaaagttgaatcagagccagaacaaataggagctatacaggaggttgaatcagaaactgaagaacgggatgacagcgagataactgcttgggctgaagctttggaaactgatttctttcaaattcgaaattataaggactacatcaatgagaattcaatttttctaacccatcaaggcgtgaaaggcaacgaattcaagcgtgttatggttgtcatggatgatgatgaagcaggtgggttcttattttcttacgagcagtattttggagcgaaggagctttctagttcaagcaaaaaaaagcaggatgcgggagaagagactggcttggatcgcactaggcgattgttttatgtcacgtctacacgggcgaaaaatagcctcgcccatgtgatttatacatccgatgtggccaaaataaaggaaaaccttattaacaaaaaatttgcgcaagaaggtgagattattgagttttatggaaacaagtacgagtaa

SEQ ID NO: 74062 - DNA, 2190 bp, Staphylococcus aureus M0088; identical to SEQ ID NO: 71982

SEQ ID NO: 74063 - DNA, 1794 bp, Staphylococcus aureus M0088; identical to SEQ ID NO: 71697

SEQ ID NO: 74064 - DNA, 2190 bp, Staphylococcus aureus M0113; identical to SEQ ID NO: 71982

SEQ ID NO: 74065 - DNA, 1794 bp, Staphylococcus aureus M0113; identical to SEQ ID NO: 71697

SEQ ID NO: 74066 - DNA, 2190 bp, Staphylococcus aureus M1375; identical to SEQ ID NO: 71982

SEQ ID NO: 74067 - DNA, 1794 bp, Staphylococcus aureus M1375; identical to SEQ ID NO: 71697

SEQ ID NO: 74068 - DNA, 2190 bp, Staphylococcus aureus M1427; identical to SEQ ID NO: 71982

SEQ ID NO: 74069 - DNA, 1794 bp, Staphylococcus aureus M1427; identical to SEQ ID NO: 71697

SEQ ID NO: 74070 - DNA, 2190 bp, Staphylococcus aureus M1183; identical to SEQ ID NO: 71982

SEQ ID NO: 74071 - DNA, 1794 bp, Staphylococcus aureus M1183; identical to SEQ ID NO: 71697

SEQ ID NO: 74072 - DNA, 2190 bp, Staphylococcus aureus M1294; identical to SEQ ID NO: 71982

SEQ ID NO: 74073 - DNA, 1794 bp, Staphylococcus aureus M1294; identical to SEQ ID NO: 71697

SEQ ID NO: 74074 - DNA, 2190 bp, Staphylococcus aureus M1346; identical to SEQ ID NO: 71982

SEQ ID NO: 74075 - DNA, 1794 bp, Staphylococcus aureus M1346; identical to SEQ ID NO: 71697

SEQ ID NO: 74076 - DNA, 1752 bp, Enterobacter aerogenes UCI 46; identical to SEQ ID NO: 73074

SEQ ID NO: 74077 - DNA, 1776 bp, Enterobacter aerogenes UCI 46; identical to SEQ ID NO: 73075

SEQ ID NO: 74078 - DNA, 2313 bp, Enterobacter aerogenes UCI 45
atgtcagcagcagacgccactacatcattatctgggcagatatcccttcggtttgttgagctttgccagttccgccgacttggtaaggtccagcttgagattgaccctaagactactattctagtcggtgctaataatagcggcaaaacatcaattctggcagcgctgcgccacttcctcgcagatggctcgtcatttggtgctttcgacatcagtgtttctcaatggccaaaattgcgggaacttggaagagcttgggacgcattagaagaagacccatctacgtctggcgcatccgaaggtgaatgggaagagcaactcggaaccttactttcggcgatgccaacgctagatctatggttcgatgctaaggccggtatgttccactatgtctccccgttcttgtcaaaattcagttggaaggggggtggggtaggtgtccgattgcgtctggaacctgctacgaacattgaggagctgaagcagttggcttggaagtatcacctgacgagaataccggtgaaggatatgggaaaggattcgcttgcgtggccgattgatcttcttgatttttggctgcgagaaccttctcaactcggccaggttcgggcctataagttagatgccgataacaaccctttggacggaattaagacctacgttagccaggtactggatgctgactctagccaaattgatcgtaagcacctgcagaaacttataaaagtagactttgtggctgcacagcgtggccttggtagtgaggaagctgattcccgctctgcttctggccctcatcgcataggtttattctccaatcagcttctcaaatttgctcgacagcatctaaacgtggctgcaacaggtcatgggcaccgagctgacctcataaaagctgttgctaatgcccagcaggaactagacaaaaagattcatgaggctattggaccatcggtagaagaggttaaagagcttgggtaccccggcttgcatgacccccaagagattcgtttccgcacgcgcatacagacagccgaattactcgaccatgggacagctgttcaatacagcatgcagaaggattcactagaagagcttcttccagaatattccattggtctcggttatcagaatttacagtcccttagttaccaactagtttctttcaaagcttctcgcctaaatcctgaaaagggcgctccagcacctgttcatctggttatgattgaagagcccgaggctcatttgcacgtacaggtacaacgtattttcccgggtaaggcacataagctaatcagtcctaacggtagcgatgagtcaggtcttaaaagccaattgattatcagtactcattctagtcatctagcacatgctgagaattttgaccggctacgatatgttcgccgtattgctaaaagtgaagaacaaaacatgcctaccactgaggtggttaatcttgggcaagtttttggtgatgataaaacgacccgtcaattcgctgaacgttattttcgtgttcaacacacagatcttttatttgccaatgctgcaatctttgtcgagggggttgctgaacgaatgctgttacctcttttcattgaaagagattttgcaaccctcaacagtcgctatctgtccttccttgatattggtggcagccatgctcatcggctaagatccctcgttgaaagactccgtattccgacagtaattattactgatatcgatcctgttgaagaaaaagttggtaaccctaaaaaaaatgatgagcctactacaaccttggttgctgtagctaatacaggacagcctgggctgcaatgcggaaacccgactcttcgtggatggcatcctaaattacaacagcttgaagatttcaaggacccgaaagacgagcaccttgtctggaacgaaattgccgaatgtttcgtgcgtttcgcatggcaattgcccgtagccgaagctgatggtcagtggccgagtacctttgaagactctcttattcttagaaatatcccttggtttaagcaactgattgatgaaaaagttgatggtgatggaaagaaaatcaaaccgccgaagggggcgctgggctcagtcgctagaaaggttgccgagaatgataatattccagatctgctctcagctttgcataagctaatgcatgggtcttttaataaaggagattttgccgcaagcatctttgaaatggttgctgcggatgaaccgatagtctgtcctaaatatatcgaggatgcattggaatggctccagacacagctggagccaagcagggaggtgatgcatgactaa

SEQ ID NO: 74079 - DNA, 1950 bp, Enterobacter aerogenes UCI 45
atgactaactcaccaatccttgacggcaatgatcgcgatgcaggggtagtagaagagatttgcggctaccttacagacacaccacctcgtaactacttcctttttgcaggggctggttctggtaaaacacgaacattggtggaagttttacgtcgccttactggtgtgaccgagcatgagaaggggggacaattagcacggtccctgaagatgtatgggcgttcgattagagtggtaacgtacacaaagaatgctgtctctgtaatcaacggacgtcttggggacaatagcttagtcagtgtgtctaccatccattcattttgttgggagttaattaatgggttcaacgatgatattcgcgaatccctaatagcagtaaaagaagctcaactcgctaaagagactgcagaggcacaagcgaaacctaagggtattactgcagcaaaacagcgtgatcttgacgaaatcacgaatgaaatcgaggatcttcggacaactgaagtattcaaataccatcctgatcgtaatacatatgggcctggggcattaccgcacaattccgtactcgatgcgacagcttggttgcttcaaaataagccaacactccaatccattctcaaagatcgacatccaatcatactgattgatgagtcgcaggacacaatgaaaggtgtactggactccttgatgttcctagtcaaaaagcgggagggcgatttgactcttggtctgctgggagatcatcgacaacgaatttatatggatggtcatgccgatcttccaagcattgttcctgaaaattgggcaacgcctgagttacaaatgaatcatcgtagccaacgacgtattgtcactctgatcaataaaatctgggaaactgaactggaagggaggacgcaaccagcaaagggttcagcacaacatccccgaacagaaaaggctggcggaacggttcggctcttcttgggggatacattgcaaagtccagacgataaggtgctcagcgaacgctggtgtgctgaacagatgttcgaagttagtggctcagtagcctggaatcaagaacaatataagctgcttgcgttggagcataagctcgttgccactcgtggttcgtttcttgatgtgtatgaggcaatgtttctgttagatccccacaccgcagcgccatctggcagtggggacaacaaggggccttcaacagtacaaattttgcttaatgagcttgcgcatttagaagcctgcgtcagtaatgaaggaattgtgaatgagttcaaggcaaccgaggttttacgacgttatggtgctttagacaatatacctgaggattcagaagcaagagctgaacgtactgatgaaatgctcgaggcgatagctatatttgcaatggcttgcgccaaccctgagtcaacggtcgcggaagtattagcaccagttttaagtgcagaactctttgaagtagatcatcgccttcaggaggcttatgccgacaagtcaccagccccgcaagttcctggacgaggtgaggatgagtcgaagcaaacaagaatgcgccgtggatggtgtgcactgtttgctgctccatggaaacagcttaagtgctatcgaaattaccttgctgggatttcagagctcgcaacacatcaagtagttaaaggctctgagttcaagcacgtcatggttgtaatggatgatgctcttgctggtgggactcgctttaagtacgacacgatttttggtggtacgcagttaagtccaaatgacaaaaagaatgcaaagtctggtaaggagacaaccatcgaccggactttacgtttgctgtacgtgacttgtagcagggcacaagaatcgctcgctttagtgctttggtcgtccgatcctgctgcagcaatggctcgaatcaaggagagtcaatggtttgctgaagatgaaatacaaataatcacataa

SEQ ID NO: 74080 - DNA, 2313 bp, Enterobacter aerogenes UCI 28; identical to SEQ ID NO: 74078

SEQ ID NO: 74081 - DNA, 1950 bp, Enterobacter aerogenes UCI 28; identical to SEQ ID NO: 74079

SEQ ID NO: 74082 - DNA, 2313 bp, Enterobacter aerogenes UCI 27; identical to SEQ ID NO: 74078

SEQ ID NO: 74083 - DNA, 1950 bp, Enterobacter aerogenes UCI 27; identical to SEQ ID NO: 74079

SEQ ID NO: 74084 - DNA, 1752 bp, Enterobacter aerogenes UCI 16; identical to SEQ ID NO: 73074

SEQ ID NO: 74085 - DNA, 1776 bp, Enterobacter aerogenes UCI 16; identical to SEQ ID NO: 73075

SEQ ID NO: 74086 - DNA, 2139 bp, Enterobacter sp. MGH 10
atgtatatttccaaactgaccctggtgaattacaaaaacttcaagaacacgtctctgcggtttcacaagggagtgaacaccattatcggggaaaacggctcagggaaatctaacatcctgcgagctattcgcctcctgcttgacgacaatatggtgcgttctgcttatcgtctggaagagggcgatttcagccgatcactcgaccaatggcagggacactggatcatcatcagcatggagtttgacgagatcaccactgatgaatccgttcaggcactctttctccacggtacggctcccttggacgatgggccaatacataaggccacatataatctcattttccgacccaaaaaagacatcaggttgaagctggcagccttagaattgtttgattttaaagaactctcggagattcgtgacgcaatcaccatcgatgattacgaaacgcttttcactggacggagcagtgctgatttcggaaatccagcggtataccgaagtatcgttggagattttgatatatgtgatttctcatcagagacggagtttccagaaattggggcaaaggtgccgggcttcctttcagttacgaaagaggtctcgctgactttcatccaggccttgcgcgatgttgtttctgagtttcacaacaatcgcactaaccctttactcactttgctgaagagcaagagtggagatatcaatccactaacgatggaaccaatctccgagatggtccgcggacttaatgcctcaatcgaaggacttgaggatgttcagtcagttcgcaatcatattcgtgagaccattaaggacgccgcaggtgaaacttactcccctgcttcactctcaatcaagtcagatctccctgaagaagcagataaactttttcagtccctgcgactattcgttggtgaatcagaagaagggtacgaaggtgcaattcatgagctgagccttggcggtgccaacctaatatacctgactctcaaactactggagttcaagtaccagcgggaaaagctagccatggccaatttccttttgattgaagagccggaagcgcacatccatactcatattcaaaagacgctgttcgatcgcatcgcatatagcgatgcgcagatcatttacaccacgcactcaactcacatctccgaagtcagtaatgtaagcaatgtaaacatactgggccgtcacggagcgttttgcgaggcctatcagcctgccagaggtctagatcccacccaaatcaatagcatccagcgttatttggacgcggtgcgtagtaatctcctcttcgccaaaagcgtgatactcgttgagggtgatgtggaggagatcctgataccaatactgattaagcttgtactgggcgtaagcgttgacgagttgggcatcagtgtcatcaacattcgtagcacaggattcaagaatgttgcggttctcttccatgacctacgtattaagaaacgatgcgccatcatcactgatttggataaggccttctttaatatcaccgtacaggcaactgataatgccattgtggcaaagataaaggcaaaagctgcgggatctcagaaagccggtttagaacggcaggccgatttgacagagttcacggcagaaaatccatggattgaaaccttttacgccaaacacaccttcgaggtcgactttgtcgcagccggcaaccaagaggctatcgtccagaccattccggtggtttacaaggatcagggaaccagggaagaggcgaagcagcaactcaagtccggagacctgcaacaaatgggtagtcgtacgctgacaatggctcggcaagagggtaaggggtggttcgcgcttttgctcgctgaatacctcactccccaagtccagatacctgaatacatcatacaggccatccattttgcacatggcaaatttccgcgttcccttattgtcagaattctccagtatcgcgctgaataccgatatggagcagatgtggcaaatctgccagcgaaacaattatttcttcaggagataaatcgttttgcgcaaggagatattggcctggctgagttcaggataacaattggacgtttattaccgggagaccccattattgtattcttagggaagttgcaatga

SEQ ID NO: 74087 - DNA, 1785 bp, Enterobacter sp. MGH 10
atgaggttcatttgggatccaagtgacctcaatcctgaacaggcggcagcagtgacagagccatcgagcatttttctgatcgcttgcccgggtagcggaaaaacgcgcaccctgacctacaaaattgcctatgaactctctcgtcgaactgataagcggatggttgttgccattacctacacccaccgtgcagccgatgagatccaagaacgtattgaggatttgggcgttgatacttctgggctatggattggtaccatccatgccttttgcctggagtggatccttaagccatatggcatttattcgcctgaactagcgcgtggttaccgcgttatcgacccgtacgatcgtgagcgtctgctggagaggctgtgcgctcagtataaaggtatcactcactgggattgtgactactacgttactgaaacgggttatcaacttggctgtgtcgatacgagaaaacatcctattattcaaaacgttttgaaggaatattttaaagagctttcatcaagccgacagatcgacttcgaacttatcctttggtatgcgtactgcttgatgcgggacagacctcctatcgcagtactgctctctcgcgtgttttcccacatcctcgtggatgagtatcaggataccaaacagattcagtactctattttgacgtcgatacttcgcgctggaaggggggagaccaaaatactcatcgttggtgatccgaatcaagcaatctatggctcactgggtggctacgctatgccattagatgaattccgtgcgcaagccggaatcccgataaaggagtttgcgctcagcctaaactatcgctccagtgagcgaatcatcagctatttttcgaactacagcgtacacgctagcaaaatcaccggtgctggcaaagatgctaaatttcccagccggattacctataatcaaaaggttacacgcagcaatgttcatgatgagattgtaaggctgattcggaagagtctagacaacggctactcacccgaaaacatctgcgtcctcgctccacagtgggttttgcttgcctccacgactcgaaaactagttgcaatgttgcctgatcagcaatttgatggcccaggcctcatacctttcagtaataacttcgataatttctggttcaaggtttccaaggttttactgacggattcttccccagcattacttatcaggcgactgcgttgggcaaacgaagtaataaaagatcttgatagtttcggcgttgatactaagacactgacaccgagaatcttgctgcgggagagtaacgcgctcacggtcaatgagttggacggactccgctacctggaccaggccttcaccgagctgctcaagaggctcaatatttctccggaaattcatcctgcgctcttgactcatcgagaggcttttttcagcagctcagctgcgcgaatagagcgtctgcaaaaggaaggggcgacatacatcaatcaaatatccgtcttcaaaaaagtctttcgcgaaagaagcggcatcactgtctccaccattcatggtgtcaagggtgccgagttcgacgtcgtcatcgcctttggattattggagggcatggtaccgcacttcaatgaagtgaatggacatgttgccgcaagcaagctcctctatgtattgagctctcgtgctcggaaaaatcttcatttaatctcggagtcagaacgtcagagaggaagatacagtagctattccgcgaccgaattactcgcggcctgcatctttaattatgacgaggagtaa

SEQ ID NO: 74088 - DNA, 2139 bp, Enterobacter sp. MGH 7; identical to SEQ ID NO: 72908

SEQ ID NO: 74089 - DNA, 1800 bp, Enterobacter sp. MGH 7; identical to SEQ ID NO: 72909

SEQ ID NO: 74090 - DNA, 2151 bp, Enterobacter sp. MGH 6
atgtgtagtaaaactatgctaagggcccaatcgattactatgtatatcaataaattagctattagaaactataaaaactttcgaagctcaaatttctactttgttaaaggctcagtgaatacaattatcggtgaaaatgcttcgggaaaaacaaatttatttaatgcgatgagattaattctagatgattctctcccaatgaattctaggattttatctaatgaggacttctaccgtggattatccgaaccctttggtcattggatcataattacgctatattttgatgatttaagtgagtcggaggaggaacaggtccttgccaactatacagtaaatgatggtaatgataagtctataaaggaaggtaattatacttttatatatcgacctaaatttcatattcgacaaaagctgtatgagttaacattagaagatgacaatgtggaagcaagatccgcttcttttactgaatttgcatctaaccatattatttctaaagaaacatatgaagcagtagcttttgttagaacaaaggttgatttgaataatgacgaaatttataaacaagtagttggtgattttgatagttactccttttcaaatcctaatgatgatgatgctactgtattaggggttaagaagccaccttactttgccttaggcagcgaagtcgcttgcacttatgtcaaagcacttaggaatgtagttgcagatcttaaatattataaaacgaatccattgtataaattacttactttaaaaagtaaacaaattgatgatagaagagatattgtagaaaatgttaaagagatcaatggtaaaatttcagctatacctgaaattgagagattgagtaataagatatctgcttcattacttaatacagtaggctcgacttattcccctaaaatattagtatcctcacaacttccagaagatttcacagaattaattcaatcacttggcttagtggttgaagattctctggattacaatggctcaggaaagattgatgatctgagtcttggtggagcaaacttaatttatcttgctttaaagttatatgaatacgaagaaataagggatagtgaagagcatattactcacttcttgttaattgaagagcccgaagcacatattcataatcatatccaaaaaacccttttcgataacttcaattttaaaaatacgcaagtgtttgtttctacacattcaacacaaattagctctgtatcaaaaatatcatcaatgaatatattatcacgccaaaatggattcactgatgtatatcatccatcgtttggtttgacgccgaaagaaatttcttccgtagagcgatatcttgatgcaattcgtagtgaccttttgtttgctaaaagtgtcattctggtagaaggcgatgcagaacttattttaataccagcaatggtaaaagaaacgttaggaattagtttagatgagttgggtataagtcttatcaaagtagatggcactgtttttaaacatatttctaatcttttccatgaaaaacggttgaaaagaaaatgtgcaattctcacggatcttgattcggcctatgtaaaagtagctgataatatttttgatgcggattttgtcgaatctctggtagatgccgaagatgatggattacgaagaaaagaagagttagataaatatattgaaggtaatgagtttataactgttcattacgcagaaaatactttcgaaactgagcttgttcgctacgatgaaaacaataacttgtttatagaagttatgaaaaccgagtataaaaaagaagcgtattttaaaaaggctgaatcagacgtaaattcatctgatctcagagttcggtataaaagagtattaaagtttgcaaagaaaatagggaagggatggttagctactgaaatggtagaacatcttagtgttgataatcgtgttcctgattatattttacaggccattcaatttgttcttcgggatagaaatgttgagcctatatatcaaaaaatgcttgactacaatatgtctttaatgggggttaaagcatttgactgtataaatgccgaaaaagatttttctagtaaaatgatagaatataagaaacacttcaatgacagttttgtaagattgttggagttatag

SEQ ID NO: 74091 - DNA, 1752 bp, Enterobacter sp. MGH 6
atgccatatagaaatttaacttctgagcaaatggatgccgttaaattcaacgggaatttattattaacggcatgtccagggtcgggtaaaacaaaaacattggtttctaaactttgtttcattttagaaaataaagaactattttgtattggtaaaaagaagataattgctcttacatatacaaatatagcagccgatacgattcttgaacggattatgtcattcggcataagtagtgaatctttatggattggaacaatacacagtttttgtttgaattggattataaaacctaatgtagataagataccaagactttgccgaggatttagtgtaattgatgaacatgaaaaggaatttctcataaatgaattaaaagaaaaacatggcctatctgcaaatgataaagtttttactaatttagattttaaccttggtcagttttattcccgtgggaccaaagaacatttgattgtaaaagaatatcataatcatttgtatgagaaaaaattaatcgattttgatttgatattaaatctgacttgtcgagtgttgacaaaatacaatgcactttgtgaaagattgtctttacttttaaggtgtattttagtcgatgaatatcaagatacatctcttatacaatatgagatactcagacaaattgtattaaagaaaaatacaatgattacttttattggggataaagagcaagctatatacactggtttgggggctgtcgtaaagaatagagatgaattaattaattgtttccaacttgataatctaaccgagatgaaattaacggggtgtttccgtagtagccaatctattgttgatttttatagtaaatacaaagacgaagattatgagattaattcactttcagataataaggatttcaactcagtaatttttaaagaaagcgaggtagatgtttctcaactgccgatttatgtatcaggtattattagaactcatttggctcagggagtacttccaaatgaaattgctattctgtgtcctggttggtttgatgtgataaaactttcgaatgatattgttactcttaatccggatatagaaattgatggagtcatgatctctcctatacctaaaaacaatgagaatctttggcttgctttagttaaactatttttaattaggagagttccctctaattttaatactagacagaagctattgcgggatttccttcaagaattaaatgttgttgcaccctatactgaatcgttgtctcctaaaaaaatattaaagattattaataaaatatcattatctgtggattataattgtgaaattgatgtttggttgagacaggttataacgagattttgccattctattaatttgggcataagtaatgatagctactattatcaagaaatggaacttttgattaatgccacattgaaaagaatgttaaagtataatatggcttataaagcaaatgaattacatttgtttttcaattttagaagcggtgttaaaatcacaacttgtcattcgacaaaaggtgatgagtatgaagtggtcatttgcactggattactaaatgggaaaatacctaattggaatgatattataaattgtagctcagagcatcaaaattatgttgcccgtagacttttatatgttgtttcttcgcgtgcaaagaaacatttatatatgatatcagagagaggttacaagacaaaaaggggatatccatatcagacaactccacagctttga

SEQ ID NO: 74092 - DNA, 2151 bp, Enterobacter sp. MGH 1; identical to SEQ ID NO: 74090

SEQ ID NO: 74093 - DNA, 1752 bp, Enterobacter sp. MGH 1; identical to SEQ ID NO: 74091

SEQ ID NO: 74094 - DNA, 2190 bp, Staphylococcus aureus UCIM6015; identical to SEQ ID NO: 71904

SEQ ID NO: 74095 - DNA, 1794 bp, Staphylococcus aureus UCIM6015; identical to SEQ ID NO: 71697

SEQ ID NO: 74096 - DNA, 2190 bp, Staphylococcus aureus SJOS6053; identical to SEQ ID NO: 71904

SEQ ID NO: 74097 - DNA, 1794 bp, Staphylococcus aureus SJOS6053; identical to SEQ ID NO: 71697

SEQ ID NO: 74098 - DNA, 2190 bp, Staphylococcus aureus SJOS6072; identical to SEQ ID NO: 71904

SEQ ID NO: 74099 - DNA, 1794 bp, Staphylococcus aureus SJOS6072; identical to SEQ ID NO: 71697

SEQ ID NO: 74100 - DNA, 2190 bp, Staphylococcus aureus FVRH6002; identical to SEQ ID NO: 71904

SEQ ID NO: 74101 - DNA, 1794 bp, Staphylococcus aureus FVRH6002; identical to SEQ ID NO: 71697

SEQ ID NO: 74102 - DNA, 2190 bp, Staphylococcus aureus LAMC0011; identical to SEQ ID NO: 71904

SEQ ID NO: 74103 - DNA, 1794 bp, Staphylococcus aureus LAMC0011; identical to SEQ ID NO: 71697

SEQ ID NO: 74104 - DNA, 2190 bp, Staphylococcus aureus UCIM6042; identical to SEQ ID NO: 71904

SEQ ID NO: 74105 - DNA, 1794 bp, Staphylococcus aureus UCIM6042; identical to SEQ ID NO: 71697

SEQ ID NO: 74106 - DNA, 2190 bp, Staphylococcus aureus WAMC6030; identical to SEQ ID NO: 71982

SEQ ID NO: 74107 - DNA, 1794 bp, Staphylococcus aureus WAMC6030; identical to SEQ ID NO: 71697

SEQ ID NO: 74108 - DNA, 2190 bp, Staphylococcus aureus WAMC6102; identical to SEQ ID NO: 71904

SEQ ID NO: 74109 - DNA, 1794 bp, Staphylococcus aureus WAMC6102; identical to SEQ ID NO: 71697

SEQ ID NO: 74110 - DNA, 2190 bp, Staphylococcus aureus KINW6048; identical to SEQ ID NO: 71904

SEQ ID NO: 74111 - DNA, 1794 bp, Staphylococcus aureus KINW6048
atgacaaatatcttcgaaaaaatcgtaaatgatttaaatttagaacaaaaagatgttgtggaaagtgaagataacctttatgtaaatgcatgtcctgggagtgggaaaacaagggtacttacaaggaaaattgcttaccaagcaattaaacacgatggatcactaaaaagaataattgctatcacatacactaatagagctgctgaagaaattaaggaacgcctaagtttacttagtatagatgatgatattaatatttgggtggggacaatacatcagttttgtcttgaatttattatttatccttttaaaatgaatctctcaagagtatcaaaaggatttacaattattgatgattatactcaaagagcttacgtcagccaaattaataatatgctgaatttaaatctcaaaacgtatgaactgaacaaaattgatttgtcactttctcatgattttaaaattaatgaagttcagtatactcaagtttctgaaatgtatcacactatgttggaaaaaaataaagaaattgattttgatatgattttactagtagcgtataaaattttaactgtaaacagtaacgttgcacgtaatattgctagtaatataagggcgatttatgtggatgaatttcaagatactagagaattacaatacaatgtaatagctaaattacttcaaaacaaccctcaaattcagtcaatgtttgttggagatattgaccaagcaatttatggatcattagatggtatagctaaatcagttgaagaactagaaatgctaactagtcacacttttcaatcaaagacgctacatggctgttacaggtctaatcagagattagtagacttctactctaattttcagagttgtccttacgagattgaaagcagagggaataataaaaacgaccgtggttttataagttatgattgcaaagttactaaggaggatttacccaacataataaaaaatataataaaggaaaagattgaaagcggcattcatgaaaaagatatttgtgtacttgctcctcaacactatcctctgttttcactgggtgagtatttaaagaaagaattaccgtattgcaattttgatgctataaatatatcaccaattaaggtaaataatcatagtttatttttcaagttagcaattttgtactttactgaatcaggtgaaaaggttcgaagaagaaagctaattgcaaacgatattttaattatattaaaaaatgaatttgtaatagaagttaaagattattttattgacttagatttattacagctaataaacagtgtgaaaagaatgtatagtggagacgacaacggtgttgatttatacaaatttgttaccaaacatatatttgttaatcttaatattgacgagaaaaattacccgtctatttttaagcactatctattttttattaacgaagtagaagatcggataaaaaataattcattatctagtagtgtatctagttttaagaagatgtttaaatctcgagatggtatcacacttactacagcacataaagttaaaggaaatgagtatgatactgttatcgctattaatcttctaaacgggaaaattcctcattggaatgaaatttttaatgtttctgataaaggaattagttcagcgagaaaactactatacgtaatttgttcaagagcaaaaaataatttatttcttttctcagaggtgggttattttacgagtaaaggagacttgctttatcccactcaattattagataaaatagaatttgattataatatttaa

SEQ ID NO: 74112 - DNA, 2190 bp, Staphylococcus aureus M0800; identical to SEQ ID NO: 71982

SEQ ID NO: 74113 - DNA, 1794 bp, Staphylococcus aureus M0800; identical to SEQ ID NO: 71697

SEQ ID NO: 74114 - DNA, 2190 bp, Staphylococcus aureus M0801; identical to SEQ ID NO: 71982

SEQ ID NO: 74115 - DNA, 1794 bp, Staphylococcus aureus M0801; identical to SEQ ID NO: 71697

SEQ ID NO: 74116 - DNA, 2190 bp, Staphylococcus aureus M0833; identical to SEQ ID NO: 71982

SEQ ID NO: 74117 - DNA, 1794 bp, Staphylococcus aureus M0833; identical to SEQ ID NO: 71697

SEQ ID NO: 74118 - DNA, 2190 bp, Staphylococcus aureus M0853; identical to SEQ ID NO: 71982

SEQ ID NO: 74119 - DNA, 1794 bp, Staphylococcus aureus M0853; identical to SEQ ID NO: 71697

SEQ ID NO: 74120 - DNA, 2190 bp, Staphylococcus aureus M0858; identical to SEQ ID NO: 71982

SEQ ID NO: 74121 - DNA, 1794 bp, Staphylococcus aureus M0858; identical to SEQ ID NO: 71697

SEQ ID NO: 74122 - DNA, 2190 bp, Staphylococcus aureus M0893; identical to SEQ ID NO: 71982

SEQ ID NO: 74123 - DNA, 1794 bp, Staphylococcus aureus M0893; identical to SEQ ID NO: 71697

SEQ ID NO: 74124 - DNA, 2190 bp, Staphylococcus aureus M0894; identical to SEQ ID NO: 71982

SEQ ID NO: 74125 - DNA, 1794 bp, Staphylococcus aureus M0894; identical to SEQ ID NO: 71697

SEQ ID NO: 74126 - DNA, 2190 bp, Staphylococcus aureus M0910; identical to SEQ ID NO: 71982

SEQ ID NO: 74127 - DNA, 1794 bp, Staphylococcus aureus M0910; identical to SEQ ID NO: 71697

SEQ ID NO: 74128 - DNA, 2190 bp, Staphylococcus aureus M1017; identical to SEQ ID NO: 71982

SEQ ID NO: 74129 - DNA, 1794 bp, Staphylococcus aureus M1017; identical to SEQ ID NO: 71697

SEQ ID NO: 74130 - DNA, 2190 bp, Staphylococcus aureus M1056; identical to SEQ ID NO: 71982

SEQ ID NO: 74131 - DNA, 1794 bp, Staphylococcus aureus M1056; identical to SEQ ID NO: 71697

SEQ ID NO: 74132 - DNA, 2190 bp, Staphylococcus aureus M1094; identical to SEQ ID NO: 71982

SEQ ID NO: 74133 - DNA, 1794 bp, Staphylococcus aureus M1094; identical to SEQ ID NO: 71697

SEQ ID NO: 74134 - DNA, 2190 bp, Staphylococcus aureus M1101; identical to SEQ ID NO: 71982

SEQ ID NO: 74135 - DNA, 1794 bp, Staphylococcus aureus M1101; identical to SEQ ID NO: 71697

SEQ ID NO: 74136 - DNA, 2190 bp, Staphylococcus aureus M0760; identical to SEQ ID NO: 71982

SEQ ID NO: 74137 - DNA, 1794 bp, Staphylococcus aureus M0760; identical to SEQ ID NO: 71697

SEQ ID NO: 74138 - DNA, 2190 bp, Staphylococcus aureus M0766; identical to SEQ ID NO: 71982

SEQ ID NO: 74139 - DNA, 1794 bp, Staphylococcus aureus M0766; identical to SEQ ID NO: 71697

SEQ ID NO: 74140 - DNA, 2190 bp, Staphylococcus aureus M0771; identical to SEQ ID NO: 71982

SEQ ID NO: 74141 - DNA, 1794 bp, Staphylococcus aureus M0771; identical to SEQ ID NO: 71697

SEQ ID NO: 74142 - DNA, 2190 bp, Staphylococcus aureus M1400; identical to SEQ ID NO: 71982

SEQ ID NO: 74143 - DNA, 1794 bp, Staphylococcus aureus M1400; identical to SEQ ID NO: 71697

SEQ ID NO: 74144 - DNA, 2190 bp, Staphylococcus aureus M1408; identical to SEQ ID NO: 71982

SEQ ID NO: 74145 - DNA, 1794 bp, Staphylococcus aureus M1408; identical to SEQ ID NO: 71697

SEQ ID NO: 74146 - DNA, 2190 bp, Staphylococcus aureus M1436; identical to SEQ ID NO: 71982

SEQ ID NO: 74147 - DNA, 1794 bp, Staphylococcus aureus M1436; identical to SEQ ID NO: 71697

SEQ ID NO: 74148 - DNA, 2190 bp, Staphylococcus aureus M1447; identical to SEQ ID NO: 71982

SEQ ID NO: 74149 - DNA, 1794 bp, Staphylococcus aureus M1447; identical to SEQ ID NO: 71697

SEQ ID NO: 74150 - DNA, 2190 bp, Staphylococcus aureus M1348; identical to SEQ ID NO: 71982

SEQ ID NO: 74151 - DNA, 1794 bp, Staphylococcus aureus M1348; identical to SEQ ID NO: 71697

SEQ ID NO: 74152 - DNA, 2190 bp, Staphylococcus aureus M1351; identical to SEQ ID NO: 71982

SEQ ID NO: 74153 - DNA, 1794 bp, Staphylococcus aureus M1351; identical to SEQ ID NO: 71697

SEQ ID NO: 74154 - DNA, 1923 bp, Corynebacterium casei LMG S-19264
atgaaattcactattttacggattagtaattttcaatcctttggccccacgccgactatccttaatctcgccgatatgacatatgttctgggaccaaacggcgcagggaagactgcggtcctcgaggcgctgtcgcgcatgtttagcccggttacggcccagcgaacagttcgtatcagtgattttcatgtacctatggaccatagtcggtccgagctccaggatgaggaaccagtcctctggattgaggtagacattgagtttccagaagcagattctgagggttattacgcatccattccgcccaacttccaccacatgatgatcgagagtgctgatagggtgccgaaagttcgtgtgcgattaacagccaagcttgccttagacggagttgtcgaagaaagaatcgagtatatacgtcaggtagatgaatcaggggaaccgacagtttgttccgaaatgtcccgttacgaccggggatacattgaggtgcattatcttccggcacggcgtaaccccagtgaacacattgcttacacggctacatctttaatcggtcgaactctgcgagcagcggactggtcgcaagaacgcacgactctttctgacctttctgaacagctcaccgatgctcttacctctaacagtgcggtatcgagtatggggctctctctgacgaaagaatggggcggactccatcggggtgaattcttcacagaaccgacaataactttcgggcggggagaattagagggagtactccgccagctcactatccatttctctccatctcatgatggggcctcattgcccttcgaccttcttagtgatggacagaagtcccttctgtatatctcactcgtacttgcctggcagtcgttagctcggcgggtgttaagaaatgaagaggcatcgctcgatccaactcggctacgacctccagtccatacaattatcgcattggaagagccagagaatagtcttgcacctcagtatcttgggcggatcatccgacagctgcataatgcatgctccgagggtgatctgcaggctctgatcgccactcatgcttcaacattgctgcgtcgagtcaagccggagtcggtctgcttcttgcggctgaactcagagcgagaaacgactgtccatcgcgtcctcttgccggaggatgatgacgaggctgctaagcatgtccgagaagctgtgcaagcataccctgagttatatttctcacggctggtcatccttggtgaaggtgacagcgaacaagtggtgcttccccggattctggcggctgcaggaattgctgaggacgatgcttctgtctcggtagtacccctcgggggacgccatgtgaatcatttttggagactactcaacgagttgaatatcccccatgtcacactcctcgacctggacagcggtcggtaccaagccgggtggggacgcgtccgctatgccctcaatcagatcaacaaggtaaagccgaagacctacccaagggaagagcttaacaatcttcctaaatgggattccacagactccttccctcagtttccgaggggtaaggggcctatatgggatctcgaacaacaaggggtgtttttctctaatccagtagacttggatttgttaatgcttgaggcgtttccagacgcctacgatgttgagcgatcgactccggacaagaaggagattgtagcggtactgggaaaatctcatgtcaacaaagatctccttaacccgaaagtgctgtcgctttttggcgattaccacgaaaactttaatttgaagagtaagcctgccactcacctacgcgcgctctcaatgctcaccgatgaagaactctgcgaaggattgcccgcagtttttaagcgactgattaagcatgtagacgcgaaattgatgggactacccgagtga

SEQ ID NO: 74155 - DNA, 1659 bp, Corynebacterium casei LMG S-19264; identical to SEQ ID NO: 72485

SEQ ID NO: 74156 - DNA, 2190 bp, Staphylococcus aureus M0007; identical to SEQ ID NO: 71982

SEQ ID NO: 74157 - DNA, 1794 bp, Staphylococcus aureus M0007; identical to SEQ ID NO: 71697

SEQ ID NO: 74158 - DNA, 2190 bp, Staphylococcus aureus M0008; identical to SEQ ID NO: 71982

SEQ ID NO: 74159 - DNA, 1794 bp, Staphylococcus aureus M0008; identical to SEQ ID NO: 71697

SEQ ID NO: 74160 - DNA, 2190 bp, Staphylococcus aureus M0080; identical to SEQ ID NO: 71982

SEQ ID NO: 74161 - DNA, 1794 bp, Staphylococcus aureus M0080; identical to SEQ ID NO: 71697

SEQ ID NO: 74162 - DNA, 2190 bp, Staphylococcus aureus M0097; identical to SEQ ID NO: 71982

SEQ ID NO: 74163 - DNA, 1794 bp, Staphylococcus aureus M0097; identical to SEQ ID NO: 71697

SEQ ID NO: 74164 - DNA, 2190 bp, Staphylococcus aureus M0100; identical to SEQ ID NO: 71982

SEQ ID NO: 74165 - DNA, 1794 bp, Staphylococcus aureus M0100; identical to SEQ ID NO: 71697

SEQ ID NO: 74166 - DNA, 2190 bp, Staphylococcus aureus M0101; identical to SEQ ID NO: 71982

SEQ ID NO: 74167 - DNA, 1794 bp, Staphylococcus aureus M0101; identical to SEQ ID NO: 71697

SEQ ID NO: 74168 - DNA, 2190 bp, Staphylococcus aureus M0107; identical to SEQ ID NO: 71982

SEQ ID NO: 74169 - DNA, 1794 bp, Staphylococcus aureus M0107; identical to SEQ ID NO: 71697

SEQ ID NO: 74170 - DNA, 2190 bp, Staphylococcus aureus M0109; identical to SEQ ID NO: 71982

SEQ ID NO: 74171 - DNA, 1794 bp, Staphylococcus aureus M0109; identical to SEQ ID NO: 71697

SEQ ID NO: 74172 - DNA, 2190 bp, Staphylococcus aureus M0111; identical to SEQ ID NO: 71982

SEQ ID NO: 74173 - DNA, 1794 bp, Staphylococcus aureus M0111; identical to SEQ ID NO: 71697

SEQ ID NO: 74174 - DNA, 2190 bp, Staphylococcus aureus M0123; identical to SEQ ID NO: 71982

SEQ ID NO: 74175 - DNA, 1794 bp, Staphylococcus aureus M0123; identical to SEQ ID NO: 71697

SEQ ID NO: 74176 - DNA, 2190 bp, Staphylococcus aureus M0186; identical to SEQ ID NO: 71982

SEQ ID NO: 74177 - DNA, 1794 bp, Staphylococcus aureus M0186; identical to SEQ ID NO: 71697

SEQ ID NO: 74178 - DNA, 2190 bp, Staphylococcus aureus M0337; identical to SEQ ID NO: 71982

SEQ ID NO: 74179 - DNA, 1794 bp, Staphylococcus aureus M0337; identical to SEQ ID NO: 71697

SEQ ID NO: 74180 - DNA, 2190 bp, Staphylococcus aureus M0353; identical to SEQ ID NO: 71982

SEQ ID NO: 74181 - DNA, 1794 bp, Staphylococcus aureus M0353; identical to SEQ ID NO: 71697

SEQ ID NO: 74182 - DNA, 2190 bp, Staphylococcus aureus M0453; identical to SEQ ID NO: 71982

SEQ ID NO: 74183 - DNA, 1794 bp, Staphylococcus aureus M0453; identical to SEQ ID NO: 71697

SEQ ID NO: 74184 - DNA, 2190 bp, Staphylococcus aureus M0454; identical to SEQ ID NO: 71982

SEQ ID NO: 74185 - DNA, 1794 bp, Staphylococcus aureus M0454; identical to SEQ ID NO: 71697

SEQ ID NO: 74186 - DNA, 2190 bp, Staphylococcus aureus M0457; identical to SEQ ID NO: 71982

SEQ ID NO: 74187 - DNA, 1794 bp, Staphylococcus aureus M0457; identical to SEQ ID NO: 71697

SEQ ID NO: 74188 - DNA, 2190 bp, Staphylococcus aureus M0469; identical to SEQ ID NO: 71982

SEQ ID NO: 74189 - DNA, 1794 bp, Staphylococcus aureus M0469; identical to SEQ ID NO: 71697

SEQ ID NO: 74190 - DNA, 2190 bp, Staphylococcus aureus M0527; identical to SEQ ID NO: 71982

SEQ ID NO: 74191 - DNA, 1794 bp, Staphylococcus aureus M0527; identical to SEQ ID NO: 71697

SEQ ID NO: 74192 - DNA, 2190 bp, Staphylococcus aureus M0542; identical to SEQ ID NO: 71982

SEQ ID NO: 74193 - DNA, 1794 bp, Staphylococcus aureus M0542; identical to SEQ ID NO: 71697

SEQ ID NO: 74194 - DNA, 2190 bp, Staphylococcus aureus M0563; identical to SEQ ID NO: 71982

SEQ ID NO: 74195 - DNA, 1794 bp, Staphylococcus aureus M0563; identical to SEQ ID NO: 71697

SEQ ID NO: 74196 - DNA, 2190 bp, Staphylococcus aureus M0564; identical to SEQ ID NO: 71982

SEQ ID NO: 74197 - DNA, 1794 bp, Staphylococcus aureus M0564; identical to SEQ ID NO: 71697

SEQ ID NO: 74198 - DNA, 2190 bp, Staphylococcus aureus M0567; identical to SEQ ID NO: 71982

SEQ ID NO: 74199 - DNA, 1794 bp, Staphylococcus aureus M0567; identical to SEQ ID NO: 71697

SEQ ID NO: 74200 - DNA, 2190 bp, Staphylococcus aureus M0577; identical to SEQ ID NO: 71982

SEQ ID NO: 74201 - DNA, 1794 bp, Staphylococcus aureus M0577; identical to SEQ ID NO: 71697

SEQ ID NO: 74202 - DNA, 2190 bp, Staphylococcus aureus M0593; identical to SEQ ID NO: 71982

SEQ ID NO: 74203 - DNA, 1794 bp, Staphylococcus aureus M0593; identical to SEQ ID NO: 71697

SEQ ID NO: 74204 - DNA, 2190 bp, Staphylococcus aureus M0615; identical to SEQ ID NO: 71982

SEQ ID NO: 74205 - DNA, 1794 bp, Staphylococcus aureus M0615; identical to SEQ ID NO: 71697

SEQ ID NO: 74206 - DNA, 1992 bp, Vibrio parahaemolyticus V-223/04; identical to SEQ ID NO: 72330

SEQ ID NO: 74207 - DNA, 1752 bp, Vibrio parahaemolyticus V-223/04; identical to SEQ ID NO: 72331

SEQ ID NO: 74208 - DNA, 2034 bp, Bacillus amyloliquefaciens EBL11
ttgaaaataacgaaattaataattaataactttcgatcctttggaccaactaatactgaaatagaattagaagaattatcagttctaattggagcaaacagtagtggtaaaacttctgcaatccaagctctattaaaactttttagtccttatcaaagagatagattaatagaaaggtcagatttccatatacctgctaatgaaaatccattagattatgatgagtcttcactttctatagaggctataattgattttaatgaacttgaaaatgatgctgagaaggtaaagactactatccccccgcactttaatcatatggttgcaggtgaagttgatggaagtccttatgtacgtataaggctaaaagctgagttatcagaaggatatactttagaaggaaatattgagcaaggattatattatgtcttatctccattaggaacaaaagcagaagatgaagatttacagccggttaaagctagtgagcgttcccaagttcaaatgatatatatacctgcaacaagagacccggccgtacaattaaaaaatgcatcaggaacaatcttagggaggattttaaaagggattaactggcctaaagaaattaacagtgacatacaagaaaaaatgaagcaagttgatgggatttttgatgaagtaaatggtgttaaacggttaagagaaatacttaatagtcaatggagaaaataccataatgattttcgctacggctcaactatggttgctttcaaccatgcagatttagactcaattctaaaaaaggtagaagtttactttgaaccaactgaaacaggaagcaaatataaggtggatcaattaggtgatgggctacgatcaattttttacttaactctagtaaattcttttttagaaattgagaatgaggcattacaagatgacgctgaggaagataaaaaagtgtataatcttcaaccaccagtgttgacgttgctagccgttgaagagccagaaaatcatatttctccgcacttacttggtcgaataatgaaggccttaactgacgtttctgaaaatgataatgcacaagttttagttgctacccactcaccctcgatgataaaaagagttgatccaaaatcaattcttcattttagaatcgatcaaaaagaaataagaactatcgtaaattcaataatacttcctgaaaaagataaggaagaggaatataaatatataaaagctgctattatggcatatccagaactttatttttcacaatttgttgttttaggagaaggggatagtgaagagattatacttccaaagataattaaccttctagataccgatttagatcaaagcaatatttcgatcgtcccattgggtggaagacacgtaaatcatttttggaaattactacatcagttgaatatcccttatctaactctattggatttagatttagaacgaaatggtggaggatggggtcgaattaaatatgcattacagcagttgatccaattaggctacgataagcgtgagttactttctgtacaaaatggagtactaagcgatgacgaattctctcgtatgcatacatggtctatagaaaaggaagatgaaagagaaaatctctattcatgggttgagtttttagaagactatggagtttactattcggctccattagatattgatttcatgatgattgaaagtttcctagatgcatataaaaagacagttccaaaaaatggtggtccaaaaggtgtagataaagagaaggattctattgaatatatggaccgtttagaaaaaggggtaagagcaaccttaaaaactgagggcggttcaggaattacctattcggacgaaaagaaagaattaatgatttggtatgattactttttcttaggcagaggtaaacccggcactcatattatggcattagaaaatatagatacgaaattattaaatggaaaattaccaattcctcttaaaaaattaacgaagggaataaaatcatttattgatggtgatttatctgagtaa

SEQ ID NO: 74209 - DNA, 1872 bp, Bacillus amyloliquefaciens EBL11
ctgagtaactatgtaaaaaaagaatcttggattccaaaagacggagttgttttagaaagagctgcgcaagaagtggtaaagtatgagaaaaacgcctatgtgttatctggtcccggagcaggaaaaacggaattgttggctcagaaagcatgttatttgttagaaacaaatacaagcgcatatcctgctagaatactagctataagtttcaagagagatgcagctaagaatttaaaagaacgtgttgaaaaacgatcaggaaaagaatttgcaaataggtttgtatccttaacatttgattcatttgctaagcaaataatggataggtttcgtttagctattcctgaattttatagaccatcattggaatatgaaatagtaaattttaataaaagggatgtacctattctcagagaagaagcagaagaacctagtgaagaaaatgggtggaattactactttgattatgagctttttgccaagacatatgcagttgaaagattaccattacatatggacagaataaattcagtggaatcttggtataggtttcaactttggaaaacctatattaacgaaaaagaaaattcaagattaaccttcccaatgatttcaagaattgttgaatacttatttaggtcaaatcccaagattttaagagcaatcagagctacatatagtcatgtttttttagatgaatttcaggacacgactttaatccagtacgacttagttagaacaatttttatggattcaaatgtttcagtgaccgctgtgggtgatcttaaacaaaagattatgggttgggcaggtgctatggagggagtatttacacaatttaaggaagactttaatgctaaagaatttgagatggttctaaatcataggtctgctcctaatttagtccgaattcaaacatctataataaatgatatgatgggtggttcaacagtagtaataccatctgacaaatggaagaatgaggatgagggaatatgcgaaatatggaacttcacctatgcttctgaagaagcaaaaacactggcattagaaatcaaaacgtggattgatcaagaaaaacttgaacgaagagatataggtattttagttaggcaacgggcagatatgtattgtgacatgcttatagatgaattaagaaatttaggaatacactctaggatagaggatcaatggcaagatttactagcggaaaattttatgaaatttataatcgatgtattttctttagccacaacagatcgtgaccctaaagcttggtccagtttaatatcgaatgttttaagtttacgtggcgataatgaaacagaatcttatcaagtagaaaaagaaattaatagttttatagttgactttaaaaagattcttaaagatgagacaatgaaagtgaccgaaaaagtagtagagcaattgctatacgaaattttaactttgatagggttagatataattaaaagtagctaccctgagtatagaaaaggaaattatttagaaagaaaagtaaaacttacatctgaatttcttttttattcatatgaaaagcataaagtttggaataaagcaatagaggattttttgggaatctattcaattccaattatgtctattcataaaagcaaaggtcttgagtttgaatctgtgattttattgggactagaagatagagctttttggaattatgaggattccccagaagatgaaacatttacatttttcgttgcaatgtctagagcaaaaactcgaatgatctttaccttttgtgaaaaccgcttctacggacaagaaaggtctaagataaatgacatttatcaaatgttggagaatgcaggcgttaaacaattcaaatggacgtaa

SEQ ID NO: 74210 - DNA, 1758 bp, Streptococcus sp. AC15; identical to SEQ ID NO: 74008

SEQ ID NO: 74211 - DNA, 1539 bp, Streptococcus sp. AC15; identical to SEQ ID NO: 74009

SEQ ID NO: 74212 - DNA, 2190 bp, Staphylococcus aureus H79477
atgtttatatctactcttcaaattcgaaattttagaaattatgaatccgaaatctttcgattcgataatgagacaaatactattataggtgagaatgattcagggaaaaccaatgctcttactgcattgagaatcttattagatgatagttattactatagtagtaaaacactgaaagaatcagatttttttcatggaattcaaaatgggtggcaagggcattggattattatctctgcgacatttgaaggaatcagcgaagaagaatttgacaatgagatttgtgcttccatttctttaaattctgaaagtcaaacaatcttagaagaattgatttcaaatgcagataaaggtgtaggtagtatttctctatttattagacctaacaaagctattagaaagcaattatttgatatttccactgaattagactctcatcaatttaacgaatttagaaattctattcgtctatccgactatgaattttactacacatctaaatcaaatctaaatttctgtatcaatgaaaattatgataaattggtaggaagactcaatgacaatatagctagtaatcctgaagaagacgatgaagctcttttgggctcaagaattgacatgtcagatattttcaagcatatttcggttgtttatgttgacgctcttcgagatgttcttagagaaatgaaaaacaatcgaaaccctgtcaaaagaatcatggaaacaattgaatcaaaaatatcatcagataatgttgagtcattaaaaacaattatacagcaattaaatgagactattaccagtgttcctgaaattaggaaaattggcgaaaatattaatcggcaactaaatagcataattggttcagtgtattctcctaatcttcttctttcctcaactatgtcagatgatatgggttctttagcaaaatttctttcaatgaagccagaacaaaatatcgacttagacttactagggttaggacatctaaatatgatttatttagctttgaaaatagtcgaatttgaagcgtgtcgttcaagagaactacttaatattatgttgattgaagaaccagaagctcatattcatcatcatattcaaaaaactctgttcgaaggattaaatcttcaaaaaaactatactcagattctcatgaccacacattctgtacatttagctgaagtgtctgaaatatctcggatgaatgtattaaaatcgtttaatggcaaatctatcgttatgaatccagcaaataatctgaactcatttgctaaagaaaagttaaaaaagaacaatctaaatctaataaacgcagtagagagatatttagatgttaaaagaaatggattgcttttttctaaaggtgttatcttagttgaaggagatgctgaagaaatacttattcctcaaatagtaaaaaaattatttggtataaacttagacgaacttggaataggtttgattaatgttggtagtacttcgtttgaatatatcgctagcttgtttgacgatgatagaatacagagaaagtgtgctattgtaactgatttagatgaacaggcaatcccatcagaacatcgattgtataaaagcactgcacaagagaaaggtcaagcaagaaaagaaaaattatcctccctttttaatgaaaacaattgggttaattgtttttatgctaatacaacatttgaaattgagtttttagatgtgaataaagaaaatattctaacttatgtcagtccaattatagatgacgcattcaaagataaaaaaacaataactgcttataaagaagaaatacaaagtgaacaatatttagaaagaaatttagcgatgttaaaactagccaatcatgttggtaaggggtggtttgcaattgagttaggtgaaaaaattgactttttaatcaaaattcctaagtatattcttaatgctattgcttttgcatgtcaggaaatagtagatctctcaatttataaaaaaattctactccatacaatcgacttgtacgaggaaactacagaattgtcagctttatcagctagtttaaaaacaagtgatacagctgatttgaatatagcaataatttctttattagagtactttggtaaagatgaggatgttgtgtatctaatcaatcagatagaaaattacacaaaaatactttatgcggaggtttcaaaatga

SEQ ID NO: 74213 - DNA, 1794 bp, Staphylococcus aureus H79477; identical to SEQ ID NO: 71697

SEQ ID NO: 74214 - DNA, 2091 bp, Bacillus firmus DS1
atgtatatatctgaattaagtttggaaaattttcgttcatttaaagaaaaaaaaactataaattttcatgagggcatcaatgttattatcggacataataatgcagggaaaactacggtaattaaagccttagagctattatttgatataaagaagagtaagcgattatcaattgatgactttaacaaaaatactacttgtgaagagttaaaaaaagaaccacctaaaattattatttcagcaacgttattagaatctgaaaccgaagaggaatattctgatgatttagtaacagtttccacttggctaactaaaattgaaagcccttatgaagcaagaataacatacgaattttatcttcctgaaagagaacaggatgaatataaaagagagattgatagtatcaaaagcaatgatataaatgagtactggaatgagattcaacatagatttttacagaaatacgttcataaaattcatattggcgatcctaaatataagaattcagttgatactgaaagtatgaaaaagtttgcttttcaatttttaacagctattagagatgtagaacgtgatttatatagtggaagtaatgcattattaaaagaagttatcgacttttttatggattacgaagtgaaaataaacaacgcaatagacacggatgagaaaaataaacaaataagagaaaagaaaaggcagttctcaaaagatgcacaaggtcttattcattctctacaaaagaggatggaagaaggtaaagagcatatgcttcgatacgtaaaaaatactggagctgattatgataaaatgcagccttcttttgaagggagtattttggacactgaattgtattctgcccttaagctaatagtagaaaatgaaacaggtattaagctaccagcaataaataatggactaggttataacaacctaatttacatttctctattgttagctaaaatgcagaaagatgcttcgggtgattatctaggatcgaatgctaagatattttcaattctcgccattgaagagcccgaagcccatttacatccaaatatgcaatataaatttttaaagtttttaaagcaaaatcgagaaacagaagttaggcaaatatttatcacctctcactcaccaaatatcactgcagctgtagatttagaagatattattgttttatacaaagaacaagggaagattgaagtagcttatcctggtaaagtatttagcgatagtgatgaagatataaaatcaaaaaaatatgtccagcgatttatagacgttacaaaggcggatatcttctttgctaaaaacattgtactggtcgaaggattagccgaacaacttttagtgccggaattctcaatagctctggggcatgacttaacagacactcatacatcagtaataaacataggtggcagatactttgaacatttcttaaagttatttgacgtatctaaaaattctaatgctattaggaaaaaagtagcctgtataactgacttagacccagttagaaaaaggaaggggatcaaagacgcaacatggaaggcttgtggccctctctttttaaacagcgatcccggaagttatgaatataaagcatgttctaatcctctagttaaaaactatgtagaagattcaaaaagtttaattagagtattttcacaaaaagaaaaaattagtagtacatttgagtatgatttaattcttaaaaatattacagttaaagaactagtaaccgaatcaacatccaacgatacagagataaagaaactaatggatgcttataaatctaataaaacaataccagaaatgctttcccttttaagaaaaggtaactataaagaagaggtggagaaggtagttttacaaagcgaattttctgatgatgataagaaaaagcacataatagctggtcggtatttaaattccataaataaaggtgaggtagcacaagagttagcttatataatatcaagcaatcctaataatgttctaaaagaggtagcgagtaataaaattatatgtccagattacattaaagaggcgatagaatggattggtcaactgcaacaaaactag

SEQ ID NO: 74215 - DNA, 1593 bp, Bacillus firmus DS1
atggattggtcaactgcaacaaaactagttaatagtaagcttagtattcctatcgatcagcattttaaattatgtgcaggcccaggagctgggaaaacgacatttttaatccaccatattcgcaggatacttacttattctactagactatcgaaatctagacgaattgcttgtattacctatacaaatacaggagtagaaactattcgaagtcgtttaaaggatacaggtgaggatatagaaattagtacgatacacagctttttatatacccatgttgtaaagccttatttatggttattgaacgacatttcttttcccttggacaggttggaaggtcatgatgaaattaaaccgagttatacaacattgaaagaatataaacaaagaaccagtcaattttggataaaagatgatcaaggactctcaaacgcactatctaaactttcatgggtaattaataaacaagaggaagttgaattaggatttctaaaaccatatcatggaaaagttgaagagagatttatcaaaaaaaattcatacttaacttataaagaaatttgttgggaacaaggaatgatgagtcatgatgatgttttgtatttcagttatttaatccttaaaaaacatgaaaaagttaaagaaataattcgagctaaatttccttacttcttaattgatgagtttcaagatacaagccctatacaagtcgcaattactacacttcttgctgaaaaagaaataactgtaggtgtaattggtgatccaagtcaatcaatttactcatttcaaggtgctaatggaaagacgtttagtcaattcaatataaaaggtatgtccttttatattttagaaaataatcatcgaagcacaatacaaattatatcagttttaaatcatatgaggaatgataagcattttatccaacatagtccagataataaggtgggaaataaacctgttatattgattggtgatgtcttttcttcatatcgatattttttagaaaatgtaaaaaatgactggtgtgtcctttcatacaaaaacgaagtaactaatagaattaaatatgatataagggatatagtcaccactgattttgatttgttttacagagataataaaagaggaagactcatttattttgtagttcacgcacttgaatatgggcgacaaatgaagttaaaggatgctataaaatacatgaagaaagcatatcgttctatagaggattttacagatcaagatgcgttcagaaacttaaaaagactattaaataattatgaagattattactcaaataatattaaagatttttataatacccatatctttaattattatggggttaaatcgaagattacgaagggtgagattagtgagtactatgaaaatttaggttttgatagactcgcagccattgttaatatagcagatgataaaagtttccataagactatacataaagcaaaaggtgatgaatttaaaaatgtactggtaattagttctgaaaataattataataagcaacttgattttttattatcacctgatatgagtaaggaggaacatagagtattttatgtagtgtaa

SEQ ID NO: 74216 - DNA, 2088 bp, Klebsiella pneumoniae UCI 18
atgcaatgggaagcagcccctgatgaccaagagccgattcagtgggatcgcttctcaccattcctggatgtatggctcgacgttcctccaaatgaacttcatcacgtacaaaagattttgcccacgctggattgggatggggaaagcataggtgtgcgcctccgttttgaacccaaggaccctgacgcactgcaacacgaatatctcacggcaaaacgcgcagccgccgaagttatggcccaagctaaagagtacggtgaacaagtaagctccacaaccgcatttgcactttggccgcgttcgatgatggagtttttagcccaaagaatgcgctctactttcgagatccgtgcttatttgcttgatccttcaaaactgaaaatgccggaagaaggtagagcctcccctcaaacactcccagaaagcagtgaccctatcgatggcggggatccgtttaatggtcttattcgtatcgacgagattagcgcacagcgtggatttgggcacagcgatcaaacagggtatacgcggggtaacgaatcacgtgaggatatggctgaacccagaatggggaaaaaactttccagccagctgcgcaactactatagccaacacttggatcctttcgatacgccggaacccaaagaccttcaggcgttgatggcattgcatgaagcacaaacggctttcggcacgcgtttagcagattgcttctcagatgccttgaccgaactggaaaatattggctatcccggcgttaccgaccccaagctgacaataaccaccaacatcaggcctatcgatgggcttaatcatccgtccgccgtgcaatacgaagtgccaacccatgttaccggttcttttggcgcacatcgccttcccgaagattcgaacggacttggttaccaaaatctcgtctccatcgtcttcgcactcatggcatttcgtgataactggatgaaagtcggaaaggctggaaaatcaaaggtggcggaagaaactctcattccaccgcttcatctagttttgattgaagaacctgaagcgcatttacatgcacaagttcagcaagtttttattaagcaagcctacggtgttctgcgaaaacatgacaagctaaaggattcttcacgccttcaaactcaactgatcatcagtacccactccagccaccttacccatgaagctgagttttcgtctttgcgttactttcggcggctaccagcactcgcacaaagcggtgctgtacccttgacttccgttatcaatctttcggaagtcttcgatggcaaagacaaaaccgaacgtttcgtgaaacgatatttgaaagctacccactgcgatctcttcttcgccgatggagcgatactcgtggaaggtccggctgagcgtattctcgttccccattttgttcgtgagcgtgaagcctatgcttacttaaagcgtagctatatcacatggcttgaaataggcgggagccatgcacaccgattgaagaatttgattgaacatctgggtctcaataccctgatcatcacagacattgacgccaaagacggcaccaccaatgctgcggttgtcccgaaacgaggcatgggccaacgagcccgcaatgagacagtgaaaacgtggctacctaaggaagaatctttcgatgcactcctcgacatggaaagtgagcgcaaagtgcttgccgaaccaggcggctatgccatccgggtggcgtatcaaacacctattttcatgccattcaagtctgaagaagcgcttgaagcagtagccaacactttcgaagatgccctcgtgtatgaaaatccggggctattcgccaacctggacggttatgggctcatcgcaaagtttcgtgaagcgctaaaggagtccgccgatctcagcgaattggcaagaaagatatttgaggcactgaaaaatgggacaaaggccgaatttgctctcgatgtcctttttagtgaggaaatcgagcggctgaaggtcccacagtacattgacgaggggttagtctggctagcagaacagctgaaacgtaaagaatatgatgttcttggaaaaacggaggtgggagagtga

SEQ ID NO: 74217 - DNA, 1875 bp, Klebsiella pneumoniae UCI 18
gtgagcaggctggaaactataattcccgacgatgagatagacatgccggctgatgcggaaatcagaaaatgtcttgacctcgacaccccaaaaagtttcttcctttttgccggcgccggttcaggaaagacaagatcgctggtatccgctctccagtatgtgcgcgacacattcggggatgaacttcggctgaaaggacaacgagtcgctgtcatcacttataccaatgcggcgagcgaagaaattcaacgccgcctggattttgatccgactatagacgtttcgactatacatagcttcgcctggtcgctgatagaagggcttaaccgtgatatccgtgaatggcttcgcgcgaaaataaccaccgatatcacaaagcttgaagcagaagaagcaaaagggagaaaaggtacggaggcatcaagaacccgcttaaaaaaaatcgcctcgagaaccaaacgccttcaaaacctcgataacgtcaaacgttttgtttacagcccaaccggagaaaatctcggccgcgattcgctgaatcatgcggaggtgattcatctcaccgcctattttttaacaacaaaaccgaccatgcagaacatcttgatcggccgtaatcccattctgcttatcgatgagagtcaggataccaataaatttctgatagaagccttatttgccgttcaggctcaacataaagagacattcgttctcggtctgattggcgacatgatgcagcgtatttatagcgatggtaaagacggactagataaaaatctgcctgccgactgggcaacccccggaaaacagatgaatcaccgttgcccaaaacgcatcgtaaaattaattaacaccgtacgtagcgcagtggacaaacagatacaacggccacgaaccaacagccttgaaggcagtgtgaggcttttcgtgcttcctaatcataccgttgataaacctgctgccgagcgaaaaattgcgatgtatatggccgaggttgccgatgatgaacaatggcggaatttggcgctctgcaaatgcctcacattggaacatcacatggccgccagtcggttaggctttttagagctgtttgcccctttgtatagcgtgaaaagttggcgaaccaatcttattgatggctctttaccctgcgttcgattctttactgatgagatgctgccattaattcaggcaaagtttgccgaagaccgtttttccatagccagaattctaaaaaaacgatcgtcgctagtcagcccagatgccttgcaatacgcagcagatcaacgctcgcaactgaagttagcatcggcagcaatggaacgccttatggcattgttcgcacagggttctgatccttcgcttggcgatgtccttcgcttcgtagcggatagcgcgctcttgcctattcctgaatctctgcagctctgtatagcaagcgataatacgctacctagcgtaacaccgtatgtcgatgaaagtgatgccgaccaccagagtgagcgtacaatggcgataggcgagtttttacttgcccctttctctcaggtcgaaaaatttgcatcctacgtatctggaaaagcgcctttcgatactcaccaaggtgtgaaaggactcgaattcgaacgtgtgatggtcattatggacgatgaagaagcccggggttttatgttcaaatatgagaaccttttcggggcaaaaagcgttaccgatccctcggttgaagcagttcgccgactgttctatgttacctgcagcagggcgcagcaaagcctggccctcgtagcctatgcagcgtcaccggaacaagttcgccgattcgtgatggaccaaggctggtttaatgctgatgaaattgtcatcggaatacctgagtaa

SEQ ID NO: 74218 - DNA, 1962 bp, Klebsiella pneumoniae MGH 43
atgaaaatagagaagataaagctacagaattttcgttgtttcgggcatgaggtggtcgagctaaattttgaggaagaactgacaatacttgtcggcggaaacggctccggaaagacggcagtgctgcaagctgtgtcccggttgtttggtacatcatcagcgcagcggtcggtacagcgtcgagattttcacatacctcttggccggcaggagctgcagtctggcgacagtctgtttgtcgaagcggtacttgccttccctgaactggaagagcaagacgctactcctcttgatgccgttccggagttctttaatcagatggcggcttccggtgagggagggccccttaaggcccggatacgactacaagcaacatggacggatgacggtacgccggaaggagcaattgaggaggatatacgctggataagagccctggatgataattttgaatgggatgactgttccaggattcaggctgtagagcgctcttcaatccagtttatttacttaccggcaaatcgtgatgcgacgactcaagtgaccgcccttctaaaagggcggttatggcaggctgccaaatggtcgacggcatttagggatgcaagctatgttaatgccggtcagatccagagcagtttcgaagaagaggagccgtcgaagtttctgctggagcgtctttcgaagcgttggcaacaggtgcatgaagccgatacagacagtaaaccgcgtttaaggctcatcgagaaccgttttgaggagcttgttcgtaaagccgaatttacttttacgcctgatgaagaaggtcaggagcgtcatttgtccgagctgagtgacggtcagcgctctctgttccatatcgctcttacagcggcaacgctcgaaaccgagcgggaagctttttctttgcctgctgatgacagctcatttgaacaggataagttacgccgtattcacctgacgattcttgccatcgaagaaccagaaaacagcctgtcaacgttctttttatctcgcatcatcaagcaggcgagagagattggcgcactgccttccgctcaggttctgctatctagccattccccagctatcctgagccggatagagccggaggaagtgagatattttcgtatggaccggagcgctcggcgctcatcgatccgagaactgactctgcctgaagatgatgttgaggcaagcgtttatgtcaggctggctgtaaaggcataccccgaactttattttgcgcgatttgtaatcctaggtgagggagactcagagcgagtcgttattccgaaaattgcggaagagatgggggtttcccttgatccatcattcgttcccgtcgttccgctcggtggacggttcgtagcgcatttctggcggctgctgaatgatcttgagattccacatgccacattgctcgatcttgatctggggcgccgacatggtggggtgaataccatgagaagctgccttcagaatttggccgatatcgggagtaattttgggagcgccaatggagctaatgttgctcagcttaccgaccaacagctttataatgaaggcctgcaaggtcaatggcttcaagcattcaggagggaaggtgttttcttttcctatcccattgatctcgattttgccatgttgcacgcctttccaaccgcttatcaggttgccaatccaggtggcaatggtcctcagagtagtgctgttgctattcaagccaaaaaggtcagtacgctgaaaacaggtggtaatcctgccttgtataccgcgcattatgatgacgctttcaaatggtatccgtatttgttcctgagccgcagtaagcctgaaactcaccttgcggctttttcccgtatcgcggaaggtggtgttgctgcgtccgctcctgtagagctcagggcgctcattgagtacgttacggataagcttaatctgtcaggagagagtgaatga

SEQ ID NO: 74219 - DNA, 1866 bp, Klebsiella pneumoniae MGH 43; identical to SEQ ID NO: 73847

SEQ ID NO: 74220 - DNA, 1785 bp, Klebsiella pneumoniae MGH 39; identical to SEQ ID NO: 73678

SEQ ID NO: 74221 - DNA, 1818 bp, Klebsiella pneumoniae MGH 39; identical to SEQ ID NO: 73679

SEQ ID NO: 74222 - DNA, 1905 bp, Pseudomonas aeruginosa VRFPA06
atgaagcttcaaacgattcgtctatcgaatttccagtcttttggagtacagcctaccgagcttgggctggatgatattacttacctgattggccccaacggctcaggcaagacggctgctctccaggcgctgtgccgcctgtttgcttttgatccatccttgcgccgcatcctgcgatcggactttcacgtcccattcgatgaggagaacgtgccggaagaacgtcagctctggattgaagccgatttccttttcccggagctggcggaagatgaagacaacagcaccgttgctcctcactttggccacatgcgcctcgacgaggcggatggcatgccgcgtgtgcgttttcgcctcagtgccaccatgggacaggatggcgacatagaagaaaccttggtctatgtattggacgccaatctcgatggctcgccgctgacaactgcacaggtgccccgatctgagcgcaaccatatccatgtccactacctgccagcccgtcgtgacccagctgatcacatcgcctacggtgccaatgccttgctcgggcgcatgctgcgcgccgtgaactgggatgcggagcgtgatgccatcaaggatctcaccgaccaaatcagcgacagtctggcttccaacccatcggttaatgcattcagctcaagcttgagagcagcatggggcgctttgcataaaggcagtttttttaccgatccgaagattaccttcgtggcctctgaggttgaagccttgttgaggcatatgtcggtttccttttcgccggggcacgatgagcagttagtggacttctcacgcctgagcgatggccagaaatccatgctctatctgtccctcgtgctgtcgtcacaggccatcggtcgcgccgtactggctgaagaagacacatcattcgatgccgacaagttgcgaccacctgtttttacgctggtcgcagtcgaagagcctgagaacagcctttcgccccattacctcgggcgaatcgtcaatgccctgaacttgatgactggtaacggcgacgcgcaagcgttgattgccactcacgctccgtcgatgctgcggcgagttgctcccgagcggatccggtatctgcgtctgaccgaaggaagaacatcgcgcgttgctcatatccagttgcccgacactacggacgaagcacacaagtttgtgcgtgaggccgtgcaggcctttccggaagtctatttctcccgccttgtggtactgggagaaggcgacagcgaagaaatcgtgcttcctcgactccttcaggccaaaggtgctcctgttgacgagtcggcggtctcgatagcgcccttggggggacgccatgtcaatcacttctggcgactattgtctgcccttcagattccctatctgaccctgcttgatctggatgttgcgcgatatcaggccggatgggggcgaatcaagtacgtcaatgatcagttggcggcgcacgaaccaggcaagacactccctgcggaccatggcattcccaagtggaacgatgcggctgacaaggtccgaacatacgcaaactacagatctctgctcgaagcgcgagatgtgtatttctcgtttcccatggacctcgatttcgcgatgctgctcgcctacccggacgcctacggcgtagtgagagaaaagcccgatgagtcaacgatcaaggctgtcctcgggaaaagtcaccacgatgcaagtcaatacagcgaggacgaacagaaactgtttggcacttatcaccatagcttcaagcttggcagcaaaccggcagcgcatattgatgctcttgccaagctcagcgatgtggacctgctcgcgaacatgcccgaatcactcggacgcttggccgatgccgtgatcgccaagctcgcggagttgcccgagtga

SEQ ID NO: 74223 - DNA, 1674 bp, Pseudomonas aeruginosa VRFPA06
gtgataaccgtcagtgcatggcagcccgcagatgggctaacactcgaacccaacgccctgcgtgcggcaaaggagcaagtgcactgcctggcgttaacggcgggccccggtgcgggtaagactgagatgcttgcgcagcgggcagacttccttctgcgcacaggcacttgccgctatcccaaacgagtgttggctatctcgttcaaggtcgacgccagcagcaatctgaaggagcgagtgaagcgccgctgtggctctgagctggcctcgcggtttgacagctacacctttcacgcttttgccaaacgcattatcgaccgcttccggccagtgctaacgggtgactatgcgctggatgttggatacaaaatcgctgatcgaaaaactggaccctcgcgcagtctcatcgagtttgctgacctggttccgctggcgatccagattctgcagaaatcaaaaatggcacgtaacgccatccgtcagacctacagcgatgtctttctggatgaatttcaggactgcaccaatctgcagtacgaacttctgaaactcgcatttcaaggcaccagtattcgcctgaccgcagtgggcgataccaagcaaaagatcatgggctgggcgggcgccctagacggaatcttccagaccttcgctgccgatttcgccgcggtaccgctcaatatgtaccgcaattttcgttcgaagccgcgcctgctgcgcctgcagaacgaaatcattcgggtgctcgaccctacgtccgtcatgcccgctgatcagcttgtcggcgatgaaggcgaggtattcgcttggcgcttcgatgacagccgcaaggaagctgagtatttagcagacttgattgatggctggataaagaccgaacaactaccgccagcggaaatcgcagtccttattcgtaatcagcttgacctatacgctgaccatctcatggcggcattggaggtacgtggcattcctttccgcaatgagcagcaaatgcaggacatcacggtcgagcccgccgcccgattgattgtggattatctgtcctgcctctacggccagtgtgaacccaaagcctggattcggttaatgaatcagctgattcctttcgcggatgaggacattcagtcgaatgcgcgcaaggatcttgatcgactaatcaagcaacaacgaaaagaggcggccattgccgacctgatcgtggagcctttttctggctggtgggagtttgttcgagccttcttaaagcagatcagtctcgaaaccctcgtagcgctgtcgccagactatgagtcccaagatcggctcaaagaggtcgtccgaagcaccagggcgcgtatagaagagttgctcaagctagagcccgatttgcctaaagcccttgaacggttctctgacgaccaggcagtgcgcatcctgaccatccataagagcaaaggcttggagtttgattcggtcatcatcatggctgtcgaaaacgaaatcttctttggcaatcaggctgaaaaccgctgcgcatattttgtcggagtttcacgcgccaagaagcggctagttcttacccatgcagatcaacgggagcgacccgctggcgcgaataattggcgagttggccgaactcctcaagcggagtatttaggctatgcagcaccttttgtggggcaacaagaatga

SEQ ID NO: 74224 - DNA, 2346 bp, Burkholderia thailandensis H0587
gtgcatattgaattcgtcgaaatcgccaactttagaaagctgctgtcgacacgcgtcgacctgtcgactaccacgacactgttcgtcggggctaacaatagtggcaaaacatcggcgttgcttgcaatgcgccgctttctgtcgccgcgccgctgcccctttgaaatacacgacttcaccctgtctcacttgcccgcgatcgttgcgctcgggacaagctggattgttgcgcgcgatgctggggatgtcgtcgatctggtcgtcgccccgtgggtccgttttgtcccgacgcttgacctctggctgcatgttgaaactggcgagatgcatcgtgtccgtgacctgatcccgacgcttgattgggatggtggcaggctcggcgtccgactgcgctacgagcccaaggatctcgacttgttgttcaaggactttatgggcgccgtggccgaagcggaggcgatgagggctgcggcaattgccgcagcggcgttggagcatcaggactccgattccccgccagaccctcccaagctcacgctctggccggataaccttgtcgactttctcggcaagaagctctccacccatttcacaattcgtgcttattcactcgatcctgccaaactcgcggcacctgacaaatcccaggcgcgaccgcaagcgctgccagcggcttcgctgccgatcgagggggatcccctgaacggcctgatccgcgtgcacgacatccctgcacaacgtggattcggtgaggagcagtccagtcgagatgacgaggatactccggccgcgtcggcgggcagccgtctgtcggaccagttgagaagctactacgccaaacatctcgatccgaccaagggcccagatcccaaggacctcggggcgctccaggcgatcgaggctgctcaagatgcattcgacaagcggctgaccgagagcttcgaggtagccttcaccgaggtcgagggcatgggatatcctggcgtgaccgatccccgtccgcgtgtgtcaacccgactgaaggcgattgacggtctcaaccatagcgcggcgatcagtttcgaagtggacgtgagcactgaggatggtgcgactatccccatcctccgattgcccgaggccaataacgggctcggctaccagaatttgatctcaatgatcttccggctgatgagtttccgcgacgcgtggatgcgcgttggcaaggcgtcaaaggggacgacgaacaccgacattgaaccgctccatctggtgctggtcgaggaaccggaggcccatctccatgcgcaggtgcagcaggtctttatcaaaaaggcctatgctgtgctgcgcgctcacgaggatttgggcgagagtaagaggctgcgtactcaactcgtagttagcacccactcgagccatatggcgcatgagacccccttctcgtgcctacgctatttccgtcggctgccggccggtatggcggccaacgtgccggtctcgacggtcatcaacctgtccgaagtgttcggtccagcaagtgagaccgagcggttcgttacgcgctatctgcgtgcgcagcacgctgatctgttcttcgccgatgctgccatcttcgtggaagggccggccgagcgcatgctcgtccccaatttcattcgcgcacactatgacgaactcaaccagtgctacgtcacgctacttgagatcggcggcagccacgcgcatcgtctcaagccgctgattgaccatctggggctgctgacgcttatcatcaccgacctcgatactctcgacggcactggcggcacatctacacagccggcgaagggggccaatcagaagacgaacaacgcgacgttgaaaacttgggtgcctggcatcgaggatgtcgatgcgctcatggatgcagatgccgcggacaagacgctgcgcgcagatggtgatcctctgttcgcggtacgcgttgcttatcagacgccgttggctgtaactccaccgggggcagtcgaacccgaaatagcctacccctataccttcgaggatgcgctcgcgttcgagaaccttgcctatttttcagcgcttgatggagcaggtctggtacgcaagtttcgcgaagcgattacgaccggcggcggagtgaccgcgatcggtgaacgcatgtatcaagctctcaggaatggcaagaaagccgagttcgcgctcgacatcctcgacgttgagaagttcgacgacatcgccgtgcctagctatatcgccgaagggctcgaatggctccttaagcaactgaagaagaagcaggtcgagatcttggtccaggaggagcagaccgagcaatcagaacatggcgagcaggccgaaacgtga

SEQ ID NO: 74225 - DNA, 1914 bp, Burkholderia thailandensis H0587
gtgagtgccgccgacgaccagttcgatgcagcggccgacgagacgatcctcggttgtctgaatctggagaagccgagaagcttcttcttatacgcgggcgcgggctctggcaagacccgctcgcttgtagaggcaattcgtcgggtctgccatgagcaaggccgtcggctctggcttactgggcagaaaatcggcgtcattacgtacaccaacgcggcgtgtgacgagatcaagcagcggctcgagttcgacccacgcgtcgaagtgtcaacgatccatgcgttcgcctggtcgctgatcgcaggccatgacggggatatccgccaatggctcgccacgagactgctccaggatgtcgccgaactagagcaagcgcaggcgaaggggcgtccgggcagcaaggccgccacggatcgcgcccgctcgatcgagagcaagctacgccgccacgctgggcttgatgcgattgcacgcttcgtctacagcccaactggcgataaccggacccgagactcccttagtcatagcgaagtcatatcgatgacggccgatttcttggccgtgaagcctgggctgcgtcgcttgttggtcactcgctttccgattctgctcatcgacgagagccaagacacgaaccgcaggctcatggatgtactgctagatgtggagctggcatatcgtgatgccttctgcctgggtctcttcggcgatacgatgcaacgcatctatgctgacgggaaggatcgcctcgccgaggcgattcccgaacgctgggcacggcctcggaagcggatgaatcatcgctgtccgaccagagtcatcgagctgatcaacagaattcgccacgacgaggatcgtgaagaacaggtgccacgcagcgatgccagcagcggcgtcgtccgtttgttcgttgtgtcgcaggggaccgccgacaagacggcggccgaggccgcgatcgccgccagaatggccgagatcacgggggaccggaactgggcccagggctccgaagcgatcaagacgctcgctcttgagcatctgatggcggctcgtcgcttcgggtttgaggcatttttcgagccgctctattccgtcgagcgcatccggacaagcttcctgcaaggagcgggtgctgggatcgggctgttcacgcgcgagatcttgccattggtgaccgcgctgcgcgcgtcggaccactttgcggccgctgcaatcgttcgcagaacctcaccactccttgagcgaaaggcgctagaggaggcgggcgacaagcaggccgacattctcagcaaggctaacgtggcctgcaacggcctgttggcgctggtgtccgccgatgagaagccctcggcacgcgcggtgttggcctatatcgccaaaacccgtcttttcgcgatccccgacgtgttggtgccgttcgctactgccgacgaagttgccatcgcgggcaatgccggcggagaggctgacaatgaaaccagtcgggaagaagacctcgatctcgcgggtgagcttggcagctggcgcgaagcgcttgaagcaccatttgatcagatcgagaaatatgatcgatatgttaggggcgtctcgcaattcgatacacaccagggcgtcaaagggctggagtttccgcgggtgatggtcattgtgagcgacgaggaggcgcgggggtttatgttcgcttacgacaagctatttggggcgaagggaaaaagcaaggctgaccttgaaaacgaagcaaccggaaaggagaccgcaatcgaccggacacgtcggcttttctatgtgacatgtagccgcgccgaggagagcctggcggttgtctactacgcagctgatcctgcatcttcgcgagatgccatgattagacagggatggtttaagtccgacgagatcgaactgtttgggcaatga

SEQ ID NO: 74226 - DNA, 2355 bp, Burkholderia thailandensis 2002721723; identical to SEQ ID NO: 71708

SEQ ID NO: 74227 - DNA, 1920 bp, Burkholderia thailandensis 2002721723; identical to SEQ ID NO: 71709

SEQ ID NO: 74228 - DNA, 2337 bp, Pseudomonas aeruginosa SG17M; identical to SEQ ID NO: 73776

SEQ ID NO: 74229 - DNA, 1878 bp, Pseudomonas aeruginosa SG17M; identical to SEQ ID NO: 73777

SEQ ID NO: 74230 - DNA, 2301 bp, Halomonas sp. BC04
atgccagaagcagccccagctgtccctgtatccggagatatccagcttcgatttctcgaactctgccagtttcgtcggctggaaaaagttcagttggacgtcgacaaaaagaccaccatcctggtcggcgcaaacaacagtggaaaaacctcgattcttgctgccctgcgacacttccttgcggatgggtcctccttcggcgctttcgacatcagcctctcgcagtggccaaaactacgagctcttggcaaaatttgggaagccctgaccgaagacccctcaacaatcgccgggactgaagatcagtggaatgagcagctccagacaattcttacggccatgccaacactggacctctggttcgatgcagaagccggtatgtaccactacgtcgcaccattcctttctaagctgagctggcaaggaggcgcagttggtattcgcctgcgacttgagccagccgcaagcattgaagagctgaagcaactagcctggatgtatcacacggcgcgtttgccagttaaggacatgggagcggactcgctagcatggcccatggacctcctcgatttctggctacgtgagccatcgaagcttggccaagttcgtgtatacaagctagatgcagataacaacccagtgacaggcttcgcaacatacaccactcagatactctctgaagatgcctgcccaattgagcgtaagcaattgctaaaattgttacgcgttgactttgtcgcggcccagcgagggctcggaagcgaagaagcagactcacggtctgcctcgggaccgcatcgggtcggcatgttttcaaaccaacttctaaagtttgcccgacagcacttgaatgttgccagtaccggacatggccaccgtgcagaccttatcaaagccgtggctgaggcgcagaaagagttagataagaaaattcacgaagccatcgccgattcggttgaggaagttaaggagctcggctatccggggctgcatgacccccaagaaatccgcttccgcacacgcatccagacggctgacctgctcgaccatgggaccgctgtccagtacagcatgcagaaggagtctctcgaagagcttctacccgaatattctatcgggctcggctaccagaatctccagtccctcagctaccagctggtttccttcaaagcagcccggcttaagcctgaaaaaggttctcctgcacctgttcacctagtgatgattgaggagcctgaggcgcacctccatgttcaggtgcagcgtatcttccccgacaaggcgcacaagctcatcagtccgactgagcaaaatgcatcagctctcaaaagccagctactcattagcactcattcgagccatcttgctcatgcggagaactttgacagaatccgatatgttcgccgcatcgcgaagagtgcggaaaaacctatgcctacgaccgaagtggtcaatcttggtcaggtctttggtgatgacaaaaagacccgtcagtttgcggagcgctacttccgcgttcagcacacagatctgctgtttgctaatgcagccattttcgttgagggtgttgcagagcgcatgctggttccgctcttcattgagcgtgactttaagacactgaacagccgctacgtgtcctttctggatatcggagggagccatgcccaccggctcaagccactcgttgagaagctcaggattcctacggttatcattaccgatattgacccatctgaagaaagggaaggcaaacccaagaagaatggtgatccgaccaaaaaacttgtcgcggttgcgaatacgggtcaaattggactttactgcggtaacccgactcttcgtggctggcatccgaagctaaaccaactcgatgatttcaaaaacccaactgacgctcagttggtatggaatgagaccgcggattgcctcgtgcgtttcgcttggcagttgcctgtctctgaagctggcggcagctggcccagcacgtttgaagattcgctcgtccttacgaacatgccctggttcaagggcctgatggacgaaaaagtcgatgagaatggcttggagattgaagcaccgacgggagcacttggctctgttgcaaaaaggaccgctgaagacggaagctttccagaactgctctgtgcacttcacacactcatgcacggttcgttcaataaaggggacttcgccgcaagcatcttcgaaatgatctcgtcggatgagcccgtcgtatgcccaaaatatatcgcggatgccttggcctggctgcaggcgcagcttgaaccaggccaggagtga

SEQ ID NO: 74231 - DNA, 1962 bp, Halomonas sp. BC04
atgagcgcggttcctacctttgccaacaacgaccgcgatgctggggttgttgaagaaatctgcggctatctcactgaagagcctccgcgcagttacttcctatttgccggcgcgggatctgggaagacacgtacgctcgtagaggtgctacgtcggatgacaggtgtcgtggagcatgaaaagggtgagcgtcttgcccggagcctgcggatgtacgggcgctcaatacgtgtagtcacatacacgaagaacgcggtcgcggtcataaatggacgcctcggagataacgacttggtggaggtctccaccatccacgcgttttgctgggagctcattagtggatttaatgaagacatccgcacggcgctcatagctatcaaggaaactcaacttgaaaaggaaactgcagaagcccgagcaaaaccgaggggaattacggcggcaaaacagcgggatctgaatgaactcaaggaggtgatagaggcgtttagagggacggatgtgttcatttaccatccggaccgtgagacatatggtcccggcgcgcttgcccataagcacgtcctcgacgcaacggcctggcttctcaggaacaggtctacgctccggactatcctcaaagaccggcatcccattgtactcatcgatgagtcacaggacacgatgaaggggatgctggatgctttgatgggccttgctgagccaagaaggagtggccttactcttggattgctcggcgaccatcggcaacgcatctataccgacggacattcggaccttccaagtttggtaccaccgagctgggcgacaccggaactgcaaatgaaccatcgcagccagtgccgaatcgtcaccctcatcaacagaatctgggaagcggaaatcgaggggcggacccaacctgggaacggcgtggaacagcattcaagaaccgagaaggcgggcggggctgtccggatatacgtaggtgacacgaagctttcttcagaagataaggttatctgcgaacgttggtgcgcagaccagatgcgggaggcgagcggggccgccgcttggagccaaggtgaataccagatgctcgcattggaacacaagctcgtcgcaacacgaggctcgttcctcgatgcgtttggtgccatggtgctgcttgatccgaatgctgctgcacctagtggaagcggcgaaaacaaggggcccgctgcagtacaggttctattcaacgaactcgctcagctagaggcgtgcgttagtcctgatggtactgttgatgagttcaagaccacagagatttttcggcgctacggccgtctcgatgacatgcctgaggacacggcagcgcggataagccgtaccgacgaaatgcttcaagctattgaagtttttgctgctgcctgtgcagatccgatttcgacagtgggggaggtgcttgaaccggtcttgagcgcaaagctgtttgaggttgaccctcgtctctcggcagcatacgcggacacatcgctcccacctccagcgcctggtcgaggcgaagaggagtccaaacaggaccggatgcgccgtggttggtgcgcgctgttcgcttccccttggattcagttacaaaagtatcgaacctacctcgcggggaactcggtactggcaacccaccaagtcgtaaagggttctgagtttctccatgtcatggttgtaatggatgacaaattagctggcggcaaccagatttcctacgacaaaatttttggtggtgtgcagctcagcaagacggacagagaaaacgtagagaaaggtaaagaaacgactatagaccgtacgttgcgccttttatatgttacatgcagccgcgcccaggagtcgttgactctcgtgctctggtcgtctgatccaacagaagccctagtgcgaatcaagaacagcggctggtttgtagacggagaatttgaagcgattcctgagatagctaattga

SEQ ID NO: 74232 - DNA, 1593 bp, Bifidobacterium breve 2L
atgaagatatcttcggtgattgttagaaatcacagtaggctaatcgactgcaccctggatgttagagagaacctgatactcgtagggcctaacggaagcgggaaaagctcattaattagatgtcttgatctgctattgggcaaaaccatgcagcaactgtattacagtatcagcagtgcagattttaggaacatggaacgtccgctcattattgaagcaaagctaacaaatcttaatgagaatgagttctcatttttcccagacgaagttgatgcttccgacggatctttgacaattcgactggaagcgatcttcgatggcgaggatcttacgattagccgttattgtcctaaaggtgtaggcaacggcacattgagttcatcacagctcaaaagtattagatggaacctaattccatcggatttttcagctaagtctctaaattcagggcggaggactattgtcgatgattatcttaaggaaattaacgcgtcgggtgataagacgaaaatagaagaagccatcagcgcgctctgcaatgcaattgatacttcaagtgcctttgatggagctttaaaatccttggcactgcagttgaacccggcattggcaggcggcgtggacgctactgatctccgtttcattcccggagcagcaattgatggaaatctgctgagcgatgtgagattacaaataaagagtagatccggagttgtacgacaagctactgaacagtcagacggtacaaaggcgttgattgccttcgccgtatttaatttgctgaattcagacggaatcatcgccattgacgagccagagactcatcttcacccatctgcccagcgtaatttgatgcgtattttgttgagcatggggcggcagctagttatcgcaacgcattctggagttgttgctggcgagtttaatcctgacaatatagtggtaactcgggatggactcattcccgtacagccgcgtcaggggttccttcagggagatcaaaaagcgctagcaagatggtggataagcagtagaattgagcttttgacagcaaaacgcatcattgctgttgaagggcaatcagacagaatgctagtagaaaaagtcgctgagctaaccggacggcatttggaaagagacggcatagagctccttgaagccggtggatgtaaggaaatgcctcacgtaatgagcatctttggagagaacggtttcggcatgcaggttagcgtcctgattgacgaagatgccgaagcttatacagcgagatcattaggtgttcaggttaataatctcgcctcgaaagccgtatatgtctcaaggattgaccttgaagatgaatatgtctccgctatcggggcagctaaactatgggacaaacttggtgagtcgagtttgtttagcccagaggtgctgcagacttgtgccattactgatgatgcaagcattccagatgaagatcagcttgcatcattctgtagacacaagagaaataaaattgcttgtgctgtaattgctagtgaaaccttgactaaagattccgcagaaaaggtttctagcgttatcgaggtgcttcaaaatgacgtccactga

SEQ ID NO: 74233 - DNA, 1107 bp, Bifidobacterium breve 2L
atgttgcgaaactttatagaaatcattttttttgcggcgctagttgatgaatttcaagacttgactcatcaacaactacgtcttgttcaagctctctgcaaagatagagttacgtttgcaggagaccttgctcagggtatttattcattcgctggaggcgacgcaagattcgtatttcacgaaattactaagaataccgaaaaacaagttaagcttcttaaatcgttccgttcttcgcctgccattctcgatgccgtcaattcactctctccgcgaactggtagcgagcatctaagcgccgctttcccggaacattggggcaacggcgggctctcttcatatgcttcattcaatcgcgaggatgctgaagcggaatgggttgttcgaatgtgtcaattaattttggaacgttgtcctgagcatcgaattggaattatctcccgaactgctttccgagcggaatccgtcaagagcactcttaaatctcataatattagctatgctgactggggaaatggcttattcaggcctgaaacggcaaaaatattgcgaaacatctgtgatgaattatcagtcgagtcatgcaaagagcctgaagaattaatgtccttcatcaaaaagaggtataccgcttttcatggaaatttatccgaagaacacgaagatgcatgtggatggttgtttgatcggctagcacaatctgatgcatcctcaatagcagaagtcaagagatgtattaatgcgaaaaaaggcaataaaactatcgcaacgcgcaaaggaatacattgtttaactgggcacgctggaaaagggcagcaatttgattgggtgtttatcgtaggacttgaagaaggaaccataccgttttataaggctaaaagtgaagaggctatagatgaggaagcgagagttctttcagtaatgatctctcgtgcacgaatcggttacgtagcaacttcatcttcgactaacccacgtttttggtattcaagaaatgcctcatctttccttcgttatctgcagcatgctccaaattttttgtttggtaaagatcaaatagaattatggtgtgccgaagcggattggacagcactgtcgcagatgtag

SEQ ID NO: 74234 - DNA, 1593 bp, Bifidobacterium breve 12L; identical to SEQ ID NO: 74232

SEQ ID NO: 74235 - DNA, 1704 bp, Bifidobacterium breve 12L
atgacgtccactgagtatgtcatgacgcaagagcagcaggggattttcaactatcgaccgttgaacatggtgattactgcgccggcaggatgcggtaaaacggaagctctcgcttatcgcgcaaagggtcttattaatcgttatgattttgcagggaacgggaggaagctgctggttgtatcttttacaaatcaagcaaaggataatatcagcgagagaattaagaaacacattggattgcaaaccatgcggcagcatgtcacagtatgcaatttccatggattgtctgcgagaatcattaatgcacacagggaaatgattggacttgatgacgaatggactgttgcgagttttgactggattggaagattcatgcaatcccttaattgcgatagaaaagtaaagatgcaggctagggaggcacttcaaaaaatcaaacttgaatgtctaactgacaaagaagtgaaagcaaaaattcaaacaatttatggacaggtcggcaatcttgcacaaattatcgagaaagaacggattaaagaaaaaattattacctatgatgatcaaatcagaactgctttatggattctgcagaataagaatgttgcgaaactttatagaaatcatttttttgcggcgctagttgatgaatttcaagacttgactcatcaacaactacgtcttgttcaagctctctgcaaagatagagttacgtttgcaggagaccttgctcagggtatttattcattcgctggaggcgacgcaagattcgtatttcacgaaattactaagaataccgaaaaacaagttaagcttcttaaatcgttccgttcttcgcctgccattctcgatgccgtcaattcactctctccgcgaactggtagcgagcatctaagcgccgctttcccggaacattggggcaacggcgggctctcttcatatgcttcattcaatcgcgaggatgctgaagcggaatgggttgttcgaatgtgtcaattaattttggaacgttgtcctgagcatcgaattggaattatctcccgaactgctttccgagcggaatccgtcaagagcactcttaaatctcataatattagctatgctgactggggaaatggcttattcaggcctgaaacggcaaaaatattgcgaaacatctgtgatgaattatcagtcgagtcatgcaaagagcctgaagaattaatgtccttcatcaaaaagaggtataccgcttttcatggaaatttatccgaagaacacgaagatgcatgtggatggttgtttgatcggctagcacaatctgatgcatcctcaatagcagaagtcaagagatgtattaatgcgaaaaaaggcaataaaactatcgcaacgcgcaaaggaatacattgtttaactgggcacgctggaaaagggcagcaatttgattgggtgtttatcgtaggacttgaagaaggaaccataccgttttataaggctaaaagtgaagaggctatagatgaggaagcgagagttctttcagtaatgatctctcgtgcacgaatcggttacgtagcaacttcatcttcgactaacccacgtttttggtattcaagaaatgcctcatctttccttcgttatctgcagcatgctccaaattttttgtttggtaaagatcaaatagaattatggtgtgccgaagcggattggacagcactgtcgcagatgtag

SEQ ID NO: 74236 - DNA, 2190 bp, Staphylococcus aureus M1319; identical to SEQ ID NO: 71982

SEQ ID NO: 74237 - DNA, 1794 bp, Staphylococcus aureus M1319; identical to SEQ ID NO: 71697

SEQ ID NO: 74238 - DNA, 2190 bp, Staphylococcus aureus M1304; identical to SEQ ID NO: 71982

SEQ ID NO: 74239 - DNA, 1794 bp, Staphylococcus aureus M1304; identical to SEQ ID NO: 71697

SEQ ID NO: 74240 - DNA, 2190 bp, Staphylococcus aureus M1297; identical to SEQ ID NO: 71982

SEQ ID NO: 74241 - DNA, 1794 bp, Staphylococcus aureus M1297; identical to SEQ ID NO: 71697

SEQ ID NO: 74242 - DNA, 2190 bp, Staphylococcus aureus M1270; identical to SEQ ID NO: 71982

SEQ ID NO: 74243 - DNA, 1794 bp, Staphylococcus aureus M1270; identical to SEQ ID NO: 71697

SEQ ID NO: 74244 - DNA, 2190 bp, Staphylococcus aureus M1263; identical to SEQ ID NO: 71982

SEQ ID NO: 74245 - DNA, 1794 bp, Staphylococcus aureus M1263; identical to SEQ ID NO: 71697

SEQ ID NO: 74246 - DNA, 2190 bp, Staphylococcus aureus M1262; identical to SEQ ID NO: 71982

SEQ ID NO: 74247 - DNA, 1794 bp, Staphylococcus aureus M1262; identical to SEQ ID NO: 71697

SEQ ID NO: 74248 - DNA, 2190 bp, Staphylococcus aureus M1153; identical to SEQ ID NO: 71982

SEQ ID NO: 74249 - DNA, 1794 bp, Staphylococcus aureus M1153; identical to SEQ ID NO: 71697

SEQ ID NO: 74250 - DNA, 2190 bp, Staphylococcus aureus M1132; identical to SEQ ID NO: 71982

SEQ ID NO: 74251 - DNA, 1794 bp, Staphylococcus aureus M1132; identical to SEQ ID NO: 71697

SEQ ID NO: 74252 - DNA, 2190 bp, Staphylococcus aureus M1124; identical to SEQ ID NO: 71982

SEQ ID NO: 74253 - DNA, 1794 bp, Staphylococcus aureus M1124; identical to SEQ ID NO: 71697

SEQ ID NO: 74254 - DNA, 2130 bp, Granulibacter bethesdensis CGDNIH2
ttgcgccgaaatcaccgcgagagccaacggagcgggaaagacagaaaggggaggctgatgcgaatcaaaggggtcgaaatcgaaaatttccgccttctgcgagacgtagcggtgggcttggaagagcgcaccacgctgatcgtgggccgaaacaatagcggcaagacctcgattgcagagctgtttcgccggctccttggcgagaaagcaccctcattcagaatggaggatttttctctcggttgccatgagtgcttctggacggcgttcgaagccttccggactgaggcttcagagccagatgtcgtcgcgctcctcccatccatcaaggtcacgattgacatcacgtatgatgtcaacgctcccgaccttggcccgctgagcgactgcatcgtcgatctcgatccgaactgtagcgacacaaggctcatcctcacttacggccctcggccagccgcacccaccacacttttcgcagacctcacggtgggcgaggatgtggcggtcaaccgtgcaacccttttccgggcgctgggcagccgcatatcaggtgcctacacggcgtccctggaagcagtcgatcccaatgacgcgaccaatcgaaaagccctggagccgaaaaccctcacagcgctggttcggggcggtttcatcaacgcgcagcgcggtcttgatgatgacacgcaccgcgaacgggatgttctgggtaaggtcgtggaggtgctctttcagtcggcgctcaccgatcccgtcgatcccgcgaagcgtacaacggccgagcagctcaaggcggcggttgagcaaattcagggcgaccttcacgccggcttcaatgcgaaactcacttcgctcctgccgacgttcgatctgttcggttatcccggcctctccgatcctggcctcgtcaccgagaccagcttcgatgttgacaagctgctgaacgaccacacgaaagttcgctacgtcggtgtaaacggcatgaccttgcctgaaacctataatgggctcggcgtgcgcaatctggtctacatgctgcttcagttgctgcgattcttccgcgaatatcaggcggagccgactgcggccggcgtgcatttgattttcatcgaagaaccggaagcccacctgcatccccagatgcaggaggttttcatccggcagctggatcagatcaccagcgcctttgttgctcagcttaacgaaaacaagccctggccagtccagttcgtcgtaactacccactccccgcatatggcgaacgaagcgcggttcgaggccatgcgttatttcctctcgattccagatggcgaaggcatgcgccgttcagtcgtgaaggatttgcgcaggggtatggggggcgcacccgagcccgatcgcgaattcctgcatcagtatttgaccctgacgcgatgcgatctgttcttcgctgacaaggccgtcctgatcgagggtacggcggagcgcatcctgctcccggcgatgatccgcaagactgacagcgccgctgccggccagccgaagctcggcagccagtatcttagcgtgatggaggtcggcggcgcttatgcgcatcgcttcttcgatctcctgtcgtttctcgaattgcgcaccctcatcatcaccgacatcgacgcggtgaagccgaacgatggcgggaagcgcgtcgccgtgcctgtggcagagggtttgttcacgagcaatggatgcttgaaagccgcgttcggcaacgacgtctcaccgcagaccctgcttgggaaaaccgctgccgagaagatcaccggtattcggcgcattgcttttcagataccggaagcgccgggcggtccgtgtggccggagcttcgaggactcctttatcctggccaaccctgcacgtttccccctcgacgacgatgacaaggcgcttgcggcctacgagttggccagtgatcagaagaagtcggccttcgcgctaggtcacgcgatcgagcacacggattggaatgtgcccaagtatatcgccgaggggctgcgctggctggcggaaggcaatccggcccctgcggagccaaatccccccatcgcggtcgaaatcgttgcgggcgccgcgggcgtcgcggtgaacgtgaccggggttagcgcagatggctga

SEQ ID NO: 74255 - DNA, 1767 bp, Granulibacter bethesdensis CGDNIH2; identical to SEQ ID NO: 71733

SEQ ID NO: 74256 - DNA, 2094 bp, Hydrogenophaga sp. T4
gtgaccacgccagcagcaccgacagcagcaccggcaacaaccgcgtctggaagcatcacgcttcggtacgtcgaactgtgtaagttccgacgtctggggaaagtccagctggacctggaccagcagacgacgattcttgtcggcgccaacaacagcggaaagacctcgatcctcaccgcactgcggcacttcctatctgaatcatctgcgttcggcgcgttcgacatcagcctgtccgagtggcccgcgctgcgtgccctgggcctcaaatgggaagcgttggcggaggatccggcaacagaggcgccaaagccgggcgacgactgggaagaccaactggcgacgctgctgtcggcgatgcccacgcttgatctgtggttcgatgccgaggccgggatgttccactatgtccagcccttcttgtccaagctggtctggaaaggtggcgcggttggggtacggctgcgcctggagccggccagcgatgtctcatcgctcaaagaactggcctgggcctacaacgcggcgcgccagcccgtgaagggcatgagcagcgactcgttggcttggcctatcgatctgctggacttctggctgcgcgagcccaggaagcttggacaggtcaggccgtacagcctcgatgcagccaacaatcccatccaagggatcaagacgtaccagacccagatcctggcggccgacgcgcagccggccgaccgcaagcacctgggcaagctaatccgagtcgacttcgtggccgctcagcggggccttggatcggaagaagccgattccaagtccacgtcgtcgtcgcatcccgtaggcctgttctctaaccagctcttgaagttcgcgcgccagcacctcaatgtcgccgtcaccgggcaagggcaacgcgccgatctcatccaggcggttgccgacgcgcagaaggacctggaccagaagatccacgatgctttggcgccctcagttgccgaggtgaagctgctcggctatccaggccttcacgatccacaggagatccggttcaggacgcgtatccacacggccgatctgctcgaccacagcacggccgttcagtacagtacgaagggcggtgccggcgaagacatgctcccagagttttcgattggcctgggataccagaacctgcagtcgctgagctaccagctcgtgtcgttcaaaaccgcgcgcatgaaccccgacaagggctcgccgacgccggtccatctcgtcatgatcgaggagcctgaagcgcacctgcatgtccaggtccaacgcatctttcccgacaaggcacacaagctcatcagcccgaccgacaaggatggcagcgcgctgaaaagccagctgctgatcagcacgcattccagccatctcgcgcacgcggaggacttcgatcggctgcgctacgtgcggcgaatcctcgcatccccggcccttccgacgccgagcactgaagtggtcgacctgggcgaggtgttcggcagcgacgacgatacgcgtcaattcgcggagcggtatttccgcgtccagcacaccgacctgctgttcgccaatgccgccctgtttgtagaaggcgtggccgagcgcatgctggtgccgctgttcatggagctgaagtacgagaaactgaacaaccgctacgtctcattcttggacattggcggcagccacgcccaccggctcaggcccctggtcgaaaagctccggattcccaccgtcgtcatcaccgatatcgatccgaccgagaagaaggccggccccaaaggcaatatgcgctggatggccacggcgaacaccggccaggctggcctcaggtgcggcaatgccacgctgcgcgaatggcatcccaaactgcagaacgtggacgacttcaagacgccaactcccgcccaactcatctggaccggccccggactgcaaggtacggttcgcatggcagctgccggttgccgaggcgggcgaccaatggccgacgaccttcgaggactcgctggtcctgaccaacatcgattggttcaagggtctgaacaagctcgccgaagaagcggaggctgccaaagccaacggccaacagaaggccgatga

SEQ ID NO: 74257 - DNA, 1401 bp, Hydrogenophaga sp. T4
atgagcggcggcaccacccctgaaggcaacgaccgcgacgcgggcgttatcgaggaaatctgcagttacctgacggaacacccgccgcgcagcttcttcctgttcgcgggagccggctccggcaagacgcgcactctggttgaagtgttgcgccggctgaccggcgtcgtatcgcacgaaagcggcgggaagctggcccaccgcctgcgcctgtatggtcgatctatccgcgtcgtcacgtacaccaagaacgcggttgcggtcatcagcggccggctgggcatcaacgatctggtcgccgtctctaccatccactcgttctgctgggaactgatcggcggcttcgacgacgacatccgcgaggcgctcatcgtcggcaaaaaggcgcagctcgaagaaaagcgcgccgaggcgacgaagaaggtgaagggcatcagcaagacggacctcaggaacttcgccgaaatcgaggaggagatcgaagccctgaaggccgttcagacttttgtctaccacccagacaaggacacctacggtgaaggtgccatgcagcacggccaagtgctggacgccactgcctggctgttgttgaaccggccgacgctgcgaaccatcctgcaggatcgccaccccatcatcctgatcgacgagtcccaggacacgatgaagtcggtgctggacgcgctgatgaaactggcggatcccagaggcagcggcctcactctcggtctcctcggggatcaccgacagcgcatctacatggacgggcattccgacttgcccggccttgttcctcccggctgggccaaacccgagctgaagatgaaccaccgcagccagcagcgggtcgttcaactcatcaacaagatctgggcggcacagctggcgggtcgtacacagcccgcctcaggcgtcgagcagcaccatcgcaccgaaaagaccgggggcacggtgcgcttgttcatcgggaatacatccctctcaacaccagaaaagcgccagaaggaggcctgggttgcatcgcagatgcagcaggcggccaagagcgacgcatgggtgacacctggcggcttccagtcgctcgcgctggagcacaagctcgttgcggcccgcggcgacttcttgaatgtctacacggcgatgacgctcatcgacccgaacgccgcggcaccatcgggcaggggcgagaacactggaccttcggccgctcggctggtgctgcacgatctcgcgcagctcgcggccagtgtcgccgcggacgggtccgtcaacgacttcgcggcgaccgaagtgctgcgacgcgccggatgcttgagcagttgccggccgacgccgatcagcggattgcacggaccgaagaaatgcatgatgccctcgtggcgtttggtgcggcatgcgtaa

SEQ ID NO: 74258 - DNA, 1842 bp, Hydrogenophaga sp. T4
atgcatttggccaagctgatcatcaaaaatttccgcaagctttcgcacgcggaactatcattccaaccgggcctaaacgtcttggttggtgggaacaatgtcggcaagaccgcagtcgtcgatgcgctcagagccttgctggcaggccacgacgaaccgtatccacgtctgagcgaggacgatgtgcacaggccgactggcggcacgtcttcgggcgacatcgtctttgagtacgtcttcagcggcctgagcctcgacgatgaggccgacttcctggccagcttggtgccctctgcggccggaggtctcgaagcgcgaatcacgatccgctattcggatcctgacaacgccggtcgcctgcgtgccaagcgctggtgtggcgaacacgaagacgtgggactcacggccgacatgatggagtaccttcgtggcgtgtaccttccgccgctgcgggatgcgtcccagggactcaagccagggcgaaccagccagctcgcacggttgttgaccctatttgctgatcccactggggtcgacgatatcaacttctcgctgcaaaagctcgacagcgagctgaaaaagcaattgccaatcctccatacgcacgaggctattagcacgcgtcaccaatcgatgttgggccctcaactggcgcaattgctcgaagttggcctaagtgctagtgatttcaagaatttgaaatctcgcctggggctgctggtcgatgggtttgagatcgagcagaacggcctaggcttcaacaacctgatctttatggctgtcgtgcttagtgagctggccaagaacgcgcagtcctgctatcgcgcgctcatcgtagaagagcccgaagcccacctgcacccacagttgcaggctgtactgctgcagtacctcgagtccgtcaaggccgttgagggagagaagcccgtccagctcttcgtgaccagccactcgtccaacttcgcaagcatcgccaacttggacagcctcgtgtgcctggttgacactggcacaaccgtggaaaccttattccctcgcaacatcagtttcaagaagggcaagcgcgagaagctagagcgctaccttgatgtcacacgcgccgagttgttctttgcgcgacgggttatcttcgttgagggcgctgccgaactcatgttggtcagcgttttggcgaggcgtatcgatttcgacctgcgcctgcacggcgtaagcctgatcagcgttgagggtctgaacttcgattccttcttgccgctgttcggcgacgaggcactgaagattcccgtagctgtgctgactgatgcggatccagttgcgccaaagcagacggcatcggttgttgcgtccgctggaagccccgatcctgaaacagccgccaccgcgggtgctgagcagccggacgaagaggatgacgaagacgaagacgccgagccggtatatcccgcgcctggggacgcgatcatcgtctcgcccaacaccgccaagatgaagtcttgcgaggacacctacgtcagggtttttcacggcctcaagaccttcgaatacgacctcgcactggagccggccaacagggatgccatgttggcggccctgagggaactccatccgagaattgccaagagtttgaagctgaaggtcgatgcagcaaccggcgacgcagccaaggcccgtgccttgttcagcggcatgttcgagcgcaccaagaacaacgtgcagaagggcagctttgcccagtctctggcgcaggtaatctctgaccccaaggttccgttcaccgtgccaggctacatccatcgcgcgatcgagcatgcctgccaagtcgcagggactaccaagccatga

SEQ ID NO: 74259 - DNA, 1443 bp, Hydrogenophaga sp. T4
atgggagcttcgcaggcggcctacttggtgacgggtggtgaggcttttctagcagccttcacgttcacgggcgcgtcgtttccgctaccgatcaccgatctgcatttgtcgttcgatgctgggaacgagagctttttctacatgcagcgcgacactcggcagccggtgaacacgttcatggcgcgcggtctcgtggcgcgcctcggtcggactggtgcctacacccacgaattagggcgctattgggcctaccgagccttgaaggagcgtcccgagctgctttccgtcatcgcacgtcgctacccacacatcctgatcgatgaagcgcaagacataggatcagtccaccaggcactgcttgagctgctgatcggtgcggggtgttgcgtgacgctcatcggcgatcccaaccagggtatctatgacttcgctggtgcagacggcaagttccttagcgagtaccaccatcgacccggcgtgatgcgatattcgctgaaacgtaacttccgctcggttccgaacatcgtgacattggccaacacgctgtgcggcaggaacgactttgccgagcgcactgtgccaacacacttgcacggtgcctttttcactggctacaagcgtgaagaacatgcgcagttgctcaccgcatttcgaagcgcgctgacggtcgctggcgcgaacgtaaagatgtccgtggtgctttgccgcgggcggacgttggcggaacagatacgcggggagggaacctcgttcggccaaggaacggtaaagctgttcgccgccgcggcggtgctccgcgatcgcaagaacgacttccaggctgctttcaggaatgtcgctatcgccgtggtcggattgttggagagcgcgacgccaggtcttgtcagccagatcacgcagccggcgcgatatcccgatgcgcgaatgctgcgccgcgttgtctgggcgttcactcgcaatgccgcggatggtctcccatcttccagcttaaatgccgaaatgcagtggcatccagtgctggttgacagggtcaagaagttgcttgcaagacttcaagccgaattcggcttgacaccaaaagacaacatcggcaacaagctggcgaaaaaggggctgcagaacctgccactggtaggtgccatcgacttggctgacgacgcggatacagcacttcgtgtggacaccgtccatcaggccaaaggagaaagcctggatgcggtgctgtacgtagccctgaaggatcatgccgaggaaatgctgagtggtgtgagtacagaggtcggacggattggttacgtcgcgtcgactcgcgctcgtgatctcttgtggatcgctgttcccaacacggcacttaaacagctcagacctttgctgcaagcaaagggattccaggaggtcgggatttcggcgccgcgatcagcaccagcgggaggcgccgcatag

SEQ ID NO: 74260 - DNA, 2067 bp, Sphingomonas sp. BHC-A; identical to SEQ ID NO: 72652

SEQ ID NO: 74261 - DNA, 1773 bp, Sphingomonas sp. BHC-A; identical to SEQ ID NO: 72765

SEQ ID NO: 74262 - DNA, 2190 bp, Staphylococcus aureus H41336; identical to SEQ ID NO: 74212

SEQ ID NO: 74263 - DNA, 1794 bp, Staphylococcus aureus H41336; identical to SEQ ID NO: 71697

SEQ ID NO: 74264 - DNA, 1917 bp, Acinetobacter baumannii 1440422
gtgtatattaagaatttatcaattgagggatatcgttgtttttcagattgctttgaaatcaactttagaaaaggactaaatgtaattgttggggaaaatggagctggtaaaacaactattattaactctttccgtcaattatttattgatactgagtctggttcttataatgtttcttctgatgattttaataaaccatttaaagaaaagtctatagtagttgactctttcaaaataaaagttgaatttgataatttggaaggtccagaacctatagcatttctacaatggagtgatgctaaaaataatgtcattttaaatttagaagttttaaataaagaattacgtggacgctttaaaaaaagtttctggggcggaaattctaaatcatcccagtttgatatagaactattcgataaaattcattgtatttatcttccaccattacgagatgctgaatcaaaattagtgaatggaagacaatctcgattatctaaattactaaagtttattgaagctaaccaacttaaaatatgtaaaagagatgaaaagaaacatccattagaagaaaaattcaaagagttcaatcaatcgctgatcgatgaaaaagattcaagcattaagaaagcaaatgagttgatcgcagaacacttgttaaaggctgttgggcagaattttagtcaatcaacacatatacaatttgttgaaaatgaattttcaaaaattgttgaaaacctaagattaattttctttcctaaaataacaacagcagaagcagatcagtttagagatttatgccaaaatagccttggctacaataacttattatatattgcttctatacttgcggaattaaccttaactaagggcgagtcattatatagactcttactcattgaagagcctgaagctcatttacatcctcaattacaggttcgtttgttagatcatcttgaggccgtagcaaatgatcataatgtacaagttattgttacgactcactcaacagttctagcttcgagtgtcaaattagataaaatcatacatttaactaaaaatgaaaaacctcaagccacagccttagcggaatgtggtctggctcccaataatttagattttcttaatcgctggttagatatcacaaaatctaatctactttttgcaagtggagtgatcttagttgaaggtatagccgaacaaatgctgatccctgagcttgctaagatagtattaaaagataaagaaattaataatattgaagattacggtgtatccgtaattaatttaaatggtatttatttcaaccacttcatgcgtctatattgtaatattaagggggtatcagacgtccaagaagatcaagaaggcttaaatattcctattcgttgtgcaggtattacagatttagatcctgagcaacactattataaagaagagatagttaaagaagaaaaaaaacaagtaaaatataatcataagcctccttctgaaaaaaatgaaattgtggggaaaaatcatgcgctcaagttagtgaaaagtattaatagttctgaacatgcccgtctctttgttgctggatataaaacattagaatatgacttagctatggaggaatgtaatgcaaaagttatggcccaaattctttttgatctttggccatcaaaaactggtgaagtgaagaaaggcttacagaaaatagtcaatgatgattacttaaaaattacacctgaacaaaaagcagatcatgcaatagaaatactaaaaagagtagatgatgacaatattggcaagggttattttgctcaagttttagcagataaaatttcttctggaatagttaaactaaaagtacctcaatatattgaagatgcaattctctgggcttgttcattagaaaactcttctgttgaggaatga

SEQ ID NO: 74265 - DNA, 1764 bp, Acinetobacter baumannii 1440422; identical to SEQ ID NO: 73253

SEQ ID NO: 74266 - DNA, 1776 bp, Acinetobacter baumannii 1475718
ttgggtatattattagatagagttagaatctgtggttttcgtggtattgcaaatattgaaataactttgccaaaagttacagtactgttaggacaaaataatgctggaaaaacatcgctcatcaaagcaatagagttagcattaggcgattatgctcgttacttgtcagatgaggatttttatataaatcagaatgatacaccgcaggaagagatcaaggtagacataagatttgtaccttttgaaaatgatgaaaatactccagaattttcagaaatttggcagcaaaaatttggtgatcaaattcaatctagtgttgatgggcaacaatttgttgctatccgaactatagcaaaatcagatagagtaaaaggaggatatctagttgagcgctatcatttagaagtttggccagatcaaaataattggcaaaatagtccaataaacaataataataagctgaacaaaaaattagattgtgtaccatttatttcaattgatgcacaacgagatattcataatgaattaaaagaaaaatcttcttttgttgggcgtgtgctttcaagtgttgaatataatgcggcagatgtagcttcacttgaacaaatggtggcagatgtaaataatgctgctatagaaaaaagtgatcctttaaaaaaattaaaagagcatttagataatttaaatcactcttttagtggaacaggacaaacagaattaactccatttcctaaaaaaatcagagatctttctaagcggtttagtatgcattatggaaactcggcacaaaactctttttctatggagtatcatggaatgggaactagaagttgggcttctatgttggcggtaaaagcatttacgcagctcttggtcactaaataccaagaagaagcggagccgttatttcctattttagcggcagaagaacctgaagcacatttacaccctaatgctcaaagaacattgtttgaacagcttaaaagtaataatactcaaataataattagtacacattctccttacttagttggtatgactgatttaaaaaacttaagaggattagtatctagtgcagggacttcaaattgttttcaattaatagatgggcttgattcagaagatataaatatattgcagcgagaaatattaagatttcgtggagaactattgttttctagggctttaatattgtttgaaggggttactgaggaacagatcattcctgctatgtttaaggcatattttggagaatcctcttttgctttaggtgtaagttgtatcagtgtgggagggaaaaattaccctccatttataaaaatggcgttaagttttggtatccctatactagtaattagtgacaatgatggaaatacacatactgaattaatgctacaaaatcataaaatacaaagtacgacttctctaacgctttcacctgataattatcatcttgcttttctatctagtggaaatgatatggaggctgaaatagttttacaatcacaacttagagatgaggtgatcgaagcgttagttaggactgaaacaagagggagtgataactctcaatatatcgcagctaaaaaaaaggaaattagtgctttaaatgatgtggtattgattgaaatgatgcgctctagtaaagcatcgtatgcaggttttttagcccaagttattgaaaataatcctaataataaaactaaagaaaatttaataccacaaactatccgtgatgcgtttgagcaactaaatacttggggaaatatatgttga

SEQ ID NO: 74267 - DNA, 1902 bp, Acinetobacter baumannii 1475718
ttgaaactatctgctaaccaattagcaattgtcaaaatgtctactaatattcctatacaagttctagcttctgctggtgcaggaaaaactagggtgctgacagaacgtatcaaacatattttgacatctactaataaagaaggggtcattgctttaacctttacaaataaagctgctgaggaaatggcaaatcgtctatcacaacaaatagatattcaggagagggtttgggtcactactattcattcggtagctcaaagaattctggaaaaatatgggcatactattggattacctactgatcttcatgtttacgaaagagatcaggataaaatggaaatttttatgcaatctttacgtgaagatggcatagatattgatcaatatcttaatgtgatagattcgagagagttaaaaaacagggaaaaacagttacagaaatatttagatatctttgctcagattaaaagagagttacttacagagtttgatatttttgaaaagtatccaaataaaaatgtatggaagatatatcaagattatcaagattccatgatccgtagtggaggaattgattatgatgatattttagtttactcacacagaatattgataacacatgattggatagccaaaatttatagagctaaatataaacatatttgtgttgatgaggctcaagatcttaacaaaatacagtatgaatttatcaaggctttttgtggtgatacattaaaaagtgtctttatggttggtgatcctaatcagatgatttatggttttaatggatcatctaatagatatttatgtgaagaatttgttagggattttttaccaaataaatatgatttaaaagagaactatagaagtactagagaagttattaaagttgtgaataagctaaaatctgattctcaggttgtaagtgagtatgctctagaggggcaagtacatttcaatgagtatgaggatgaaatagatgaagctaaagggatagtagctcagattcaaaatttacttcaaatgagagtacatgatgaaattgaaggtgaaatcacactcgaaaagatggtggttatagcgagaaatcgtttcgtgtttcatagtttagagagtggtcttaaagataacaatattgtctattctcttaagaaaggagaaaggctgcttgagccttcaactaaatttgctaaaaccttagatttctctattcgaattaagctgaatccaaaggattgggtgaacggtaaaaaattatgtcaactgctccaattagatgaaccggtaaattggaataatgatttgttattagacttagcaaaaaaaatgaatatttcaagtgattctaatcatcaactgctctcagaattattaatagctgtttataatttggaaattaacaaccctaaaatacctaaattaaccaaagattttcgtgataaattcactattttgcgtgaagataaattaaatattttagatgcagaatatgaggatattaaacgaagtcttgaagagttagatgaatttgatcacacatggacaagatttaaaagaaaaggcattggagactctttgacagcttttaggaatgcactagtgttaggacagctttctgaaagtaattctgaaaaaggtttaactcttagtacagttcatactatgaagggtttagagaaagatattgttttcttaatggggatgtgtgaaggagtattccctgattatcgtgcactttcacaaaaagaacttgaggaagaacgtaatagtgcatttgtcgctataacaagagctaaacggtggttgtatgtctcgtatcctaaacaaagaagaatgccatggggagacataaaaaatcagcgaaaatctaggtttatgattgaaatggaaacagataagtaa

SEQ ID NO: 74268 - DNA, 360 bp, Acinetobacter baumannii 1295259
ttgggtgataaacggtggaaagcctttgaaaagatgataaatgcacatggcatatttatgtctaatatagatttagagtgtgatttagtaagtgttgcttctgaagaaattaagaaggcattaggtaaaaaaaataataatagtgcagtagattttctcaaaaaaagcaaagccctaaatatgcaaatattaatggctaaattagaaaagaaaggctttgaaaaaatttatgaaagtgattttggtaagccgattaggtacttaataaatttattattaaaacaatctgacactgacactgaatctccagttcttattaatacgaactctgaaactgccaaagaagtggtcttgttatga

SEQ ID NO: 74269 - DNA, 1620 bp, Acinetobacter baumannii 1295259
atgaagttgacgaatgatcaaataaaagcaattcaagatattgaaaataattcggtaatcatggcgtgtccagggagtggaaagactaccgttcttattaataaaatgagtttatgttgtgaaaagttaaaaagacataatggaataataggattatctttcaccagaaaatctagtgaagagttgagaagaaaatttcaaaagaagacgataagttcaaatctcaattatctaggtactatagatggctttctgatcaatgaaattattagaccttttttgccaaagctatggggcaatgagaacgatgatattgagattgtaagtattttatcggaagaagaatctattccatttgtacaagagtttgcgaatagagaaatatatttaaaagatatagaaaattataatgcttttaagggattatttttaagtggaaaaatatggcaaagaacagtaacacctttagctttgtttgtacttaaaaattcatcagtctgtagaagatacatatcatctcgatataaatacttgtttgtagatgaatatcaagatacttcatcaggacaacatctagtttttctagaaattttaaaactagggttgaaatttacagcggtaggagatattgatcagtcaatttacagatggcgtgatgctattcctgaaaatttaacttcgcttgtaaatgagcacgattttaaagaatatgctattgatcaaaaccatagatgtgacccatctattgatttatatgctagagcttttttaaaaggtatagatctagaagaaattgataaaaaaaacatatttggattacatataaataattcaggaaaacatagatacgctaagttagatgattttatacaaaaaattaaagatgagaataattttaatttttcagattttgtgatattagcagctaataatgcaacggttcagcattatgctttgaatacgcgtcatagttatagaatttacgaagatgatcctcttgatagtatgaatcattatattgcacagttatgttctgatttgattttatataaattttgtaagaattattcaagttactcaatatatgagaactataagtctaggtttattaatattaaattaaatgattttaaggttgaagttaaaaaaataagaactgaaaatgatactgatgaaatttgtgaaataattaaaggcttaattaataaaactaattataaaggtgattgtgaaaattttattttggcaacaaaaaatatttttaatgatgaattcttgttgaaaaaatataaaccacataataaaaatgaattacaaataatgtcaattcataagtcaaaaggtttggagtttaaagttgttatccaccttggtttggaacaatgggtattgccacgtaaaacaaagaaacaaggtcaatggacttttagcgatttagaaggggataaaaatttacactatgttgcgatcacacgagctgaaaatctatgctatttagtagatatgcctataagagtaaaatcagaaaataacgtgtttaaagagatgaatgcaaataaatctgaattcctatgtattgaaagattgaacaagcatattgttgatctaggagttatgtag

SEQ ID NO: 74270 - DNA, 1926 bp, Acinetobacter baumannii 1461963; identical to SEQ ID NO: 72956

SEQ ID NO: 74271 - DNA, 1659 bp, Acinetobacter baumannii 1461963; identical to SEQ ID NO: 72957

SEQ ID NO: 74272 - DNA, 1917 bp, Acinetobacter baumannii 625974; identical to SEQ ID NO: 74264

SEQ ID NO: 74273 - DNA, 1764 bp, Acinetobacter baumannii 625974
atgaaatatacaaatgagcaacttagctatattaaacaagcaaaaattacagagaatgttttcttaaatgcatgccctggcagtggaaaaactgaaaccattgctcaacgagtagcgaatgaaatcgagagctggggcaattttcctagtggtatagcagttttgtcttttactaagagtgcagctaaagaaattgagcatcgaattaaagagaaaataaaaggacaatcaacttatccgcattttataggaacatttgatagctttattctaaaaaatattgttaatccactttcgaaagatatctctaaatatcaaggagataatggggattattcatttaaagtagtgaactacaattcccagttattttatttaacagagtattcccacggttatcaaaaaatttcagggcatcaggtagaaattgatagcagaacaggaagttttaaatttcatttaccaaatcaagatgcaaaccgcgcccttaatgctatggttttggaacaatggcgcaaagatgacatttatcgtgcgaaaaaaaaatgcagggatgcaggttttctaactcataaagatatcgaataccttgcagaatcagctctcactactcgtaccattacaaaggattatgcaaaaaaattagcaacacgatttcaacttatcattgtcgatgaatgccaagatttatcttttgagcaattaaatatcttaaaagcaatgatgctgaacggaacaaaattacattttgttggggatctaaatcaagctatatatgaatttagagatgttaatcctaatgacattaaacaattcatatctgacaacagttttagagaggttagattaactaaaaactttcgaagctgtcaaaaaattgtaaatatttctacaaatattatgaaatcaggttcaatcgaagcagatttcacatcacccgaacaatcatgctttgtacttcaatataaagattcacctagtgaagtgatctctcgatttaatgaactaacgaaacaatacagcaatcgagttttagtagctagaggtcatcagactttaaatcaactctctgctgtagaaagcacaccaaagctgccggcagagttcttactaagctcaattttaaactttgatgaaacaagttatcattcaatcgatcaatctttaattgaattctcagaatatattaaaaataagattcagctagaaactaaatccagcgattataattgtcctcaaaatgttgaatctgaactggattggaaattatttttatataactctatccagtatttattaaaaaatgacctaaagttagatagctgttcatggacaaattggtgcaaaaaagttaatgctgtaattattaatttatataagcaagaatttgcacctcctgaaatttatgaagtattagaaaaatctaactttaaaattaaatctccaagtggtaaagcatctaattgcatctctaactattatcgcaaaaaggattcattagatattaaatttagaaaatcaactatccatggtgttaaaggtgaaacacatgaagttaccatgttaatttcaaatcctactcgtaaaggagacggtacacactggtctcattggataggagataaaacatctgaagctgcaagatttgcttatgttgcatcttcaagaccgaagtatgttttagtgtggtgcgttaaaaagttaaaacctctagaaaaaacagaattagaaagtttgggatttgaaattttggatataaaataa

SEQ ID NO: 74274 - DNA, 2133 bp, Yersinia similis
atgtatatatccaagctcagcctgctcaactatagaaacttcgccaatacaaagctgttgttcaataaaggcaccaacacgattattggtgaaaacggcgcaggaaaaacaaatctcttcagagccatcaggctcttgcttgatgacaacatgattcgttcggcttaccggctggataaaactgactttcatcgtggcttggggcaatggcaggggcactggatcatcatcagcctagagttcgaagagatttctgcagatgaagcagtccaggctttatttctacacggtacggggcttgctgaaaatgttggcaaggctacctataaccttatttttaggccgaagaaggaaatcaggctgcgcctttcccaactggatgaaggtgatcatgctggtctggacgctattctcggcctggtaactattgacgactacgaaacaattttcacggggcgcagcgaagcggacttcaatgatgaaaccttctacaggcaagtggtcggtgacttcacgaacgtgagatttaacaaggaaacggagtttcggtgcattggtgccaaaatcccaagtgtgctttctgtttccaaagaaatttcgtttaccttcgttcaggcgttacgggacgttgtagcggagtttcacaacaatagaaccaaccctctgctgaccctgctgaagagcaagagtggtgatattgaccccgtgttgtttaccgctatcaccgataaggtaaaagagctcaacgattcaatcgaggcacttcctgatgtgcagaatgtgcgcaccgatatcagcagcaccatcaaggatgctgcaggcgaggcgtactctccctcctctctgtcgattaaatctgatcttcccgaagaggccgatgagttatttcagtctctcaagctgttcgtcggcgagtccggcgaagatcatgaaggtcccattcaggatttaagcttgggtggcgctaatctgatcttccttactctcaagttgctggagttcaagtaccggaaagccagacagtcaatcgccaactttctgttgatcgaggaaccggaagctcacatccacacacatattcagaaaacgctattcgacaggctcaattacgacgacacacagatcatcttttcgacgcattcgacccacatctctgaaatcagcaatgttcagaatgtaaacattctcggaagggacggggggcggtgtgaagcttatcaacccgcctctgggctacagcctgaagagatcggtaatattcagcgctaccttgatgccgtgcgcagcaacctgctgtttgccaagagtgtcattctagtggaaggcgatgcagaagaaattctgatcccaattttggtcaagaaagtgttaggcatcagcctggatgagcttggcatcagtctcatcaacatccgcagcaccggttttcagaacgtagccgtcctgtttcatgatgaccgtattcgcaagcggtgcagcatcgtcaccgatctggacaaatctattattgacactgaagctgtggaaggtgagagcgaggctagagcgaagcgcaaggcaaaatatcaggcatccgagaaaaaaggcctagcgcgaaaagtgcaactggaagctttttgcaatgataatgactggatagcgccgttcttcgctccccacacttttgaagttgatttcgtaactgccgggaactcccgtaacgtcatagcagtacttcccgacgtttacaccgacgttccaactaccgtaagggctaaggcaagccttaaatccggagatatcacccgctatggccaacgggtactgactatggcggaaaaccaagggaaaggctggtttgccatcttactgggaaagaaaattgatccgcaaacggctattcctcgatacatactcgatgcgattgcttttgcacacccggtcgtaaagaaagaagtctggttcaacgttcttagctatagactgagcttcatcgaaaagaacgatttctttgtagaagcagaggccgtggataacttcaaagcaatgttgcagctgtttaaaaatggctacatcgattttgctggaattaaaaatgagatgttcgcatattttcctgatgatcgtatcaacgatgtacttgaggtcttctag

SEQ ID NO: 74275 - DNA, 1797 bp, Yersinia similis
atgttcacatgggatgacggggatctgaatcctgagcaagaggcagctatccgcgaacctggcagcgtgtttctcattgcctgccccggtagcggaaaaacgcgtacgctcacctacaagattgcccatgaattgtcgcagttggagtcgaaaaagcagttcatcgtcgcgatcacttatacccatcgcgccgcagacgagatccatgaacgtatcgaaaacctcggcgtcgatacatccagactctggataggcaccatccattcattttgtctcgaatggatattgaagccctatggcatctaccatgaggcgctggatcgcggctttcgtgtcattgacctgcatgagcgagaaaaggtgttggagaacctgtgccaaccctatcagaagcccaaaatcaccttctgggactgcgagtattactttaccgatgagggctatgtaatttcgtgcccacatgactggaaacacgcagggctcgctgaaattctggagcaatacttcgactatctacgggaaactcggcagatcgattttgaactgatcctctactacgcctatcagctgatcgctgcgcagcctcagatcagtgccattctcgggcagctattttccttcatactggtcgatgagtatcaggatacgaagcgcattcagtactccatcatcgcgtccattctaaaagcgggtcagggaacaaaagccttcattgtcggcgacccaaaccaggccatctatgaatcactcggtgggtacccaatcgccttcgaggagtttcagtcgatggctggcatcaagctggaagagctagaactttcccagaactatcgttcttccgaacgtattatcgactacttcgcaaactacaacgtatacgacacgcgtatcgaggcagcatccaacgacaaggcttactccagtctgatttcgttcaatgactcggtaaccaaagacggcctagaagatgagttgatccgactcatccgtttcaatatcgagactattggcattccccctcatgaggtttgcatcctcgcgcctcagtggatgcacctggcaagcatgactcgccgcttggtcgcgagcatgcccgagtatgcgtttgacggtcccggcatggtaccgttcgcgcgagatctggataatttttggtacaagctctcaaggatcgcacttacacaggcgtctccaagcatgtacgtgcgcagactgcgttgggctggcgaggttctcagtgatcttgagggagtaggcgcgaacgtatcgatgctcacgaggcagagcttgttgagagagtgtaatgccatcaccattgatgctatggatgggctggtttatctcaggttcttcttcgataagctattttcgaatctcgcttttgacattcaagcattcacgcagcttcacgagcattacgaggcgttcttcgaaagctcgcaggcaaggatcgacagactgaagaaggaaggcacagaaatgatcggagacattgccaccttcaggaaggttttccagagtcgaatcggcatcacgatatcaacgattcacggcatcaaaggggcggagttcgatgctgtcattgcctatgcacttctggagaacatgctgccaaacagaaatgaccagaatgggcaagatagcgcgatgaaacttctgtatgtcattggttctcgtgcacggaaaaacctgcatcttatctctgagcgtgggcgcatcgacaaattcactcgtgcggaataccaagcgactaaaaagctcaatgcatgccgctttgaatacgaccaaataccataa

SEQ ID NO: 74276 - DNA, 1701 bp, Thalassolituus oleivorans R6-15
ttgataattgaaaaggtgagtcttgaaggctataggaacttccgagaagctactattcgttttactgataagacgctaatgattggaagcaatgatgtcggtaaaacaaatttgctctatggcatccgtttgttacttgataaatctttgtcagatagagatattgaaccggaagctacggatttcttcatagatagcaatggaaatcaggcagaatctttctctattaaaatctatttttctaatatcaatgaggatgctgttctttctgcactgaagggaagtgtgagtgatgaaagtaagaccgtgattgctattacagcagatagaaatacacttgattacgagatatctattggatgctcagatgatgagcttgagctaattccatcaagattctatttgaaacagttaaatttacgatatgtaaaatcccgaagagaccttcaaaagttcattcaaatagaaaaaagaaagttgcttaagcagtctaaagacagtcttgaagacgaagagcttgagcatgaccaagttgaaatggtagctatatcagccaagttaaatgaaattaatgaaaagattgcggagcttaactatgtaaaagacgccacctcagtagttaatgaagagttgaaaaaactatcatatacaaatgaaaactatagtgtgcatttagatactggtgctataaaagtaaatcagtttattgaaaatttagaattaggtgcatctacatctggttcaaaactaatgcttggtggtgacggtcgaaacaatcaaatattattagccttgtggaaggcaaaaagtcaaagagagtttgatcctgaccatgaagttacattttattgtgttgaagaacctgaggctcatttacatccacatcaacaacgaaaactagctgattacttaatttatgatcttcccggacaaactataattacaagtcattcccctcaaataacagaacgatataagccaaattcaatagttcggattctcttgaccgaaaatggaagtgtggcggctaacggtggctgttctgcatgcatttcggatgcctgggacgaattaggttataggatgagcattcttcctgctgaggcctttttttctagctgtgtttttttggttgaaggaccatcagaaaaactcttttacgaggagttggcaatacagctagggatagatttggattttcataacatttcaattcttagtgttgatggaattcaatttaaagtttacagcaaaattttggatgctatggaaataccttgggtgttgagaacagataatgatgtttcaggtattaaaaatagtgttaataaaagagctgtaggtattaataggtgcttatcattggctggcctagctaatggccccgactatacatcaacaacaacttcgaaagacttagttgattctggattttggaaaacgacttcggatcaaataaatccacacggaatatttctttcaaagattgatctagaagctgatctggctttagagcttccgaatgaattgttaacttattccggaaagaccgatatcaatgatgcagtaaaatacttgcagagtaaaaaagccattagaatgcgagactttttgtcacaaaataaaaatgcgcttgcaggagtaagtgggggtgagttagctaagccattgcatcatgcagttaagttagtaggccaataa

SEQ ID NO: 74277 - DNA, 1632 bp, Thalassolituus oleivorans R6-15
atgagtgatttctcgtttactccagatcaaaaagcagcaatatgttcaaattcaaatatggtcattactgcttgccctggaagtggaaagactactgttgttgcagaaaagataagaaatgaagttaaagatcttccgtcttatcgaggtgttattggaattacttttactgtaaaggccagcaaggaattaagaagccgatgtaagaggaatgcttgcgatactaaaatgagcttttttggcactattgatcatttttgtttgagtgagattatacacccttttttagcaagagtgcttgaaaggaaaaagcaccagctagaatgcattaagcttgatgaaatatctaaatgtgttatggataaattgagcgtaataccacattacagcgaagaggtaacctcaacctcttttaaatgcttagaagatgatattggcacattattcgatcatggttttgtcttgctcgaactgcttggtgtgatagccaatcatgtcataacggaatctcatgcttgtcaaagatatattgcagcaaaatacaactcggtatacatagatgaatatcaagactcctctgagccacagcatgtactctttctcaagttattagaactggggctagtaggtgttgcagttggtgatgtacagcagtctatctatgcttggcgtgggagtgatcctgtatttattaaagaattaacaaacaaacctgatgtcttcgaacatcatatcgtaaatatcaatcatcgctgtcacccatcaattactaattattctaaccggctttacgacgctgaatgtgatttattgccaactagtgatatcagagtatataggcgctgctatacaggcactcaagtagatgttactgaaaaaataaatgagtcaattgaagttgcgcttaaaaacaatctagttgaatcatactcgcaaataggaatactcgtaagaaataacatatctctagaatttcttagtaatggattgaatgtaccgtttcgaatctttgacgaagacccattggcagttagaaatacaaaggtttgtaatttgttttctcagcttttaaggtttcgatttgacgagcatcatcgtttaaatgatgttgttgagtatatacagtcatttacttcagtttcgaagaatagtttatctgtattgcgtaaaacgatatcaactattggtgataaagttcaagatgaactatcacatacgattgtggatataactggtcaagtcttaaatgtcggtataagtgcttcagataaagagctcattaatacaatctgcttggagtctaggttgcttcagcactataagccgataaatgaaaatgaagttcaagttatgacacttcataaatctaaagggctagagtttgagcttgtttatcacctggatctatacgattggattcaccctaaaagaaagtttgttcgaggttgcttcgatgtaatatatgataattgggagcaggagttgaatttacactttgttgggataactagagcgaaaaattattgtgttctagttacaagcaatagccgtctcaatcgagactatgaaaccaaaacaggaaatccctctcaattcttttcgctgcctggattagatggattgtatcgatag

SEQ ID NO: 74278 - DNA, 801 bp, Saccharicrinis fermentans DSM 9555 = JCM 21142
gtgaaagaagctattagaaactatcctgaaatatattttgcaaaactagctgttattggcgaaggcgatagtgaagaagtattgttcaatcgtctgatggaaactaataaagttgatttcgatgacaacataattacatttgttccattaggacaccgatttgtcaatcatatctggaagttattagatgtattaaatataccctatgttacattacttgatttagatatagaaagaaatggtggaggttggggacgaattaaatatattcttcagcaattaattgatgctggttatgatagagatgaactattagagttagaagggggtgaaataatgactgatgagcgtttttcaaagatgcatacatggacatataaagataataagttaaaaagtgttttatcatgggtgaagtttcttgaaagttacaatgtttattattccaatcctttagatttagattttttaatgctagagtattattcagaaaaatataaaagtgcaatccccaaaggtggggggccgcaaattccggataaagtaaaagaggatgccaaattcaaatcgaaattgaaaggtgctatacaggctactttaaaatcggaagaagctcaagcgttaacatacagtgataaacaaaaggaactgatgatatggtataattatcacttcttgggtagaggaaaaccaacaacacatattacggcattatcttcaatgacagataaggaactttcagaaaacatgccacctgtatttgaaaagatgtttaagaagattaaagagttgttgtcatga

SEQ ID NO: 74279 - DNA, 1833 bp, Saccharicrinis fermentans DSM 9555 = JCM 21142
atgaggtataggaaaatagaagagtggatcccttccgataatctccaattagaggataatgcactaaatacagtaaaatctgattataacacattggttattgcgggaccaggtgcaggtaaaactgaattgttagcacaacgagcaagttttttattagaaacaaatagttgtatttacccccgtaaaattcttgcaattagttttaaacgagatgctgcgtataacttaaaaaatagggttgataagaggtgtggcgaaaaactttcaaaaagatttgactctctaacatttgatgcattctcaaaggttatacttgatcagttttatagaggtttacccaaaggttataaaataaattacccttatgatgtcattttagatgaaaaggaaatactagaaatatataaagcgattgatattcaatttcacaacactcatgacaggaataaaattctagaatttcataatagtgctcttcttgtgaataatgacgggaagcaaaaaaaaatgagggttcaagtatggcaaaaacttcttgaaagtaaaagttcaaaattaagctttaaaatgataatgcgtctatctcaactcattattgtatcgaacccgaaaataatggattttctacaggaaacatatagccatatttttcttgatgagtttcaagatactacatttcttcaatttgagtttttaaattcttgttttggtaatagtaacgcaatatttacagctgttggtgacgataagcaaagaattatgttatgggccggagcaaaaccagatatatttgatacttatattaaaaactataaagcaaaagatttaatcttagaaatgaactttagatcagctccaagattagtagaattacaaaatcaccttatttcaaaactcttgaataaaagtgatttagtaaaatcttcagataaatggaataaagaagaaggagaagcttttgtatgggtatatgacaaccaacaaaaagaaactgagcatttattcaaagaagtcaaaaggtggattgaaaatgaagatataacaccacgagatatttgtatacttgtcaaacaacagcttggtgtttatgcaggtgaaattattgacttttttaaccagaatggtattaaagcaagagatgagaatcaattgcaagacttattgtcagatgacttgattgtatttgttctaaatacaatcactcttttgtctgacaccaaaagtcttgatgaaaaaacacaagctataaattttcttattaatacttcctcagtatatgaggatgatgaaataatgaagcttgaaaataaattcaataagttcattagacaacttataaataaggatttagacccaaaggagttagttaatgaaataattaaatttgtttcaattgatagaattaaggctaattttccaaattatagaaatcccaagtttttaaaagatatgttaaataaactgtcagaatcattggggaaatataaggaagaaagtgaaaatgtatatgaagctgttcagaaattattaggaaaagattctgttcctattatgacaattcataaaagtaagggcttagagtataattctataatttttgttggtttggaagatggtgcattttggagttttgaaaaacaaccagatgaggacaaatgtgctttttttgttgcactttctagagcaaaagaaagagttgcttttacttatagtaaaactagaaaggataaatgggataatttgagaaatcaagactttaaaaagatacgagtaatatttgacgaattacagaactctggattagtcgaatttaaacatatagttgattga

SEQ ID NO: 74280 - DNA, 2094 bp, Saccharicrinis fermentans DSM 9555 = JCM 21142
atgtatatatcaggaataaaaatcaataattatagaaacttcaaaaatttaaacattgaattcaatcatggattaaatgtaattattggacataataatgcaggtaaaactaatctaattaaagctcttcaactagtattagatagagatttaaaagaaaagccttcaatagatgatttttgtaaaactaatcttgattatgctaaaccaccctcaatagaaatatccatttttatcaaagaacataatgataaggcagatgataaaaatgttgtttatgattggttgattaatgaatcacctgaatacacagctcaattaacatatatttttgagttgccaacaaaaaaccatgaagaatataagaaacaaattgaagagtgcaaaaatggaaatggttttgaccaagagaaatgtttaaaactaataagtaagaaatttcttcaaaaatatgttcctcgaatatatggcggtaatccctcaaaacaagaaaaagctgattctgaaaaccttgaaaggtttgattttcaatttctggacgcaattagagatgctgaaagacaaatgttcttcggcaataatacattactaagagatgttctgaattattttcttgattatgatctaacaaatgggcaaggttttgagaatctttcagccgagaacatcgaattactgaaacaacgagagcaagaatttaatacaaaatcaaaagaattacttaaaatattaattggtcgcatagatagagataaaatacttcaatactcaaatgaaacaggagctgataaaggagggaaaccgaattttgatgcagaaatcacagaacaagaactactatttgcgttaagattaatagttgaaaaaagtggatttaaaataccaataaaaaacaatggtttaggatataataacttactttttatagcacttattctagcaaaaatgcaaatggagtcttccagttatatgggggataatgctaaagtttttcctgttttagcaattgaagagcccgaggcacatttacatccttcaatgcaatctaaattcctcaagttcctaaatacaaataaccaagctcgacaaatctttataacctcacattccacccatattacttctgcgataaatcttgaaagcattatttgtttatatgatgatataattgggaattctgctgttggctatcctggcaaagtattttctgaatcgaaagaagataaggattcaaaaatatatgttcagaggtttttagatgctacaaagtctaatatgctttttgctgaaagactagtatttatagaaggattagcggaacaattattgattccaagttttgcgcaatacttagaaattgaagactctctagtagataaacatgttggtattattagcgtagatagtaggacattcaaacatttccttaaactatacgcatatgatgagacagacagtccttatgcaataaataaaaaggtagtatgtataaccgatgcagacccgacaataaaaaaaagtaacaaatgggtttctgcttttccttttgaattagatgattcagaaaacagcaaatcgctttctactcatgttacagagttaaaagaaaaattcgaggacaagtatgcaaatatttttgttttccatccaccagaagggactggcaaaactttagagtatgaattatgtaaggaaaatcctaagtctccacagttgattacagatgcttttcctagtcaaaacagcgcacatactcctgataattatactgcaataatctcaagatatgaagatgatctgaatgccataatagaagaatataaaacaaaactaaaaatagataatttagacgaaaatagaatcctaaaaagcatttcggaatgtacatggggtgatgaaacagaaaagaaaaaggcattaattgctgccatttactacaaagttgtatctaatgctaaaggacaacatgcgttttatcttgaacaaaaattaagagacaattacaaaatcaaagaagatgataaaaggcttgattttaaagtcccttcttatattgaaaacgcattaaccgaaattataaagaaagatgcctga

SEQ ID NO: 74281 - DNA, 1773 bp, Saccharicrinis fermentans DSM 9555 = JCM 21142
atgcctgatattaattccttaccacatatatcaaccttaagcgatattgagacacacttcaaagtctttgcaggccctggtgcaggtaagacaaggtggctaatttcacacttggagcgggttttatgtgaatctgacagattaaacagaacaggcaagatagcttgtattacatatacgaatgtcgctgcagaagaaatactgaatcgattaaagtgtgataaaagtcgttttgatatatctacaattcatagctttttatatcgcaacattgtcaaaccattttcctatttgattgaaaaaaaggacgatggtgagatattatttgattcagcaagtttggatggacatgacgagcatattccgcgtagagatatcattgattcgtgggttaaaaagataagtgaaggtagaaccaaatattggtacctgacttctaaagaaaactaccctgaactagcgaaatgtttatcagatgctgattggttttttaatgacacaggtattccgcaattgaaatttagaaaccaatggacaatttctacggctagtaaaattagaatgccatctactaagttattggaatacaaaagagtatgttggaaaaaaggaattctttaccatgaagacgtattatatttttcttatctaattctgactcgttcaccaagggttgcagaatttgttagagcaaagtttccatatatttttattgacgagtttcaggatacaacagaaatacaaacatggcttattgataaaattacagaacaaaacacaatagtaggagtcgtaggggatattgcacaatcaatatataagtttacaggtgcaaaacgagctgattttattgattttaaaagagataaaatttcggaatataaattaaatcacaatcatcgctctacaaaacgtataattgactttcttaatcaacttagatccgacatcaatcaagaatacggtcagggacaacctgatggagtttctattaatgtattggttgggacaattcagaatgcaaaagtttggtatgaaagaaattttcctgattcaccactttatattcttacgagaaaaaacacgaccgtctctgaaataaacaaccaaattggtacagctaatacaaacctcttaaaagacttgtattcgaatgatacaaatccgcaaagagtaaggttcgtacactctttattaatgagctttaaatttcataaaaaaggtgatttaaaaaatgctttaaatgaaatttataagtctttacgtagagtaagtggtacatccgttttaaaattaagcctaaaaaggcttgcgattagaataatcgattcattacaaattgatgcaaatagaaataaaacgattgcagaattttatttagaattaagaacttatgtattagatgaatatggtttcaaaattggaagcaatttaaaccgaggaaatgctaaaacattttatgaaaatcataacctaaatgaaattcttccttacgtaaaggtagacactaaatccgacgataaagtaagaacaattcatagtgcaaaaggaactgaattcaaaaacactcttgttcatttcgaaactacaaatgaatttaggaactatatacttaatggtctgaatcacattgacgatgcagaggatgattgtcggatttattatgttggttgtagtagggcaaaagatagactgtttattagtattccagactttaatcaggatgatataaagaaattagaagaaattaatgtaaaatatgaaacagtttaa

SEQ ID NO: 74282 - DNA, 1956 bp, Gluconobacter oxydans DSM 3504
atggaaggggtacgattgcttcaaagagaggggcagatttctttgcagatcaaacgtgtcactatagcgaatttccggtcgatcaagcgggccgagatagagcttggggcgacgaccgtgctgatcggcccgaacaacgcgggcaaaacggccattctcgaagccatccgcattgccctgacgcgccggtggggacagcgcggcaccggatttaccgagtacgacgtgcatctgtgcgcggcacgcaccgaccccaaggtcggcgacccggtcgtcatagaaatcgaaattcaagagtcggtggtcgccgagtggcccgaggagctacacgaaacactggccgacatcatccagctcaatcccatgtccgggcaggcttcgatcatcatgcgcgtgagttgcgcatgggacgacggagaacaaagctacattcccaaatgggaatttctcaacaccgaccgcaacccgctggctggaaagggcgcacgggcaacgaactttcaggagtttttttcgttcttgcccgtcttctatctcgacgcactgcgcgacgctggcgacgaatttgccccgcgcagccagttctggggacgattgctccggaccgttcaaatccccgaactgcttgagcaaaagtcggttcgcattttcaatctcttgaacgccaagttgcttgccgccgacccgttgctgggcgatttggcaacctcgctctccgacatcagccgcgtggcgacaacgggcacgcccgggcaggcgaaccttcgcgtgctgccgttgaacacatgggatttattgtcgaaggcagaggtcatttatcaaaatgacgggacgaagccgtggctgccgctcatgcggcacgggcaaggcgtacaaagcctgtccgtgatgttcctgttccgctcgttcgtcgagctgttgcttggtgagctttatcgcgccgagagcacccccgtgctggccttggaggagccggaaacccacctacatccacaagccgcccgcacactttttggccacgtcgcgcagcttcagggccagaaaattatctcgacgcactctccttatttccttcagcatgtgccgtttcgcgacctgcgtgtggtccgcgctggcccggacggcacgatcattaaatcgctgccgcgcgagtttcgctgccgggtaccgaatctgcctacttttgcgcccgtcatagccgcatccggcgggctcctcgaatatgacggcggcctgtccgagctggtcattaaaggcagcttggcgatgcccacctacaaaaaattgctcggcgcctgtcaggggcaggccgaaatggctgcaatccacgcccgattgaaggcggcgcgagacgcatcgctcgaatttatacccgatgaggatttgcagaagctcgaaacctttgcgcgaagaatacgaggcgagatattcttcgccaacaagtggctattggtggaggggcaatccgagtatcatttggtccacggcatggccaaggcgatgaatttcgatctggacgagcatggcgttgccgtgatcgattttgccaataatggcaactgcggcatgtttactgcgctggcgcgggcgctcggatttccttggactatgatcgtcgatggcgacttggctggcaatcaatacatagggtctgtccaagcgcgcaatttcacacccgccgaagtggcgcagctcacacatcagatcgccgggcagacactggagcatcagctcgtcgccgatggcctgcaaccggaactgaaagctatcctgatcaaccaaggtatgcccggggtcgcagcgatggacgacgcggcgctgatcgccacattgtcaagcgacaaatgcggctatgccgccgaactggcggcgcaatgcgcgaccagcttgccgctgacccagcggatgccattggctatccgggaagcgatcgagactctcagagggctgccatga

SEQ ID NO: 74283 - DNA, 1908 bp, Gluconobacter oxydans DSM 3504
atgactgaattggaaaaggcgctaagcgagctgacaccggcgcaagcggcagcgacaaactgggtcgatggccctctcttcgtgctagccgggccgggatcaggcaagacgcgcgtcctgaccacgcgcgtcgcgaagctcctcgcggaaacgccggacaaatcgttccgcgtcatggcattgactttcactaacaaggcggccgacgaaatggccagccgcatcgaggcggtcgtgcccgaccagcagcagcgggcgaccatcggtacgttccactctttctgcatgcagatgttgcagcagcacggctcgcatatcggcataaatccgaatttcgcgatctattcgctggagtcggatcgggcggaccttctcaaggaagcaatccgggcgaacgggctggacagcgacgacgatcggttcctgggtatgatcgacaagctgaaggcacggttgatccagccggatggctgcgcgaagctattcaaggacagcggcgtcgggcagcgcgtcgagctggtctatagcgcctatgaagcggcgctccgatcggctaacgcgctcgatttcggatcgctcatcgcgcagtcctaccgcctgatttccacatacccgggcgtcgcgctccactatcgccgcgcctacgcttattggatgtttgatgagtttcaggacacgacggatgggcaatacaagctcatcaaagccctcgccggagacggcttccgcaacgtgttcgcggtcgcagatgacgaccaaattatctatcagtggaacggcgcgagctataagcagatccagcggtttcgggctgacttcaacccgactgaaatccagctccccaccaactatcgctgcccgccgagcatcgtcgccgccgccaatcggctcgtcgttcacaacacgcagcgcacggctgccaagcagccgctggaagcgggtaagacgacgctgcgttacccggacggacagcacattaacctcttgcgctattcgacggaggaggcagaggcgacgtcgatagcggctggtatcgccgggatgcccgaaggcaagcgtggccagatcgcggtgctggcgcggacccgggcgctgctcgaacgaatgaacaccgcgctcgcgaatgccggggtcgccgccgctattgcacagcgccgggacgacttccggtctgcacaatttttgtggctggccgctgcgttgcggctggcggcacgccccgccgatcggcgcgccctcgatacgttgaccggcgcgttcaatcgctggttcgaccttggcgtttcgtccgacgacatcgccgcaggcgcggaaatcagcggccgttcgctgctcgccgaatgggccggggccgttggatctagggaagacgaccaagcaaacgccctgaccggcatggcgacggcgctgagcgcccagccgacgacgtttcgcgcgttcatcgaccaagttctcgaaaaacttcccgccgagggaagcgaggacgcgactgatatcgacgaggaccggacggcttgggtgtcactcgttcggagtattggtcaggccatcgggcgcgacgcgggactcgatcaatttctacaggaactggcgctgcgttcgaaagaaccgccggttcccgacaatgcggtcacgctcatgaccattcacagcgccaaggggaaggaattcgaccacgtctatgtgatcggcctgtccgaagacgttttacccagttttcagagcgtgaaggccggggaacaaagcgccgaaatggaagaggagcggcgcaactgctttgtggcgatcacgcgggcgcgggagtggctctgcctctcctatgctgatcgctaccgggggtggtcaaagcagccttcgcgcttcctgctggaaatggggctgaacctgccgcaagccgtgagtgcgtaa

SEQ ID NO: 74284 - DNA, 1857 bp, Acinetobacter baumannii 694762; identical to SEQ ID NO: 72988

SEQ ID NO: 74285 - DNA, 1902 bp, Acinetobacter baumannii 694762; identical to SEQ ID NO: 72989

SEQ ID NO: 74286 - DNA, 1926 bp, Acinetobacter baumannii 1293320; identical to SEQ ID NO: 72956

SEQ ID NO: 74287 - DNA, 1659 bp, Acinetobacter baumannii 1293320; identical to SEQ ID NO: 72957

SEQ ID NO: 74288 - DNA, 1953 bp, Acinetobacter baumannii 1062314
atgcatataagttcaataaaagtaaaaaactttagagcaattaaagatgctgaattaaaactagatcctaatcagaaacaggatttaactttaattgtgggaaagaataatagtggaaaaacctcatttattatggtttttgataaattctttaagaaggaggataattttaattttcacgacttttcaacgcatcttagagaaaaaatttataaaattgatagcgagactattgaagaggctataattggtctatttttggaaatatcatattctaaagatgataatcttgaatatttgtctgaatttattatagatctaaattctaaaaataatactgtaaagttatattttgaatgtttaattgatgaggaaagattgcgaaatgatcttatcaatattgataagaagtataaaaaaaagtttattgaaaaaaatattacttcttacttaataaaaaatttatatatatatgagaaagatgaggatatcgaaaataataaacaaaaattaataaaaaaagaagtttcagcaattaacagtttgattaattatcaagtaattcatgccaaaagaaacttggcaagttctgagacaaaggaaaaatctagtcttccattatcaaaattaagtactgaatattttaataaagaaaatatgttcagtgaaaaagattttattaagattaataatgccatattagaaatggatgaaaatttaaataatttatatgatactcactttgaaggtttttttgaaaacgttagggattttttaggaagtacggctttaaaagtattatcaaatttagagtctaggcaaataatgtctaatagttcaaaagtagtgcaaatagatagtgaagaaaattttttacctgaatcattaaatggtttaggaaatttaaatattttatatctattattgcaaattgatttaaaaaaacgcttttttatccaagaagacagaagtattaatttactttttattgaagagccagaagcacatacacacccacaaatgcaatatatattttcaaaaaaaattaaaaaaataattgaaaatatccctaatttacaaacattcatttcaactcattcctctcatatcgtgtcacagtgtaattttgaagatataagatattttcataatcataatggaaatgtgaaaataaaaaacttctatctagaattggaagaaaaatataagttgcaaactgagttatttaagtttttgaaacaatatattactctttattcagcagaattattttttgcagaaaaagttatatttattgaaggagtctcagaaaagatactacttccatattttataaagaattttgatgagaaaaataaaggaaaacaagactatattccaattagttctcaaaatattacatacattgaagctggagcaaattctaaagcctttcagcatttattaaatttttttgaagtaaaatcacttattctgactgatattgattccgttggtggggaaaacagatcagcttgctctgttgataagggaatagctagcagtaatgcaacaattaatcattatttaaattataatgaaaatgatccggattggtttaatcttttgaaaaaaagaggtattaaaattactgataaaaatattaatctattctaccaaacagaagagaatggatatcacgccagaagttttgaggattcatttataagtgtcaattatgaacttataaaaaaacataaaaaagatatttttggtttgaaaaataaatacaaaattaatgataatcctgaaaatttttatgaccttacagatagtattataaaaagtaaatcagaatttgcttcttcgcttttgtttttagctctggttaatggcgacaaagaaggtgatgaaaaaattgaatggaaaactcctaaatatatttatgaggcattagaatggatcaatcaataa

SEQ ID NO: 74289 - DNA, 2094 bp, Acinetobacter baumannii 1062314
atggatcaatcaataaaagcaattgaaagcgttaaagagattattataaataatcaatttcagaaagacggttttagaaattttgtattgcaaggtggggcaggtagcggtaagacagagtcacttaaggaagttattgaatttatttctaatagttatccaaatcaaaagattgcttgtattacacatacaaacattgctgtcgatgagattagatcacgtattaagaatgctaatctttgggtttctacaattcactcttttttaaatgaacaaaccaaaaattttcaaaagaatttacaagaggttttaccttatattttttatatagataatagtgatattaatgattacgaagattataaaaaaagatatgaaaaattatctaaactaagttataagcttaataatagaagaatggataaagttgtaggtaagagagattataatgcagatataatcaattacaataatattttacttggtgagataaaatccataaatagcatgattcttgaggtaatttcctcaaaagattttagagatataaaatataatgaaactgtatttgattcaataagtgatggaactttttctcacgattctcttataaaagtttcatattttcttgcagaaaaatatagcttattttctaaaattataagtgataaatttgactatatttttattgatgaataccaagatactgataaagttttagttgatttattgttgaaaaaaattgcaataaataagaaaactactattggtttttttggcgactcaatgcaaggtatttatgatggcataggtagccttgatgattatattagagattttaatctgatttatatacctaaagatgataattatagatgttcacagcaagtaattgattttttgaatataattaggaatgatgatattaaacaaaaagttgcacttaaaaaaggtgagagtttagattcacgacaaggatcggttaagatatatattaataaaattcaaaaagttaagtctaatggtcatcaagaagataaagaaaaatatattgctttaataaatgacgcaataaaaaaagtaaaggaaaagagtgatattttaaatcttaatattttgcagttaacaaataaatctatagcatctgagttaaaattttcaaaattatttaaagtgtttgaagatagatatcttaacttggagcagactcagatagaatctaacttgaagaaaatacaagttaaagatgtagttgacttaatttttctatataaaaacaatagacataatgatttaatattaaagcttaagaaaaataatttaaaaattaaaaaattagatgataaaattaatattatttctcgattaagttatatttgtgataatgatttaggcttaaatgaagctcttgattattgttatgaaaataaattacttataaagtccccacaaagaatcgactttgaaagtcaatcaaagcgtcattttgagcaatgtgattctgatcctgtattcaaagacttaaaaactcttttagaaagagataatctaaatacttacaatagagctaagcaacattgcacatatgatatcgatcaatatgattatgatgattttatgagttcttatagaaagattaaatttagtgattcactgttatcaaataacttacttctgagtgaggttttaaattattttaattatattgaggaaaattcaaattcaaacgaaaaatatttaacaatgcataaaacaaaagggacaggtattgaaaacgtttttgttgtattagaagaatttttctggagtaattattcattcagaagtatatatgactctagttactctaattttaaagttaaagaaaaatctgagaagttattttatgttgcatgttctcgtaccataaaaaatctaatgattttaataaactatgaaacgaatgatgagctggaattgatacgagagaaatttagtggttttgaaattattgaattaaatagcagtgatactaatttattgattactaatccagatgttgaaaactttactttacctgctgctatagaaagtaatatacaagtaagtatttaa

SEQ ID NO: 74290 - DNA, 1983 bp, Candidatus Accumulibacter sp. BA-91
atgcttatcgaatctataacgctatcgggtttccgttgttttgggcctgacccgatcacagtgcctatttcaacgggtattacggctgtcgtcggccctaatgcggccgggaaaaccgctcttttggatgccctgtcaaaaatgtttggcgtctcgcgcacgcagcgcactgtacagcgttcggattttcacttgggtgtggaggatgatcctgaggaccgcgaacccaaggacatgctcatcgatgtgtttatcggtttgcccgagctagccgatggcacagcgacaccggagacgatcgctccctcattccgacatatgctcatcgaacgagaaggggaaacgccagtttgccgtctgcgcctcgaagctcggtgggaagatgacggaacgatcgagggcgaagtttcacaggagcttttctgggttgacacgcttgacgacgatccgggtgaggatgcgtgccacccggtttccgtagcggaccgaggcttgatccagctctactacacacctgccagccgcgatgcggcagctcaggttcgggcaacgaccggcgcactcgccgcccgtctgctccgtgctatcgaatggtcatccaagacagaaaaggccgttcaagatgccaccgaaagccttgccactgcattcgagggtgaatcggcgatcgccgcgatcggtgaagccttgcaggcgcgctggtcgggcctccatgacgatgtggttgatactaaacctaggctcagcctggtcagtcgtcggttcgaggaagtcgtcaacaagattgctgtcatctttgagcagggaccagacggtcaagagcgcggcctcgacgctctgagcgatggacagcaatcgcttttgtatttcgctctggctgcggccgttttcgatctggaacgtgcggtggtggcaggcacggtcgaaggatttcgtgacgacaccctacgtatccccgcactaacgctgttcgctctggaggagccggagaaccatctctcgccttacttcctcgcccgcatcatccgccaggttcgctcgctgaccgatgcagggggtgctcaagccatcattaccagccactcaccggcggttctgagccgcgtcaatccgtgtgaagtccgctactgccgctgcgatccgaaaacacgtgtctcgtcggtgaagaaggtcaagatcccggctgggactgacgaggctgctaagttcgttcgtggcgctatgctcgcctacccagaactctattttgcccgcttcgtcctacttgtcgaaggcgattcggagcggatcgttttgcctcctttggctgaagcgctcgatcttttgatcgaccccgcattcgttgccattgttcccttggggggacggcacgtgcagcatttttggcgcttgttggcccaccttggcattccgcacgcgaccctcctagatcttgacctagggcgcgaaggtggtggctttggccgggtaaagacggcgatcgaaaagctcgtcgacgttaatgtgcctaaggaaaaactcttgaagatcgacaagggcatcttgtccgacgcggattttgcaaagatgcatacgtgggaggatgcagaggatcagaacaagctcatgggttgggtcgatagtctcaagcctcatggcgtctatttctcagcaccactagatcttgatctagctatgctggaagcgttccccgatgcatatcaagccatcatccccaagggcggcggtccgaggatggctgtcgataaagcggcagaagtagtgctaggaaccgctgggctagggctcaaaccctatgctggaccgtttaaaggctatcctgaacttcttccggggtatcgctatcactttctcaccaacagcaagccagcaacgcacatcgcagccctgacgcacatcaaaaagaaggacttggagaaaggcatgccagtcgtgctcgcagaggttctcaaacacgttgccaagtcgctgcggagggactag

SEQ ID NO: 74291 - DNA, 1905 bp, Candidatus Accumulibacter sp. BA-91
atggccgtgctatcgcgacgtgttagcccggatgactggaagccggtgggcgtcaatgcgctcgaagcgaatgcgctatcagtggttcgttcggccaacaaccggtccgtcattgctggccctggcgcagggaagacagaactgctcgcgcagcgtgctgcctatcttcttcaaacgggcacggcacccgcgcccaggcgcatccttgcgatcagtttcaagcgtgacgcagcgacaaacctcgctgcgcgagttcggcagcgctgccatcgcagtcatgctgagcgtttcgactcgatgacgttcgacgcctttgcgaaagggttgatcgaccgctttggtcaagcattgcctgagcgctggcggccaaggcccaactacaaaattatgttccccggtgatcgagattaccgtgagttcctgtctcgacaggtcggggcacctccagcatcgatcggcacccacgctgacatccaggccatatctgtgaaggctttcgagcgtcggcacctggtgggatcaccactcccgatagacggttggccgcttccgacacctgcccagtgggctgcgaatcgtttctggcaaacgtcactccacgaaggcaaaaaaagtgtcttgtcatttcccatgatcggacgacttaccgaactactgttgcgggttaatccgatggcgcgtgatgcgcttcgactgacgtactcgcatctgttcatggacgagtttcaggatacgacacagatccaatatgacttggtctgcatcgtcttcctccacaccgacactgtgattacctccgttggggacaacaagcagcagatcatgcgctgggcaatggcgatggacgatcctttcaccgcctttgatggagattttggcgcgacaagaacgccgctctacaacaactatcgctcctcacctgagttggtgcgtatccagcacgtcttagcgcaggctttggacacccgagccgtggcgccggtgtcgaagaccgccggtacgattgctggagacagttgcgctattttggatttttcgacgccagagattgaggcgaagcgcttggctgcttttgtcgcaaccgagatgaagacctacacacttggcccgcgcgactttgtattgctagtccggcagaaggcgaacgaatacgccgcagttctagaaccagcgtttgtgactgcggggattcctctgcgcaacgaagctggaatggtcggatcgatcatgctccaggacttgcttgtggaagacgtgtccggcctgattgtgtcacttctgcgtctcgccatggccactcgagcagggcggcattggacgaagtgccaagaggccctcatcaccctacggggagtcgctcccgacgatgaggttgcgcaggctaggcttgcccacgagttggatgaatacgtacttgaactcagcgcctcccatccgaatcctccgagatcgaagactgtgtcacgctcgattttaaacgatatcctagggtttattggtcgtgagaggatgatcgctgttcatcccgcttatggacaaggcgattggcttgaaaaagttctggattcagctacagagcatctattggcatcgtctagcggtaagcttgattggtcgtcagtccttgacgcgtatgaaggtatccatgcaatccctctgatgacgatccataaaagcaagggcctcgaataccatagcgtgatattcgtaggattagacgatggcgcatggtggagcttttccaacgatcaaatcgaggctacagcaggattctttgtggcattcacgcgcgcaaaacaacgcgttgtctttacatactgcgcgcaacgcggcacgcgaacgaagattgcgactctttatcagctcttgacgagtgccggagtcaggagcactaaggttgcctaa

SEQ ID NO: 74292 - DNA, 1959 bp, Pseudomonas syringae pv. syringae str. B301D-R
atgcacatagaacgtcttggtttgtcgaatttccggtgtttcggcccgatccaaactcccatttttctaggaccaagtctcgtagctttcgtaggtgataatggaaccggcaagacggcggtgatgcaagccttgcagcggttatttggcatcacctctgagcagcggagattgcgtaagcaagactttcatattcccgctaacgagatggagcgacctgcggctcgtatcttagtgattgaggcaatcctcgcgtttccagagctggatgacgacgcggaaaatcctgctgtaccagcatttttcaagaatatggcggctgaggaagatggcaacttaaaggttcgtctgcggttgcacgcgacatggactgatgatggcacattggacggtgcgatcgaagagtcctactacgccgtgcaaacctttggggattttgaagacagcgacctttatcggcttcgcggctctgatcgctcccgggttcagcttatctatattccagcaacgcgagacggcgcatcccaggtcaccgcttttatacgcggccggttgtggcgtgcgatcaattggtcggagcaggttaaggattcattggctggcgctggcgcttccgtaaatcaagcgttttatgcggaggctgctgtggaaagcattagcgcagcagtcacgcaccggtggcagcagctccattcagcagggacccataccaccccatctttcaggcccgtagacacccgttggcaagaattcatcagacgcgtcgaggtggtgttccttcctgccgaggacggacaagatcgtgcgctagaggacttaagcgacgggcagcgttctttattccatatggcgatggtctcggcgacactggatattgaggcgagacttgcaggtaataatgccccaccaggcttcgccgctgccggtattgctttacctgcactgaccatcgtcgcgcttgaagagcctgaaaacaatcttgcaccattctatctgtcccgcatcatcaatcagatagaagaggtggctgcaggggcgcacgctcaagcaatagtctccagccactctcccagcattctcgcgcggatagagccatctagcgtccggcatttccgattaaatttcgagccccgacacactgaagtacgtgagatcagcctacctataggcgacgaggaggcttccaagtttgtacgagaagctgtccgggcctatcccgaactctacttcgcacggtacgtaatacttggtgaaggcgccacagaagaggtagtcctacccttgctggctaaggcgatgggctttcctatcgataggtctttcgttgctgtcgtaccgctgggtggccgccacgtcaatcatctatggaaattgctagctagcctagaggtaccgtatgcgacgttgctcgatctggactggggccgaagcggtggaggcttcggtcgtatcaagactacatgcgagcaactgctcagcaacggcgtcacgccgcagcagctgttcggaagtacgttacatgtggatgggcccgctgaaaacataaccgccatatcaatccatccagctgctgaccttgcattcctgagtcaatgggccatttggcttgagcaatttcaagtgttcttctcagcccctctcgacttggattacaccatgctcaaggcttatcccggagcttatcgtgcactggaaccgggaatgcgagggcctgcgcaagcgggtgagcctcgagacgcggtgctgggtgcagaaggctctccagcgttttatgtggctgctgaagaccaagacctgagatggtatcgctatttgttcttgggacgtggcaagcccactacccacgtaagggttttgagtcaattatcatccgaagatgtggtggcagcagtgcccgaacctttagggcgattattaaccttggttcgctcaactttagagcaggttgaaatgcgatga

SEQ ID NO: 74293 - DNA, 1896 bp, Pseudomonas syringae pv. syringae str. B301D-R
atgaactggagacctgttccgctagaagaatggcggccgcgtggcatccctggcctagagcccggcgcctggacagccctacgccgaatggagtccacttctgttgtcgcagggccaggtgccggtaaatctgaatttttggcacagcgtgccgcttaccttttagagaccgggttgtgcaaagcaccacagcaaatcctcgccatctcgttcaaaactgatgcggctgcaaatcttgcagcacgtgtacgcaggcgatgccctcccgacttggccgtgcgattcaattccctcacatttgacgcattcaccaagggcctagttgatcgctttcaggcagcgataccagaacattggcgtccctcgcgcccatatgaaataagcttccctaaccgacgattgatacaggatgaattgagtcgtatccaattcatggcccgcacggagtggaaagcatggatcgcacagctatccgttgagcgatttgaagcagagacgataggtggcagtcgtctggaagtagatgcactcgaacaagtcgccacagcggagcagttagtaattcatcagtggctccgacatcagctattaggcgctaacgtatcgaagctttcgttcgtcacgttgaaccggcttgctgagctaatcatccgcgctaatcccaagatcgcgcgcgctttgcgcatgacctatccctatgtatttgttgatgaattccaggacacatcgtttgcccaatacgattttttactctctacatttggccaggggggagctgtcgtcacagctgtaggagatcacaaacagcggattatgggatgggccggcgcgcgtaacgatgcttttgagcaatttgaggtggacttcgcggcgctgagagtgaatctgcttttcaacttcagatcttcaccggaactggtgcgcgttcagcattttgtagctcaggccctggatccgcaatcaccgcaaatcgagtcacaggctcaagggcaattggatagagatatagtccaagtgtggcgatctcactcaacgcatgtagagggtcagaggttagcgcaatggatagtgacagacatggcaacacgtcagaagcggcctagcgactatgtgctgcttgtacgtcagcgtcctgatcagtttgaggaggaactgcgaccaatatttgccgcatcaggcttgagcattcgtaacgagagcaagatagtcggccgaaccaatgtccaggatttgatggtagatgatgctgctaaaattgctctggcagcgttaaggctggccagcggccagcggaatgcagttgcatgggcgactttatccacggctgtgtatgccatccggggaatcgacgaggacgacgatgtgcgacgctacccagtcgaccaggatgtacaggcatttctaaaggctcttggacaagacatccgatctcgcatgcctacggctgatgcagcatcagaatttacggatcgtattttttcgttcctaggcgtcgtgtcgatctctgccacctatcctgcttacgcccgtaacgacatgctggaaattatgatggaggcgttttcactacatctccagcaggcagcctcagagactgaaacatggtcagactgtattgaccgttttgttgggacgcatgacctttcgatgatgacggttcacaagagcaagggacttgagtacgacaccgtattcttcatcggactcgacgatcaatcgtggtggagtcacgtcccgagaaatccggatggcatagcgacattcttcgtcgcgctctccagagctaaacagcgagcaatctttctgttctgcaggggcagaggaagccgaaatcgggtttccgagctatatcagctgttaactgacgcaggcgtcgaagaaatcgagattttttaa

SEQ ID NO: 74294 - DNA, 2028 bp, Bacillus thuringiensis serovar israelensis; identical to SEQ ID NO: 72154

SEQ ID NO: 74295 - DNA, 1962 bp, Bacillus thuringiensis serovar israelensis; identical to SEQ ID NO: 72843

SEQ ID NO: 74296 - DNA, 2079 bp, Pseudomonas brassicacearum
atgcagatcgagcgcgttgagattcaaaatttcagactgcttcagaacgtcgaccttggcctagaagacggcacgacgctgatcgtaggacgcaacaactgcggcaaaacctccatcgctgaggtgttccgccggctcctttcagaccggactccctcattcaggcttgaggatttctccctgggaagtcacgaagagttttggacggcattcaatgcgtttcacggcggagtagctcgctccgacgttgctgccatgcttcccgttgtaagggtcacattggacatttcctatgacgtaggtgctccagacttggggccgctgagcgaatgcatagtagacctagatccagattgttcttgtgcgcgcatcgtcttgacgtatggaccgcgtgcgacaggccttgagtcgcttttcgcggaaatgaatgtccccgacgctgagcaggaggatcaacgtcctagcttcttcagcctgatcaaaaaacgtttggcggcggcctacgagccccgtctggaagcgattgaccccaacgatcctacgaaccgaaaggacctcgacctaaaatcactcactacgttgatccgcggcggattcatcaatgcgcaacggggcctagatgacgacacacaccgagagcgcgatgttcttgggaaggtggtggaggtgctgttccaatcggcattgactgaccccacagatcccgagaaacggaccacagccgaacagctccatggagcggtggagaaaattcaaaaggaattgcatgacggtttcaacgcgggactgacttcgctgctccctacgttcgagcttttcggctacccagggttagatgacccaggcctcaccacggtgacgaccttcgatgtcgagcgcctgcttaaagaccacacgcaggttagataccggggtgtaaacggcctaaccctcccggaaagctacaatggactcggcgtccgcaacctggtgtacatacttctgcaattattgaaattcttcagggagttccaagctacaccggcagcagcaagcgtacacctcatcttcattgaagagcctgaagctcatttgcatccgcaaatgcaggaggtcttcatccgacaattacatctcatcaaggacgcgttcgagcagcaactgaatgacagccgtccttggccagtgcagtttgtaatttccacccactctccacacatggccaacgaagcgcgcttcgagaccatgcgttactttctctcggtgaccaacgaaaacgggatccggcagtccaagatcaaagacctgaggcagggtatgcgcggggctcccgcaccggacagagattttctatatcagtacctgacgctcacccgctgcgacctattctttgcagacaaagccatcttgatcgaggggacatcagagcgcttgctgctgccaaccatgatcgccaaaactgacgcggcggcggtcggtgagcctcagctggcaagtcagtatttgacggttatggaagttggcggcgcgtatgcacaccggttccatgacctgcttactttcttggaactgcgtacgctgatcgtgactgacattgattccgttaagccgaacgcagatagaaaacgaaaagcctgtcctgttgctgaggggctgtacacgagcaatgcctgcctcaaagactggtttgaggccgaagtcactcctgcccaactactggcgaaaacaccagcagagaagaccagagggttaacgcgtctcgcctaccaaattccggaaggggttgaaccagggccctcaggcagaagctttgaggacgcatttatcctggcgaaccttaatcgattcgagctgggccagggtgatgttgcatccctagcttacgagcatgcagcagaccagaaaaagtcagccttcgcattgaactacgcgatcgatgatacgaactggagcgtacctaaatacattgctgagggattacgttggcttgcagttggggcgtcggtcgtcgatgcccaaatggctgctcgggccatggccgcagtggttgaagctgctggcgaggcagtggccgctgaaggggagcaaggcgatgcctaa

SEQ ID NO: 74297 - DNA, 1755 bp, Pseudomonas brassicacearum
atgcctaacaatcacgaaagccccgcggacagagccgggcgggaagcgttggaacgtatgttcgcctgtttggaagaaggtcaaagctttcgcctggaagcaggtgctggagctggtaagacgtactcactggagaaggctctgagccgattgattgagcacagaggtcaggcattgatccgggagcgtcagcaagtcgcgtgtatcacttacaccaatgtggcaaaagacgagatcatctctcggttccaggcgcaccctgcgatccgagccgagaccgtgcatggtttctgttggtcattgctcagagattttcaaacatcactgagagaattccttggtgctgaatctttttggcgagagcgccttgaaacggttggtggcgtaggcaataggcgaatccattacgaaatgggtattccacgcgtatccgaggacgaggtctcgattcggcatgaagatgtcctgaccttgatggttcaggcgcttccgtctccgaagttcagggccgtattgacctcccgatatcccatcctctttgtcgacgaatatcaggatacggatgaacactttgtcggagcactgaaatcgtggtttctagatcgcggtgaggggccgatgattggtttatttggtgaccattggcaaaagatttacgatgacggctgcggcctggtagagcatgaggcactccagccaatcgaaaaaaatgcgaattttcgctcagcatcgcggattgtcgatgtgttgaatcagatgcgaccaggtttgcatcaggaggtaagagatccggaattgatcggtgaagcccgggtgttccataccaatcgctggcctggaacaaggcgcacaggaatcgggggtgggcactggactggcgacactagtcctgaagcagctcgtgcttacttcgaatgcttgaaagctcagcttaacgtcgaaggatgggacctctctccccagaagaccaagattctgattttgaaccataagggtattgctcgtgagcaggggtactcctcgatccctccaatttttggacagttcaacgatccgtggctgaagaaggaagatccgcacatcaagtatctcgcagatcagcttgagccagcatgtgtcgcatatcaacagcgtagatacggcgccatgtttgggcacctggcgagtgatcggccaacgattcgaaggcacagcgacaaagtcgcttggactgaggcaatggatacgctcctcgaactgagattgaccggtaccatcggcgaggtgattgaccacatcatagccgtaccgcagatgcaactccccaatgcggtgctacgaaatgagcaagggttacatgccgccggtgttgaaccaggtgaggacgagccacgcaggattactcagcttcgaaagctaagggaagttccttactcggagctgatagcgctagaccaattcattgatgggcatacgccgttcgcgacaaaacacggggtaaagggagccgaattcgaaaacgtgatcgttgtgctgggccgcggctggaaccaatataattttgctgaaatgctcgagtggtttcagctggggccaccggcgaacaggcgtgaaaaattcgaaagcaatcggaatctcttctacgttgcgtgctctcgtcccaaggtccgtttggctctgcttttcactcaactgctgagccaggcagcgatagctcagatcaccgcgtggttcggcgctgagcatgtatttgagttgcctgctgaccctgggtga

SEQ ID NO: 74298 - DNA, 1893 bp, Pseudomonas brassicacearum
atgtacctcgctgagctgacgatcaagaactttcgcaaattgcgtgacgccaagctgaaatttcagccgggactgaatgtgttggtaggcccaaacaatgtgggcaaaagcgccgtagtcgacgcgcttcggacccttctcgccggtcatgatgaaccgtacccccgtcttgatacttctgaccgacaccgtcccaacgaaggcgagccggcaggcgacatcaccttccattttgtctttaaaggactcagccatgaggatgaagcagacttcattgcggcgctaaaaccgtgtgaagacaacaccatggaggcgcacatccatgtccggtacaccgacgcggatcagacgggacgattcaaagtaaaacgatggtgcggcgatcatcaggaggtcgcgctcacctccgatatgatggagaatcttcgcggcgtctatttgcagcctctgcgtgatgcggcccagggactgcgtcctagccgaaacagccaactggcccgcttgcttcatcttttgaccgatgacgatggccgcaagacgattaatgatgcgctgaagaagctggatgacgaacttcaattgaacgagtcactcaagagcactcatgccgcaatttcgtcccgtcacggcttgatgatgggtgagcagttggcgcaggcgcttgctattggcctaactgccacggacttccagcgtctttcggcaagactctccatcactgcagaggcgttggagattgagcagaacggcctgggcttcaacaacctgatcttcatggctgtggtgctgagcgagctggctaaaaatcccgatgctgcctatcggagtttgattgtagaagagcctgaggcgcacctgcatccgcaattgcagcgggttctacttcgctacctcgctagcgtgcctaaaagtgagggcgacaaatcagtccaactcttcgtcacaagccattcccccaattttgccagtaactcagagcttgaggcgctggtctgtctggtcgagaacgaggcaggtgtgcagacgttcttcccccgtgacataacctttgagaaggggaagcgcgaaaagctcgaacgctatctggatgtaaccagagccgagctgttttttgctcgtcgagtgatcttcgtcgaaggtgcagccgagctcatgctggtcgatgcactcgcaaaactcataaatctcgatctgcgtgagtatggtgtcagccttatcagcgtggaggggctcaatttcgattccttcctgccattgttcggcgaaaaaggtttgcggattccggtttctgtaatcactgacgccgaccctttcgaagaggttgagattcagggcaaggcacagggtgaattgagcgacgaagtgatcgaagatcttctcgctgaggctagctaccaggaagaggccggtgagccagaggacgaagatccagctgaagccgaagtcggagcgaaaaagaaaaaggtcaagcgagttgaggtctatccgtcccttggggatgaggtgcggatctccagcaatacaaccaagatgaagggtatggaagatgcatttgtgaagatcttccatggtttaaaaactctggaatatgacttggcgcttcttgaggagaatcgtaaggccatgctggcggctctcggcgatccccatccacgaattgccaaggcgttgggcaagatcgtcaacgctcagccagacaacacggcgaaggccaaagcactgttttgcggcatgttcgagcgcaaagatagtagcagcaatgtgcagaaaggccgttacgcccaggcactcgccgagtacattgccaagcaacctggctgtaaggtacccgagtacctggagcaagcgatacggcacgtctgcaagggagtgaacaagcatgaggatgtctga

SEQ ID NO: 74299 - DNA, 1722 bp, Pseudomonas brassicacearum
atgaggatgtctgatgaacagaaaaatgtcatcgacgccgagttgggtccgatttcagtaacggcgtgtgctggaagcggaaaaactgctaccgcaatcagacgcctgatcgcagttcggcagaagatggaaaaaagccggggtcgtgtcgtgctgttgtcgttctccaatgtggccgtcaacacgttcaacaagggataccaacagctcgcgtcggcgctgccggatgatgtcaatcgcaagctagtggaggtcaacacgctggatggtttttttacgcagcacgtacttcgacctcatgcctatcggtccatggcagcgaccaaggctgcctacctcgtagcaggttctgagccgttcctgagtaactatctgtattggccagggggcgacgaccgcccgctctcggtcaaggaactaaaggtaggaatggaagacgggagtccgtttttcttcgtcgatacccacgcagggccagcacgcctagtcacctggaaggcgctagattctgttacacggcttggaagcataggcgcttacacccatgacctcggacgctactgggtttatcgaaccttggtagagcagccggctgtgcttcgagctttagtagcccgttacccgcaaatcctcgttgatgagtctcaggatctgggcacgctgcatcaggctatcttggaactcctgataaaggccggtgcaaccgtgtccctcatcggggacgtcaatcaaggcatctacgctttcgcaggcgctgacggtatgtttctgcacacctacgcggcgcgggccggtgtcaccccatacaaactgactcgaaattatcgttcgttaccaccgatcatcgacattgcgaaccgactttgtggcaggaacgacaaatcagatcgagatatcgaggcggggggagcttatttcattgggtacaaagattcggagctccccaggctgtttgactccttcaaagctcgaatcgacgagttggaaatgcagcacgacgatgcggcaattatctgcagatcggcggatcgagcgatggtgctggctggaaaggtcgcccctccgggacaaggcaccgttgccatgttcagtgaagcggcgttgctacgcgatcagcaagggcgctatcaggagtgctttaaatgtgtatgcagagctgtcgtaggtttgctggatgatcctccccacggactcagtaccgagttacaaggtgccccgcatgagggatggatgctgcggttgaggcgactgctatgggcctttattcgcaatgaaaacgatggtttaccgtcctcaactctcattgccaaaaccgattggcatccctggcttgtgaagaatcttaaaatcctgcttgcgacgatcgaaaagcagtttggattgaaggcagttggcacccttggtaacaagctggcaaagaccaagcttcttgagctccctcttgctggtgaaggtgcagatgccaaacaggggccgggtatcagggtagacacggtccatcaggtaaaaggtgagtccatcggcgcagtgctgtatgtggcgaagaagtccaatgtccaagcgttattggcaggcaccgatgtcgaagagggtcgtatcggttatgtggcggtaaccagagcaagaaatctgttctggttggcagtgcccatttcctgcatcaaagagttgcgcgacgagttacgtgcagttggttttgaggagcttcctgctttgaagtag

SEQ ID NO: 74300 - DNA, 1938 bp, Ruminococcus albus SY3
atgtatttatcaaagatatcaattaaaaactttaggatgttttctgatgcggtagaagtttctttttcaaatggcttgaatttgttagtcggtgagaatggctctggaaagagctcagtggtagatgctattcgcgctttattgggagaaaatgaatttttaagaagaggaatcgtagaagaagatttttattctgtgttttgtgaatcccaaaagaagacttcagaaagtcttcttatctcaggggtattttcagatttgacggaagcacagaaagtcgagtacttgtcatggttagacgaaagcttcaatgcaaagcttacttttgaagtacagcgggcacttaatagaagaaacaattataaacaaaagagatggggtgggaattcttcttattctttctttgatgttgaaccgttgaatgatattcaatgtgtttatttaccggccttaagagatgcggagcgtagcttaagaaccggcagaggttcacgcttggcacgttttattgcaaatttatccgcagaagatctcaaggcaaagagagaaaatgacgaattaatgcctctggagcaagatctaaaagattttaatgaaaaagctgcaaacgagtctgaaatcacaaatgctacagaattgattaatactagcatcaggaatgctgcaggaaatgtttatgggcagaaaactcaaatacgtttcaacgtactgtcgtatgagagaatcatagagtctttacaattattgttttctgatgatcttagcagtacttcaaacgtatttcggagtttatcagagaatagtttgggatataataacctcatttatatagctactattttagctgagtttgaggggctaaaggatagatacacaacaccaagaattctgctaattgaggaattggaagctcaccttcatccgcaacttcagattaagttattaaagtatttacaagaacaggctatagaatttgatattcaggtgatcgtcacaactcattcttcattgttggctgccagtgtaccttttgaaagtattattgttttcaataaaacaaaaaaagatgtttctattacacggcttagtgaatgcgacgtggatagttcagcatcaggttttcttaacaggtggctggatgcaacgaaaactgctttgttcttctctaagagtaatatttttgttgaagggatagcggaagctattttagtccctgaattggcaaaagtatatctagcagaacaaaatgaaactggtctaacaaaagtctcatctcttgaggaagccggtatttctgttataaacatgaatggaatatactttccgtatttcatgcaactatataatggttatagagttataatacctaaacaaaatgatggtgaaacaaagacaaggtatcaagaaagagttactgctttagtacataaagagcgtttaaataatggcgaatttacatcgacgaagaaaatcgaagcaagatgcgtggctattacggataatgatccagaaaagaatgttaatccatcaaaagatgattgtatagaaggtaataacccacatttatattatgcaaaacaagttaagaatatgactgagaactgtcgtgtgttcattaacagaaaaacatttgagtatgatttagcattggaaagccactataatgcgaaagtaatgctgaagatccttatggaagacatcacctcaagtggaagcattaaagaaactatggaagattatatagtgaaaattgatgctggtgaaacgattgatgatacaaagatggcagcctttattttgcaacaagttgattcaggttatatgggaaaagggcatttcgcacagttactagcagaaaaaattgattccagttttagtgtaccagaatatataaaaaatgcaattgcatttatcctaatgataggtgaaccaacatga

SEQ ID NO: 74301 - DNA, 1935 bp, Ruminococcus albus SY3
atgagcgtggaaattttcagagaaatcttatgtaaaaaaacaggcgatacatcaaattttcttgaatgcgaagggaaactgtgtgccaagtgtcttattgatgggtactgtaacgccacacatttaagcgaaaagcagcatgcatatttagactcggatatccattctagtatttatttgaaagcatgtccgggaagcggaaagactgaagtacttggtgtgaaatgcgcaatggaaattgaacgatggtctatagctaattcaggtattgcggtattaacatttactaactccgctgaagatgaaatgaaaagtcgtatatcgttatattcatctcaaagtattggctacccacattatgtaggtacatttacaagttggcttcatggttacattgcaaatccatttttatacaagattgcgcataatggatgtgatggtaaaacagattcaagtcttagaatcgttgattcagattgtataagtgattttttaaatgcattcaagaccaaatatagttatgggcaacgattacacaatatttcggggaatgcttatcactgggatattaaagcaaacaaatatatatttagcggaaataataatgagattgtttctatatttgatagtgaatacttatcaaaaagctatatgaaaggtgatttgaggaaaacaaaggaaaaattctggaaatcgggcttctttacatacgaggatgttgaatacttatcgtatttacttcttttaaataattctgatatagctgattttacttccaaacgttttccagtggttatagttgatgaatgtcaggatttgtcgtatgctcagttgcgaatcctggaaattcttcataagtatgggactgctatccatcttattggcgatttgaatcaggcaatttacgaattcaggcagattgacacaaatgatacttcagagtttgtcaatgaaaatgagctttcagaaatgatacttgatgagaactatagaagcaaccagaagattgtcgatgcttccgtaaaaataattcaaagcgaatctctgataataggaaaacaagagttaattgtttctagaccacttattgccattctttataaggataaacaagaacagaaattggttaactactattcaactattttaaatgaagaaggtttgcagttgaatgagagtagaattgtcgtcagaaataattctttaaaaaataaaatacttggaaagaagacaataaccggaaaagtaaatactattgaagattttgctcattttgtttatcttagaaagactgacagtttagaatgttttcgtgagagtataagagtgttagcaagggcaattcaaagagcattctttgcaaatgaagaacacggtaattccaatattctatataagcctggaagcttggagccttcacaatggaatgcaatcattgtttctgtgcagaaaagattattaactgatagctcggtaaatgatttaaacaagacatggtcagtttggaaaaaggcattggctagttgcttgagaaatatagatgtaaaaacatcgcatggattagacctaaaaaagattcgccctaaaatgggagataaaatagttgtagatactttttcgaactcacatgatcgtaatatatcgataaccattgaaactattcatggttgcaaaggaatgagtttggattctgtattatttgtatcgagttataagaaatctgatagtagttcaggtgctcactggcgtgattggtttcaacataacgaagctggattaagtgaagctcaaaggttagcatatgtggctttctcgcgagcaaaacatttgctggcattaggaatccctaatccacctagcgcgcctttgactgaagctgatagaaatatgctaattgattatggatttgaaatagtagagatagcagaagaatga

SEQ ID NO: 74302 - DNA, 2190 bp, Staphylococcus aureus M90388; identical to SEQ ID NO: 74212

SEQ ID NO: 74303 - DNA, 1794 bp, Staphylococcus aureus M90388; identical to SEQ ID NO: 71697

SEQ ID NO: 74304 - DNA, 2190 bp, Staphylococcus aureus M42184; identical to SEQ ID NO: 74212

SEQ ID NO: 74305 - DNA, 1794 bp, Staphylococcus aureus M42184; identical to SEQ ID NO: 71697

SEQ ID NO: 74306 - DNA, 2190 bp, Staphylococcus aureus F26051; identical to SEQ ID NO: 74212

SEQ ID NO: 74307 - DNA, 1794 bp, Staphylococcus aureus F26051; identical to SEQ ID NO: 71697

SEQ ID NO: 74308 - DNA, 1776 bp, Acinetobacter baumannii 883425; identical to SEQ ID NO: 74266

SEQ ID NO: 74309 - DNA, 1902 bp, Acinetobacter baumannii 883425; identical to SEQ ID NO: 74267

SEQ ID NO: 74310 - DNA, 1659 bp, Sphingobium sp. Ant17
attcgcctcgttctcgacccgacgcttgctgacgcggcgcgtcagcttaagctttccgacttctgggacggctgcgaacttgccaaggggccgcggatcgaagtgcatctcgactttgccgggttcgataccgacgaggcgcaggcggccctgctcaccgattttcgcatcgccggtgatcctacgatcgccaggctcagctatgtttttcgcaagaagccggaggttggcgggccgccacagtccagcgcggattgcgagttcatcgtctacggtggtggagatgaatcgcgcccgattcccagccggctgcggcgtcgtatcgcgctcgacatgctcgacgccttgcgcgacgccgaaggccagctcggctcgtggcgcaactcgccgctccggcccctgctcgaagacgcgatcgccggtgtagatcacgcatcgctcgaagccgtcgccgccgacctcgatcgcgccaccaaggcgctagaggcctttcctacggtgaaggcgctcgaggatggactgcgctcaggtatcctagatctcgccggtaagacccacgacatcgatgcccgtctgcgttttgcgccagctgacccgctgcgccttttccgctcgatttccatgttcatcgacaacggaaaacgcggcatcgcggaagcgagcctcggctctgccaatgtcgcgctgatcgcactcaaactcgccgagttcgcgtggcgccgggcgaagaatgagcgcaactactcgctgctgtgcatcgaggagcccgaagcacacctccacccccagctgcagcgcggtgtgttcgataagctgttcaacgccggcgatcctaaccaggcgctgatcgtcacaagccactcgccgactctcgccgctgtcgcgccgcttcgcgcgattgtgcaccttaaggcgcaaggtggaaggacgaacgcttactcgctcgcgaacctccccgttacgcccgaagaccttgatgacatcgagcgctacctgaccgccacgcgctccgagctgctgttctctcgcggcgtcatcttcgtcgagggcgacgccgaggaaacgctgatgccggcgtttgccgatgcgcttgggtacaatcttgatcggctcggtatctcggtgtgcaacgtcgccggtgtcaatttcacaccctatgtcaaactcgccgccagcctgggcttcccgttttcggtcgtcaccgactgggatcccctcgacggcaccaagccgccgctcggcatagcccgcaccctcgacatctgggacgcctatgcgtctgtatcagggagagaagtgctttcggctgcgcagcgcgccaggtgggatgcgtcagactttgccgcgttcagcaaagcgtgggagcagtccggcgttttcctgaacgaccagaccttcgaagtctccgtcgcgaatacccccgccttgctcggcacgctcctcgatatcctatctgaacaggggttcggctccgtccgcaccaagcgcatcgcagcttggcgtgccgacatgaaagtcgatcctgcgcagctgctcgcgatggtcgcggatatcgggaagggacggctgagcgccaagatcgcccgcaagctgcccttcggccagcatccacccggctatatcgctgccgccatcaggttcgtggccgaccgtgtctaa

SEQ ID NO: 74311 - DNA, 1779 bp, Sphingobium sp. Ant17
gtgtctaaccatctcgcgctggcgcgggcactggtcgatcttgctgccaacgccgaacaggccgcggcggttcaggagcgcggccattgcgttgtcctggccggccctggcagcggcaagaccaagaccctgaccacggcgatggcacgctgcctcgtggaagatgtcgtcgacccgcgcggggtcgcatgtatcacctacaataacgagtgcgcgatcgagctcgagacacgcctcgccgcgctcggcattgccagcaacgatcgcgccttcatcggcacggtccacagcttcgcgctcacgcaggtgatcgtgccttatgcgcgctgtctccccggactgctgccggatgaattccgcgtcgcgagccgggcggaatgccgtgctgcggtcgaaattgcttattcgcaggtctttgacgaccagttcgatccccatgatcgctggggctttgccgaagagaagcgccgacgcgatgtcgaccgatcgcgccctgattggcgcggttgcaatcctgagcttgccgattttatcgaagcctatgaggccgaactgcgccgccgcagtctgatcgacttcgacgacatgccgctgatcgcctttcgcatgatccagcagcatggctggattcgtgccgcactgcgagcacgatttccggtcctattcgtcgacgaatatcaggaccttggctatgcgctgcacgaactggtgctcctcctctgcttcgccggcggaatgcgcctgttcgcggtaggggacgcggaccaatcgatttacggctttaccggcgctgatcccgaactgctgcaaagcctggtcgcgcgtgctgatgtccgcgtccttcgcctgcgttttaactaccggtccggcgccaagatcattcgcgcctcgatgggcgcgctcggcgaggagcgcgattatcgtgggcgcgacggtgcgcccgacggcgacttgttcttctggaaggtgataggcgacatcgatacgcaagcgcgcactatcggcaacaagatcttacccgtgcttcttgagcgccatcccgccgaggaagtcgccattctctatcgcgcggcctggctgggcgacaagatcgccgccgcgcttgatgctaaggatatcccctatgtccgcaccgacggcaacgcgctgatcaaacgcagctcgcggctcgcgcggttcattgaggggtgtgcccgctggaccaccggcggctggcgcgaggccaacccgccttttgcgcgcttgctctcgcaggccaaggccttggtgttcggcggacgcagcagcgacgcggaagagcagatgctatcaagccagctgattgcatttttgcgcagcgggattgacagcggcgagaccacccatttctggttgcaaagattctggcgcgaattggtcacgccatggcgcgcgatcgcgcgcaatccacagggagaatgggacgtttgctccgagatagccacgcgaacggatcctgcgcgcggcggggacattgccctcaacattttcgctggccggattgagggaacgggccgcgtcagtctcagtacgctgcacagcgcaaaaggccgtgagttcgatgcggtcattctctttggcatgaacgccggggcgctcccaagtcaacgcgaccgaaaaacgccaacggcgctgcgcgaggcccggcggctcttctatgttggcgtgacgcggccgcgaaaggagctcgcgatcgtctatcaggacggaaatccttcgccctgggtcgttgaactctacaagcggagccagcagggttaa

SEQ ID NO: 74312 - DNA, 1872 bp, Acinetobacter baumannii 25977_10; identical to SEQ ID NO: 73700

SEQ ID NO: 74313 - DNA, 1620 bp, Acinetobacter baumannii 25977_10
atgaagttgacgaatgatcaaataaaagcaattcaagatattgaaaataattcggtaatcatggcgtgtccagggagtggaaagactaccgttcttattaataaaatgagtttatgttgtgaaaagttaaaaagacataatggaataataggattatctttcaccagaaaatctagtgaagagttgagaagaaaatttcaaaagaagacgataagttcaaatctcaattatctaggtactatagatggctttctgatcaatgaaattattagaccttttttgccaaagctatggggcaatgagaacgatgatattgagatcgtaagtattttatcggaagaagaatctattccatttgtacaagagtttgcgaatggagaaatatatttaaaagatatagaaaatgataatgcttttaagggattatttttaagtggaaaaatatggcaaagaacagtaacacctttagctttgtttgtacttaaaaattcatcagtctgtagaagatacatatcatctcgatataaatacttgtttgtagatgaatatcaagatacttcatcaggacaacatctagtttttctagaaattttaaaactagggttgaaatttacagcggtaggagatattgatcagtcaatttacagatggcgtgatgctattcctgaaaatttaacttcgcttgtaaatgagcacgattttaaagaatatgctattgatcaaaaccatagatgtgacccatctattgatttatatgctagagcttttttaaaaggtatagatctagaagaaattgataaaaaaaacatatttggattgcatataaataattcaggaaaacatagatacgctaagttagatgattttatacaaaaaattaaagatgagaataattttgatttttcagattttgtgatattagcagctaataatgcaacggttcagcattatgctttgaatacgcgtcatagttatagaatttacgaagatgatcctcttgatagtatgaatcattatattgcacagttatgttctgatttgattttatataaattttgtaagaattattcaagttactcaatctatgagaattataagtctaggtttattaacattaaattaaatgattttaaggttgaagttaaaaaaataagaactgaaaatgatactgatgaaatttgtgaaataattaaaggcttaattaataaaactaattataaaggtgattgtgaaaattttattttggcaacaaaaaatatttttaatgatgaattcttgttgaaaaaatataaaccacataataaaaatgaattacaaataatgtcaattcataagtcaaaaggtttggagtttaaagttgttatccaccttggtttggaacaatgggtattgccacgtaaaacaaagaaacaaggtcaatggacttttagcgatttagaaggggataaaaatttacactatgttgcgatcacacgagctgaaaatctatgctatttagtagatatgcctataagagtaaaatcagaaaataacgtgtttaaagagatgaatgcaaataaatctgaattcctatgtattgaaagattgaacaagcatattgttgatctaggagttatgtag

SEQ ID NO: 74314 - DNA, 1872 bp, Acinetobacter baumannii 25977_1; identical to SEQ ID NO: 73700

SEQ ID NO: 74315 - DNA, 1620 bp, Acinetobacter baumannii 25977_1; identical to SEQ ID NO: 74313

SEQ ID NO: 74316 - DNA, 1872 bp, Acinetobacter baumannii 25977_2; identical to SEQ ID NO: 73700

SEQ ID NO: 74317 - DNA, 1620 bp, Acinetobacter baumannii 25977_2; identical to SEQ ID NO: 74313

SEQ ID NO: 74318 - DNA, 1872 bp, Acinetobacter baumannii 25977_3; identical to SEQ ID NO: 73700

SEQ ID NO: 74319 - DNA, 1620 bp, Acinetobacter baumannii 25977_3; identical to SEQ ID NO: 74313

SEQ ID NO: 74320 - DNA, 1872 bp, Acinetobacter baumannii 25977_4; identical to SEQ ID NO: 73700

SEQ ID NO: 74321 - DNA, 1620 bp, Acinetobacter baumannii 25977_4; identical to SEQ ID NO: 74313

SEQ ID NO: 74322 - DNA, 1872 bp, Acinetobacter baumannii 25977_6; identical to SEQ ID NO: 73700

SEQ ID NO: 74323 - DNA, 1620 bp, Acinetobacter baumannii 25977_6; identical to SEQ ID NO: 74313

SEQ ID NO: 74324 - DNA, 1872 bp, Acinetobacter baumannii 25977_7; identical to SEQ ID NO: 73700

SEQ ID NO: 74325 - DNA, 1620 bp, Acinetobacter baumannii 25977_7; identical to SEQ ID NO: 74313

SEQ ID NO: 74326 - DNA, 1872 bp, Acinetobacter baumannii 25977_8; identical to SEQ ID NO: 73700

SEQ ID NO: 74327 - DNA, 1620 bp, Acinetobacter baumannii 25977_8; identical to SEQ ID NO: 74313

SEQ ID NO: 74328 - DNA, 1824 bp, Roseibacterium elongatum DSM 19469
atgcttccccaccacgctgttcttattggcgataataatactggcaagactacactactcgagtcgctcgacctggcgctgggtccagacagactgaaccgtacaccgccaattgatgaacatgacttttatgagggccgatacctcgccaaggcaactcctgacacatcgaccgagggtgaggacgtctcacctgaggggggtgacgctgagacggttgaaggtgagctcgagaatgtgacggacgatgcagcaccgcgcattgagatcgaagtgacggtgaccgacctctcggaagagcagaaggctcgcttcggcgactttctcgaattctgggactcgaccaccgatgccttctacgaccagcctgacccagctggcgtggacccagcccatgtcgcggaggcgcttcgtgtcactttccatggttggtacgaccccgaagaggatgactttgaggggcgaacatacttttcccgaagcctttccgaaggcggttctcccgtcccgttcagcaaaaaagacaagcagatatgcggcttcttgtatctgcgctcgcttagaacgggttcacgagcattgagcctggagcggggaagccttctcgatatcattcttcggctcaaggaagtgcgcccgcagatgtgggaagacaccttgggaacactcgctgagtattctgttgccgctgacccggctctcggcatttcaggtgttcttgagagcatcaacaaagccctgaagaaatacgtccccaaggaatggggcgtcgaaccacatctgaaggtatccaatctgacccgtgaccacctccgaaaggtgatcacggcgtttattgccaccggtgaaggcaaacatgctgcgccttatttcagacagggaaccggcaccatcaacatgctcgttctggccatgctgtcccagatcgcagccgataagcagaacgtcatctttgcgatggaggagccggaaaccgccataccgccctatgcacagaaaaggattgtgcacgaaatccgcaaactggcctcgcaagccatcttcacttctcattcgccctacgtgcttgaggagtttgcgacggaggaaactgtagttctcggtcgtgacacggatggggctctctctcgaaagccgattgtgctcccagataatgtcaaactgaagcgttaccggcaggaattccgcacccgcttttgtgaagggttgttggcacgccgggtcctgatcgccgaaggcccgacagaagcgtccgcctttccagtggcgtgccggaggctcgcagagatcaatcctggcacatacagctccctcgaagccttgggcatttgcgtcgtcgatgccgatggagagaaaaacatcccgggcatggcaaagctgtatcgagaactcggaaaacgcattttcgctctatgcgaccaacaagacgccgcgaacaagaccctgatcgaggcggaagttgatatcctactcatgcataccgaaaagggcttcgaggatcttgtgctgaaaggcacaaatgaagatgcgctcaagcgcttcgccgctcttctcgattggcccggtcaccttaccagcaagtatccggacccatccgccgacgttttcaatgcacttgccgattatttctcatggtcgaaggggaattggggcatcgccgacttcttcgcccaatgcgcagaggatgaaattccggaatgggtacgaaatgcctgttctcaactgaaaacggcctgcgacccaaccccgcatttggatgatgcggctgaacccgtcggcgagagcgatgctgatccgggggcgtctgcggatggagctgactga

SEQ ID NO: 74329 - DNA, 1821 bp, Roseibacterium elongatum DSM 19469
atggagctgactgagaagcaaatccaggtcttggatgctgacggccaccttcttgttaccggagggccggggtccggcaagacaaccatttccatattcaaggccgctcaggttgccgaggctatcctccggccagggcaaaaggtgctgtttctgagctttgccagagcgacagtatctcgggtcgtggaagctatcgaatttgagcaaaaaatccccaaggaaatcaaacgccggatagacgttgagacctaccattccttcttttggcgcatcctcaaggcgcacggttacctcgcaggtcttccgagggacctcacgattcttacgccttccgccgaagcgattgccctttccgacattcgcaacagccacggagccgacaacaaactgagcgaccctcagaaacaggcaaagcgagcggcggagacggctaaaagataccgtctggcaactcacgagggccgcgtgtgcttcgacctcttcgcgccgtatgtcggcgatctgctgcatggaagccagacactgaggcggcttatcgccaccatgtatcccgttatcatccttgatgaatttcaggatacgaacccagagcaatggcgtgtggttcaggcgctcggagccttctgtcgcctcattgcacttgctgacccggagcaacgcattttcgatttcatcggggccgatccggaacgactgaatcatttccggtgcacctttgctccaaccgagatcgacttcggtaccgacaactatcgaagtagcggtacggacatcgccacattcgcgaacgacattctgaagggcacctttagccagagctcctacaccggtatcgattttgagcttttcgaccccttcccggacccggccatgaccaagctgattacgaccacctatgctgcacgaggacgacttgtagcgtccggtaaatctgattggtccttggctgtgctggtgccgacgaagaaaatgacccgtctcgtgtctgacaagtttcgggaaccaccagccgggatgcagcccattgcccataccgctgtcgttgaactcgaagcggctattctcggatcagagattattgcgcatttgatgctgcctgacttgggcgacgctcatttttccgaattcattgatctggtctgcaacttctttcaggggaaaggcggtgatcggccgacaaccggcgctctcaaagaggcggcagctgtccgcagtgcttatgaaaagtggcttgcggcacttgccgctggaaagaaaccgcatgcgaacagcatgatacatgctcttgcttcggtctacgagcaagcgcgctcagtcacgttgacgggagaccctgataaggactggcgagccgtaagagccacgttggaagcaggggcgtgttcccggctgaaggaaattggcttggaggttcgcaatattcgtctcttagagcgtggtggccaattacgtcaggacctcacacaggactggcggaataacggttcctatgcaaacgcgcacgcaatcgttcagcaggcttttgtccaagagcatttcgccacgggaagtaagcctgagactggtgtgattgtgatgaacatgcacaaggccaagggaaagcaattcgacgaagtagtcatcttcgagggctggccgcgcaggaataagggaaagatcgtcgcaaatcttgaccgtattgtacgcaacaatgaccgtgacgaaatcaatgacggatcacgccagaatttcagggtaagcgtcaccagagggcgacagcgtacaacgattttgacaccaaaaggtgacccgtgtgtactgctgcttcctgatgagtag

SEQ ID NO: 74330 - DNA, 1854 bp, Vibrio parahaemolyticus VPCR-2009
atgtatttacattgtttgaagctagaaaaatttcgaagatataagcagctagaggttgaatttaactcaggcctgaatcttttagtaggtgaaaacgattcaggtaagaccgcaatcatcgacggaatcaagtacgtattgaacacccaaagttatgaatacctcagaccttgtattgaagacttctacttagatccaacccaagatgaatctcatcgttctagcgagtttcgtattgaatgtgtattcaagggcttcgataaagaagaagctaagcacttcatcgattggattggtactgatgacgagaagaaatactttctgaagatatggctatgtgcatcaagaaagaacggtagagtcttctatgacgttaaagccggcagtgatgatgaaggctcacaagttaatggagaggctcgtgacttactcagagcaacatatctcaagccgctacgtgacgctgaaagtgagttgacacctaaaaaagggtcaaggctatctcagattctttataatcatgaggtctttgaagatgaagaagacaatagactcctgaaaattatgtctctcacaaataaggcgattgaaaagttcttcacacatcatgatggaaaagagttgctgacagatgtgaacacatatctggacgacttttcgctagaaaacaacaaactaaactcaagatttaacgtgagtgatagctctttaaaatctgtgctggaaaagctatctctgaaattattcaaccaatcggtttcggagaacaacaatcaaggtcttggatctcataatcttttatatatcgccgcagaattgttactactcaaaaagagcaattatcagggactgaagttgggtttgattgaagaaattgaggcacatttacacccacaaacacaaattagattgattgaggctattcaaaagattagcgaagagaacaagatccagttcattctaacaactcacagcacaagtttggcatcaaaagtgaagttgcataacttagtcttatgcaaagacggttgcctatatcctatgggtaaagaatatactaagctacgagaaggtgattatctatttctagagcgttttcttgactcaactaagtctaatcttttttttgcaaatggagtgattctagttgagggagatgctgaaaacattttattaccatcattcgctaagaaactcggactcgatctttcacagtatggtgtatctattgtaaatgtaggtagtacagcattcttgcgttatgcgaatattttccttagaaacgatgataaaaagctcaatctagacatttctctgataactgatgttgatgttaagccatttatatacgagcccaaacaaactaaagaggaaaaaattgaaggagtgaaaaccaaaatagaattgactgagggagaggttgaagagaaaagattaattaccaaacaatcaatcatcgataaatacgaggcaccaataacagcgttcgtggctccatattggacacttgaatatagtatagctagaagctgcatgagtgaactattttatcaggcggtttacatttgtcacaaaacaaaatcaagagactatgtgtacaccagtgaagaaaaagtgacgctaatagcagaagccaaagctacatataagaaatggaaagatgacgacaagctaagtgttgatgaaatagcttataaaatttacaaagaaattgtgctagacaaaaagatctcaaaggcggttattgctcaggtcttcgccgatttcattagtgacgcagattttgacggcgtcattgaagatgaaaacatcaactatctagttaatgcgattaagaatgtaacgagcaaatga

SEQ ID NO: 74331 - DNA, 1455 bp, Vibrio parahaemolyticus VPCR-2009
atgaaaccaataacagataaagatatatccgatgttgagaaaaggttgtcattgggtttcgatgatggaagcaaagagtttattaaatgttctgtttccaaggatatacaggcttgtcccggagctgggaaaacaacgtcactggttgctaagctcgatgtactttctcgacaaatgccattccctgataagagtggtattctagttctcactcatacaaatgtagctgttgatgaagtgaaaagtaaactcgggtataacgcgagtaaacttttaggctaccccaatcatatagggacgttccagtcgtttgtgaataaatatttggcaactccaatgtatataaaattatacagcaagaagcctgagaagatagattcagagctattcgaaaagaagttaaaatcgatactaacatctagctttattggtagtttcatattagctagatcaaatgataacaactataatcgcgtagaaaaatttataaacgcgctagaaattcgcaaagacaaaatatgcttaaaacaagccacaagaagtaaaacgatcatatccaacaaaagtaaaatattttatagggttaagagttatctagaaaaagatattgtcggaacaatagtttctgatggatatataacattttcgcattgctatgaattagccaatagatacttagaggagttgcctgaaataggaagcgttattagttctagattcaagtatgtttttgtcgatgaagctcaagatacggatagtgggcagttcgagcttttgaagaagatctttggtaactcaaagtctatcattcaaagaattggcgacaatgatcaatcgatatttaactttgatagctcagataaattgacttgggatgtgtcacaagaccatatcacaatcagtgatacaaaaagattatcaaaaaagatatctaaagtggcaagcaatttctcaataactaatcacaatcttaccagtaataatgatgttgacattgatcctgtagttttagtattcgaagatgataatatcgaaaaggtcgtgccaaagtttgctgaattgataaaaattcacaatttgcatcttatcgagaagccaatattcaaagcaatcggaaatattggaaaggcacatgacacctatcataccataccaagctatgtgaatactcactatgagcaagacgctgaagttgttaatggagatgactttagagataaactcatttcatgtggtgatatttctcctagtcatgtaaatatccattactgggctatattggttcagtatttaggcgaaattggttttgatttcgatgggaagaaattcaatagacgaacactgacttactatttaaaagttaacaacagagaacttcttgatgagcttaatggttactctcttagtatatttgaagatattgagcgtgttgatgctcttaatccatatttagtc

SEQ ID NO: 74332 - DNA, 2094 bp, Vibrio parahaemolyticus VPTS-2010
gtgtacatttctagtatcgatatctcaaattacagaagcttcagaagtcaaaacatacaatttaaaaatgatattaacgttatcgtagggcataacaatgcaggtaaaacaaaccttttacgagcattagctgttgtactggataacacatcttcaaagagtctatctattgatgattttaacaaaaatatccctttagaagagttaaagattgcggcaccaaaggtctcgatagctgttacctttaaaaaagggaatgaccacactccagatgatttagctacgattgctagctgcctgactaagcttgtggaggattatgaagctaaactgacctacgaactatttttgccagaaaaagaacaaaccaactatttacaagagctagacaagttaaaagatactatatcaaaagaagatatatggaagatcattgactctaagtttttaagaaaatatcagtataaaatttgggctggtaaagttgaaaataaggatcctgttagtagcgaaactctcagtaaatttgattttcagttcttggatgcaattagagacgttgaaagagacatgctcagcggaaaaaataacttactcaaagacgtatttcagttttttatagactatgatcttaagaaaaatatcaatactcttgaaccagatgaaatagaaaaaaaagtacaggaaatcagaaatagagaagatgtgtttaaggtatcctctgaaaaggtattagctcaactgcatgatagaatgttagagggaaagggtgaaatactaggctatgctaacaaaactggtgcggattttaatgattcgtatcctgactttgatggtagtgtttctgaaaaagatatgctgtttgctttgcaacttataataaaaaagaaaacggggataacgttgccagcgactcataatggtttaggctataataacttaatatatatgtctcttcttttggcaaaaatgcaagttaattctgatggtagctatatgggaagtaacgctaagatattcccaatgttagcaatcgaagaaccagaggcacaccttcatccatctatgcaacacaaactattgaagttcttaagtgacaagaataataaaactagacaagtctttatcacaactcactcaacacacataacgtcatcatgtaaattggacaatataatcaatctgtattcagatgatgatgaatatacagtttcttacccttcaaaagcattagggaatgacgatagtaaaaggtatgttcagcgattcttagatgcaactaaatccgacatgttgtttgctcaaaaagttatctttgttgaagggattgctgaacaattattaatttcgacttttgcaaaatattatgaaaatgaagtcaaaaaaacacagccatatctttccaaatgcttagaagataaccatatttccgtaattaatgttggcggtcgatacttcgagcatttcttgaaaatttttgatacaaatgatgataatgccattcctaaaaaggttgtatgtctaactgacagagatcctgtaagaaaactagaaaacggtaattatgagaagtgttatccttttgagttaggagccgataacgagacttatgattattctaataactcatcacaactggttgataaatataaaagacataaaaatatcagatactttagccaaggcgaaaagagtaaaacctttgaatatgagcttattttagaaaacccaaaacttaaacttctgttaactgattccattagtaataaaagtgaacttgaaaaattaatggactctattgacgaactatcaattgaaaatttcattaagctattgaataagggaacagagaaaaaaccacacgcagaaaacaatcgaatcatcgagtctatcaagaactgttcatgggatgaatatagtaaaaagaaagctatattagcatccagatacttgaactccgtgggtaaaggtgaaaatgcattattactatctgatgtactagaaagaaaccttgagaatataggtacagataaataccaagaatttgttgtacctcaatatattaaggatgggattgattttctatgcgaataa

SEQ ID NO: 74333 - DNA, 1770 bp, Vibrio parahaemolyticus VPTS-2010
atgcgaataaatacgataacatctgaatcagtcattaaagctattgatgatgaatttagggtttcagcaggtccaggagctgggaaaactcattggttaataagtcatattagtaatgtagtatccaattcaactcgtttaggtaaatttggtaaagttgcatgtattacttatacaaacattgccgcggacacaatcaatagtagattaggtgactcatcacaaaatacggaagtacgtacacttcacagcttcctatatagacacataattaagccctacgcatccttcttgccatctgagtatgaacttagcttcgataaaatagatggccatgatgatcattatgttagccttaaaagaatcaatgattggttaaacaatcataaaagtaaggctaagtttaaacacccttatacaataaaacagcttcaaaaattaaagaacaatcaagaagctttaagtaattggataggaacaatttattggtcaatggttcagggagaaaaccttgagctaaagtgtaaaagcaaagaagcattttatattgagtcaggaaggcgaaagtacatttcaaataaaataataggtactctatcagaggacttaattacatacaaaaagattttctggagaaaaggaatattacaccatgatgatgtactttacttcagctataaactaatagaagaaaatccatttattctaactgtaatgaaatccaaatttccttacatatttatcgacgaatttcaagacacgagccctattcagtctaaaataataagtaaacttaaagcaataggtgttactgttggtgttattggagataaagcacagtcaatttatggttttcaaggtgccacaccaaatgattttgatgagtttatctcacctaaaacaactcaatatactatttcccaaaacaggcgaagtacaagtttaattattgatgttttaaatcatataagaaaagatattaagcaaaccccatacaggaaagagagtgggatattgccacagttactagttggacctatttacgatgcttacgagtatttaaatagcaatgttgttggcggcgaaattaagataatatcaagggataatatttcagtatacaatctaaatagaatttttaatggcggagtgtcagatgtaaatccgatagatgaaattcgaaatatcgactcaaatacagagcgtaaaaataaagtaataaactgtattacggcattatttttagctaataactttaggtttaaagatgcagtcgacgaaattgaaaaaaacttccgtgaaatttcagacgaagatataagaaagaaaatggcattagatagcctttttacacttacggcaaatctaagtaaatttgaagaagaaaacatttacgatttttttgttttcattaaggataatatacatagctctatttcaaaactcacagatagaggaaagcaaaaacctgtatatgaacgtattttgtacaaggatattataaatcaattatgtactggcgaggagacgggagatatcaaaaccatacataaaactaaaggcgatgattttgataatgtgttagtccatttgccagatgaaaaaaaactcgattttttaataaatccagatctcgaaaataacgaagaacatagagtttattacgtagctgtaagtcgagcaaaggatggattgtttatatcagttccaactctaaatagtaaagataaagaaaaattatcatctttgttcaagatagtttatttataa

SEQ ID NO: 74334 - DNA, 630 bp, Vibrio parahaemolyticus VPTS-2010
atgagctacagaatgagtattttgccagctgaagcatttttctctgacggtatattcttagtcgaggggccatctgaaatgctcttttatgagtcattatctaaagccttgggtattgaccttgattttgagaacttgtcaatcctatccgtcgatggtatttcctttaaagtatttatatctatactcgatgctcttcaaattccatggacgatgagaactgataacgatgtttcaaaagtatcgggtaaaaatgaatggcagcatgctggcatcaatcgttgtttggacctaataaaggaagccccatttgatagacgtaacaccgagttttcttctcagtccactgtagataacggagaatggaagaccgcttcagatctactgaatgacaaaggaatcttcttatctaaagttgatctggaaacagatttagttgaagagctatctaatgaagtaagaacagcggttggtaaatctgacgatgattctgcaatcaagtaccttcaagggaaaaaagcattaagaatgagaaagctgcttaaatctatttcaggagatcttcataagctgaatagtggtgaattagcaaagccactgaacaagctagtacagatgagaagaacttag

SEQ ID NO: 74335 - DNA, 1611 bp, Vibrio parahaemolyticus VPTS-2010
atgagcacttttaatccaacactacagcagcaggctgcgatagattgttacgatagtattgtcattacggcttgccctggtagtgggaaaaccaccgtgatgaaggaaaaaattcgtgggattacaccgaatctacctagtcataaaggtgtaattgctatcacttttacaaagaaagcgagtgaggagcttaagaagcgctgtaaagagaatgcgcacgacactaaattgagctttttcggcacaatagatagcttttgcttgaaagaattgatattgccatttttaggtcgagtatgggatggtacaccgtctgattgtaagataatcaagaaactagactctcatcagcagctgtacctttcaagaacatacagttcacctacttgtgatgaccttagttctgacgatggttttaaagcattgtatgatgcaggtatattgtggatgagtagttttgctgctttatcactattagttcttaataattcggtttccgcacagcgctatataagagcacgttactcgcatgttttcattgatgaataccaagactcatctcaagctcagcatgaactattcatgaaaatcaaagagttaggattaattgcgacggcggttggagacattgaccagtcgatatatcaattcaggggaagtcagccaaaattcttgttagccttaactaaagacaatgctaactttcagcactttgaactcgacttaaatcataggtgtcacccatctattgtcaattatgcttcccgtcttcttaaccctgcatacaaattgatagctcatgaagatgatatccatgtgtttcgtcggcttataactggaagcttaaaaaatgctgcagaacatatttcaccatggataggcgattgggtaaaaaaatcgacaattaacagtgcatctgacgtagctatcctagctaagaaggaagtttcgttaagagaatttgcaactggtttaacccataaccaccgactatatactgacacacctctcaatggtattggaactgaatgtgctgacgtttatttggatttactatcatataagttcggagctattccaactgctcaggacgtaatagaaaagtatttttctcagttgccagagaaaaacttggtaagcatgcgaaaacaattaaagactatacgagccgaacctgaactagaaactttcattgagaagtgtaatagtgcacttgatctaatagggcttgatgaatttgaagctgaaaatgatgctgtgaggattatctggaacaacgatacattggtaaagctgtttaagccaatagctgaagacgaagttcagttaatgacacttcataaatctaaaggcctagaattcaaaataatatttcatttagatatggaagaatggtcttttccgcatagagttcctggcgcaaattgggatgatattaattacccaagcttagccgaagatactaacctgcactatgtcggaataacgagagctgagttatgctgcgtcttaattcgtacaacattgcgtaaaaacgcaaaaggaaactatgtcgattcaaggccttcttattttctaggtttacctcaacttgaagggttatataaatga

SEQ ID NO: 74336 - DNA, 2037 bp, Eubacterium acidaminophilum DSM 3953
atgaatacacaaccatatatatgcaaagtgcatatcgaaaatttcaggaattttcgctgcgctgacttctggttaaatgaaaaacaagtaatcattggtgaaaacgcagttgggaaaagcaatttgctgtatgcactgcaattaatacttgatcctaatctttccgataaggaccgaatgcttgaggagtcggatttttgggaaggtgtagatgaaccaatgaaaaatggagagcagattcttattgaactttggttcgcgaactttgaagagaataagaatgtgctcgctcaactgactgatgctacagtaaaacttaatgagaaggaaatgctgaagttaacatacaagttctatccataccgaaaatatggtgaaattaacgagtataatttcattatttttaaaggtgatgacgaaactcgccgattctcatatgaagatagaaaatatttgaatatccgtgttatcaaggcgattcgtgatgttgaatctgaaatgcgtaattcgaaaacttcaccgttaacacagattatcaagcagaaatatacaataagcaaggatgtcctcgctgagatctcaaaagcgcttgaagaaaagggtgcagatacacttcaaataggtcaagttgaagatcttgaatcaagaattcatatgttgcttaatcaaatggtggcgtttaaccaagaccagtttgacgtttctttgaaaacgatgaatattgacgcgacaaagcttctgtatgccttacgccccttgattgacagtagggaatcaggaaacaccagtctagggataaacaatctactctatattgcactcattcttcttttaattgaggatgagacgattaagacatatctgccaaaggagctttatgaagaattagtcgaaaaggacgaaaacaaccttattgagagttgttattctgaagtggaaaaaatcaatgggtacactttaaatgataccgtattgacggattctgcaaaaagagatgatttatatgatttcatgactgaaaccattcctaccgcaaatggtgtaaccattcttgcagttgaagaacctgaagctcatctgcatccattatatcagcgactactttaccgtcatgtgatgaatcggtcaaacgcctctgtcatcataacaacgcattcaactcatatttcttctgttgcgccaattacttcaatagttcatctgatatccaagagcactggcaccagtgtaaagacaactgcacaattaaggctttcagattcagattttgctgatttagagaggtatatcgatgttaagcgtggagagatttatttggctaaaggtgtcatttttgttgaaggtgtttcagaggaatatctaattcctagttttgctaagaccatggagtacgatttagaccgtttaggcgttgtggtttgtaatattaactccacaaatttcgaaccatatcgtcagtttgctagggcattgggtttgccatatattattgtgactgatggagactattaccacagagttgatgagaaaaataagtacggagatatggcctcggaagacgatgttgagtacggctatgctggaatagaccgtgcaaaagccttttcaggagttgaagataaaattgaatcatttgtaacttcggagtatgaagaaggtacagtctttgaagatttggatactgacgatcagattgatttttttgaaagtattggggttttcatcggaaagcatacttttgaagttgacattttctgtaaatctggaggtccagatacagttgaagggcaaattatatctagtgtttttgatgatttgactgcaggtggccctcagcagaagcagaattttaagaataatatgtcagaaggcaaatacgatagatgtttagcgcaaattgaggcttccaatagtcaaattgggaaaggacgattttcgcagcggctctcatcctgcgtaacgcataatatgatgccagaatacattgaagcagctatcgctaagataactgagctcgtgaggagtaggtcaaattga

SEQ ID NO: 74337 - DNA, 1809 bp, Eubacterium acidaminophilum DSM 3953
ttgaatgattatttcaaacaaaaggtgaaagatctctccaatgatgcagaccagcttcgagcatacgaatcgaccgacagcacagttgttatagctggacccggaagtggaaagacaacagtactgacactaaaagtcatgcatctattagagaatttaatagctgagccgagaggcttggcttgtttgacttatagcactgagtcagctcgtgaattcaaaacaaggctttcaaaattgggaataaggagtcgtaaaaatgttttcttgggcacagtccacagtttttgcctcgcggaaatcttaactccattcgctaaactatatcctaaatatggaataccaaatcctatacggattatatcggaagcggaaaaaaagaagctgtttgacgatgtaaatccgccaggagggacttcaataaccgaaatggataaagagcgaactcgcaatataagtggtattagtcgagttgctattgaaagttatgaagttgcgcttaaaacggcaattgcatttgaagagaagttattaaagagcggctatattgattttattagcatggttaaattttctgttgagcttattcaaaatgaatcttatgtgcgtaaggcaattgaggcaaaatttccttggttcgttattgatgaatatcaggacttaggcaggccattacacgaaatagtcttgtccttactagacgtgtctgacatcaaaatattcgctgtaggtgatgctgaccagtcgatatacgattttcagggtgcagctccagattatctccatgaactctcgcaaagaaaaggaatcaagtgtatccgcttgttgaacaactatcgaagcgcacaaactattataaatgcctcggaatttgttttaaatacccaacgaggttacgtagcatctggtgtattgaaagactatcctgcttctatggaatttatagagtgtgagagtggaatggatgaacaatatcagcaaacaattgaaatggttaaaagatttcattcggatggaattccttatcacgaaattgcaatactcgttggtaaaaacgatgaagtgaacgcattgaaggataagtttgacagtgaaggaattgctgtatatttggcccgtcaagaatttaggaatacagaaactattcaatggcttcagaaatgtgcatcttgggttgagaataagacacaggtgtcatttgatgaaatatttctgacttggatgaattttatatcacaccaacaggataacatgatttccgatgagtttaatctaattgtgaggcgaacactattacgagttttacaagtgagcaggcagtataaagataatctttttgaatggctacggcatgtattaacggaacttgattttaaaaaagtttttgatggttcagatcggtttcctgatgaaatcgaaaatatgaaaaaattaataagagtcgtgaaacaagcagaaccggctatgacgattggattcttaacacgtcttggtatacctgacaatcaggttgttttatcgacaaggcatagtgcaaaaggtctagaatttgatgtggtaataatgcttggtatggaaaaagacagtttcccgggttactacgatacaacgcaacggaagattgatgaagctaggaggctttgttttgtggctgttagtagagcaaggaaggcgtgtgttctgatcagatctaagcaattaccaaacaaatatggcagatggttttctaaagatccatcaccgttttggacaaccctgaaagagtttcatgatgcacaatcatcaggcaaacgtgacttgcaaacctaa

SEQ ID NO: 74338 - DNA, 1848 bp, Paenibacillus polymyxa SQR-21
atgtttcttttagaagttagaattacaaactttcgaaagtttggtcaaggaacaaacggtgaacccggattggttctcgttttaaataaaggtctgaatgttctcattggtgaaaatgatgcaggaaaatcggcagtaattgatgcaatcaaatttgtattattaacacaaagcagagaatattctagactagaaaaagatgattttcatgctgattcaaatgaactgaaaatcgaatgcatctttaaggggttttcagtaaaccaagcaaaggattttttagagtggattactattgattcagataaacaatatagtcttcgtgtttttctaactgccaaaaaggatgttaaaggaaagatattaattgacgatgtgcatgcaggaagtgatagcgaagggcaaatactacatagtaaagcacgtgatttacttagaacgatttatcttaaaccattgagagatgcagaaaatgaacttgctgctaaacgaaactcacggttatctcaaatattatattcacatcccgagttttctacgggggaagatcatagactggttgaaatcattaaggaggctaatcaaaaaatcaagagatactttgattatgacgagctaactagtgaggaaaaaaagattctaaaatcaatcaatttttacttatcaaagttctctgataacaaaaatttgttgagttcaaatatagaaattgcagcagttaacctaaaaatgatcttagagaaaattgatcttttgcttgttactacgaaatcaggtttaggatcccttaatcaactatacattgcggctgagttattacttttacaaattgaaaaaactgaaggtattaacctcgcactcattgaggaaatagaagctcacttgcatccacaggctcagataagagtgatagattaccttcaagaattaagtgaaagtagcacatctccgatgcaaatactattaacaactcacagtgtcacattagcttcagttatcaaattgaataatttaattttgtttgctgaaggcaagtcgttttctttggctgaaggtaatactaaactacacaatggagactatagatttttagaaagattcctagactccacaaaagctaactttttctttgctaaaggagttatgattgtcgaaggtgatgcagagaacctattgcttcctacattagcggataaattaggaaaatcttttgctaaaaatggagtttccattgtgaatgtagggagtactgcattgttgagatactcaaaaatatttattagagaattaggtcctattatgcagttacctgttgcaatagttaccgattgtgacgagccggtatcaaagatcgataaagagtctggtggtattgttatgcttccagctagaaaacccaaaaaaataaaatctgaaaagaaagtcaaatatagcgatcaaaatgtaaaagcttatatatctcatgagtggactttagaattcgatttggcttgtagttgcttaaaaaaagaactgttcgcctcaattctcatggcaagggattatgctaatcaagataaggaattaacagaggggagagcggcaaagacatataaggaaatcggtgattatttaaaagaagctgaaacacagattagtggatggagcacctatgaacccttcatgctagcttcaaacatagttagagatgtagtattgaagaaaaacatttcaaaagcggttgttgctcaatgcttttctgaaattttgaatgaacgtagctttacattggaggaattagaagatatcagaagcgacagttatctaaagtacctagttgatgctatagattatgtgacaggagcttaa

SEQ ID NO: 74339 - DNA, 1971 bp, Paenibacillus polymyxa SQR-21
atgcaaatggtaaccgtaacagatgaagatattgaatacgcagctaaagttttaaatataccaaatggttttgatgccccaagagttaacgttataaagtgcatggagagtagagatgtagttgcatgcccagggagtggaaaaactacagtattactcgctaagttattaattctagcaagacatatacctttaaaaaataataaaggaatttgtattttaactcatacaaatgtagcgattgacgaaattaaagaacggctaggtgataaagccaatgaattactcacttatccaaactttgttggaacaatacattcatttatcagtaagtttttagctaatcctgcgtttgttaactactactctggaagaatttcaagagtttttgaacctttagattataaattacgattaataaaaaaatataagtccttgtatcctccattctcaggaagtaaactagatggtttcctctatggaagactcaataaaaaaataaaagaatcaaaagacaattctaaaatagcaaaggcaaaagatgatttactacgatccttagaattggattacaccgataacacgataaaaaaagtcgcttttaacaaaaaaactactgttttaaagaatccaaactcggatgcttataaagaatacatcacattaattgatcaacttcaaaatgaaggcatatgctcctacaatgaacttcaaggactcgcacataggtatgtaaatgattttccaagagaactacaaagtattttttcagagcgattttcgtttgtatttgtagacgaaatgcaggatactagcctacttcagttgcaagttttagaaaaaatttttgataatgaaaaaatgattttccaatgttttggtgatccgcagcaaacaatttatgaatccgatgataaaggctgttcatgggaacccaaagatcctttattcataaaaaacagtaatagactgagtaaaagtatcgcaaaagttgcagatgttgtagcattaaaaccttatggaatgctaggcagagaatcgcaaaaaggaaccctactttcgccagtgattatcagttataaagataatgatgtatcacatgtacttgaatcttttgctaagttgattatcaaatataagctggatgaactggataatgcgatatttaaagcagttggtatggtaaaggacaaaaatgaagggctatctattacgagttatttcccagtattcgaaaaattagagattaggagtaatgtaaacaaagatttttctgatcttaagagttacttagttatgcttgacaaagcggtaattgagaaagaaggtataaaggcgtattatgatagattcattttagcaatattaaagtacttgcgaataaatgatattaggactgacgaaggcaggcttttctctaaaatatcatttttgaaatatttacgtgaaaacgatgagagattatataaaacgacgcatagatactttgcaagaatagttttagcaatagctaaagggaaatgtatattagctagttttaattacattttagccattattgtgaatcgactattctgttttaaagttaacatatataaggatgaatttatgaacggaactcctgtggttgcaacaatagctgttaatgaagaaaaagtgaacatgtacagatatgatgacttaagaattgagttagacagtgttcatggagttaaaggacaaacgcataatgccactttatatttggaaactttttatttttctaaaacaaatgaaagtattattaaatttttgattggagaacaaagttccaccattgaggaacacgttgaaaaacacatacgtgttgcgtatgttgctatgacaagacctactgatttactgtgtattgtgttgaatgaagaaatttatttggagaacaaagtaaagttaaatgacttagggtggatacattaccaagaaataatatag

SEQ ID NO: 74340 - DNA, 1845 bp, Bacteroides fragilis str. 2-F-2 #7
tggaagaaagattcagtaggagtacgtttgcgttttgaaccaaaagatattaagtctctttatgcggattacaaaaaagaggttatgaaagtacgtagtttacaggattctcctgaatataaagagacaaaaaatttaaaactttatcctcaaaatatgtgggattttttaaatcataatcataatttattagcttatttcaatatcaaatattatgtgcttgattcagaaaagataaatcacgaattggagtctgaggtacaagttacccctgatgattctctcgaagaaaatccgttagtggacttaattcgtattgatagtatagaggcatttcgtgaattctccgatcctatggggaaaaatgaaagtgatatagatacactttcaaaacaattacaggcatactaccgtcaaaactatactgatgagactattatagagacgggagatttgaaattaatggaagaattatctagggccaatacctcttatgatttgaagttacagaaaagtttctctatgccaataggtgaactatccaatataaattatccaggattccaaaatccttctattagtattaggagtaatgttaatattgttgattctatttctcatgattcgtcagtacaattctctatacaaggtaaaccagaattatcacttccagagaagtataatggattgggattgagaaatctcatttctatatatctaaaacttatccaatttcgggaacaatggacgagaaatagcaaaaatgaagaagatgtgaaaaaatcaatagaacctatacaccttgtttttatcgaagaaccagaggcacatcttcacgcccaagcacaacaagtttttatacgaaaagcattagaggcactgactaatgctgctgaaaataatgcattgaaagaaaattccaatcttactactcaattaattgtgagtacgcattctaatcatatagtaaacgaagtagacatgaactgtttgcgttatttcagacgtgttttagacgaaatcattggtataccggtttctaaagtcgttaatatgtcccgaacatttggagaaaatgaaaacgatacaaaaaaatttgtaactagatatattaaacttacgcattgtgacattttctttgctgatgcagcaatactcgttgagggggcagcagaaagaattcttatgcctcattttattaagagggaaggtatggataattattatatttctgttatggaaataaatggaagccatgcacatagatttagcagccttttaaaaaagctcaatattttgacagtaatagtaactgatattgatgctcagcaagaagtggaagaagatggtaagaagaaaaaaaaatctagccttccccaaagaaggcaaagtcaaacgaccaataacgatactataaaacattggattggaaaggatgaaatagatgatttattagaattaccagagacagataaaataaaggataatgtacatgtagtctatcagactggagttgatgttgtgtggattaaagagaaagaaacgatatatccatatacttttgaagactcgttaattttcactaatcttgatttgtttcgtggagatgagaagttgaaaaaacttggtacggttactactttttataattatttgcatagtataaaggacttgaaaacattccatatgaagatctttgataagttagaatcttcttccaatgtaaaagctgaatttgcaaacacattgttgtatgcggaacaatttgaggcattacagactcctgcctatattagagaggggttggaatggctaaaatcatattttgaatttaatcataaataa

SEQ ID NO: 74341 - DNA, 1854 bp, Bacteroides fragilis str. 2-F-2 #7
atgggacataatatagatgaaaaggtagatttaactcttgaggcttgtatttctccaaattcacgtaagagtttttttctttttgctggtgcggggtcaggtaaaactcattcattggttagattgttaaataagatcaaggacaaatgggagaagcaactaaaccttgaaggacgtcatatagcagtaataacctatacaaatgctgctactgatgaaattctcaaccgtcttgattatagtccactgtttcatgtctcgactattcatagttttgtatgggaagttataaagcattatcagactgatataaagaagtattatattgcatttaaagaagtcgagaaagctgaaatagaattgaaattggagaaatccaagagtaaatctggaaaaaattacaataataatttggaaaaactggttgccataaatgaaaagataataaaagcatctgatattaatagatttatatataatccaaatggtaataattatgaatacaatgctttaagtcatgcggatgttataaaaataggtgctaaaatgatagtagataacgagcttctccaaaaaattatagcgcaacaatatccattttttatgattgatgagagtcaagacacaaaaaaagaattgatagctgccttttttgaaattgaaagaaatgttgatgataattttacacttggactatttggggatcaaaaacaacgaatttatacagatggcgaggagcgaattgtagagattattccccaagaatgggaaaaacctattaaagagatgaactatagatgtgcgaaacgcattgttgaattagcaaataagataggttgtcaaatagatgtgtatgcaaaacaaagccctcgtgataatgcaccggaaggtactgttcggttatttttaatcaagaataaggatgatttgaacaagattgagttagaatcaaaagtgattcaaatgatggctgatattactggagatcagatgtggaatagagatgcaacaaatgtaaaggtactgatattggaacatatgatggctgcacgaagattgggtttcgctgagttttttgatgtgatgcatgaagtggataaatataagcagaccctgttgcaaggattggttagtgatatggatatattcacaaagcttatatttccgcttgttgagaatgtgttgaagaatgataatttatctgctctaaacttactgaaattatattctcctttgctgagggaattacctcaaaataaagcatttcaaatattagataagtgcaaaaaggtaatagatattcttgcaaatatggattttaatgtggttacaatcagggaacttatcacatatgtctgtacaacacatatttttgtagttccagaaatactaaaaagagcttcaaaaatggtattaaatgatcttacagaagatgataaagaggatatggatatagtttgttcttggatcaaagtgatggatttacctgttaaccaaataaaacgttttgatgattatgtaaatcgtcgtacaatgtttgatacacatcaaggtgtgaaaggactagaattcgaacgtgtacttgttgttattgatgataatgaatcaagaggatttctttttagctatgataaattgttgggagtaaaatcattgtcagatggtgatattaaaaataaggaaacaggtaaggaaacaagcatggagcgaactactagactattttatgtgacatgtactagggctcgtaattccttagctatagttatgtatacaaatgcccctgaaacagctaaagagacggtacttgtaaataaatggttcattgatgacgagattataataataaattaa

SEQ ID NO: 74342 - DNA, 1971 bp, Bacteroides fragilis str. 3986T(B)10
gaatcagatttagatgaaaacaagttatctatttctgcttggcaaccattcgtcccacaattagatgtgtggattaatgtggaagaaaatgagatacattacgtgaaccggattattcctacgttggattgggctagtgggaaattgggtattcgattaaggtttgagcctaaagatataaaaactctgtatacggattatactacagctaaatctacaattgaagaattaacgaaagatcgaagcaaaaaggcaacgaaattatggcctattcacttgtgggattttttacagaagaaattacacacatattttacagtcaatgcatatattcttgatcctagtaaatttgggcagggagatacgcctcaactactttcagaagataatatacctattgatttcgatccttttcaaggtttagtaaagattgacataattaatgctcaaagaggtttctcagaccctaatactcctgaaacgggtattagtaacttgtccagccaactacgtgaatactactcaaaacatataaatccaacagagactatagatgccactgacttggatgcattggaggcaattgaggaagcgaataaggcttttgacatacgattagaagctggcttttcctcctctctcgatgaattgagaaacctgaattaccctggatttggtaatccggaaataagcatttcaaccaaagtcagtccggttgatggactcaaacatgattcggcagtccttttcaatgttcaaaaaggggaaacagacgaacaatgcctaaggttatcggaaaaatacaatggtttaggatatcagaatctaatttctatgattttcaaactcattcgatttagagatgagtggatgaaagtcgggaaaattgccaaaaattcgactcatgagatagaacctttacatattattctggtggaagaaccggaagcacatttacatgctcaagtgcaacaagtgtttatacgtaaagcatatgatgtattaagaaatcatgctcgtcttaaagagaagaaagacttctgtacacaattaattatcagcacacattcaagtcacatcgcacatgaatgtgattttaagtctttgcgctattttaaacggaatattacccaaaaccaaattccgacttcaacagttataaacttatccaaaacatttggtgcggaagatgaaacaacaaaatttgcaaaaaggtacttgaaaacgacccactgtgatttgttctttgcagatgccgcaattctcatagaagggcaagcggaaagaatgctactacctttctttattaatcaagaatttccgaagctcgcttctgcatatatttcattgctggaaatcggcggaagtcatgctcatcgactaagaccactaattgatgatcttggtataatcaccttgattataactgatatagactctgttgatccgaatgcacataggagatcagttcgtcccgaaaaggggaaaaactacgtcactaatagttctacgttaaagcaatggactcctgctaaagaatctattgaggagcttgttgatttagcatcaactaaaaagcaatcctcaaatggcttggtgagagtcgcataccaatatggcactaaaatcacttttaaaaataaagtagtcactgtttatccctatacatttgaagaagcactagtttttgacaacattgatctattcaaatcaatgaagggagatggcttgataaagaaatattcggaagcactgaatgaatcgacaattaaagaatgtttaagaaaaatgtttgaagcattggataatgcaaaaaaggcagaattttctttgaatctacttttcattgatgacacgaaaaaaatcaaaactccaacatatatttcagaaggtctaaaatggctttcagaaatattagagaaaaacagcagtaactgtagtatgtcggtttcttcaaatgctataaaatga

SEQ ID NO: 74343 - DNA, 547 bp, Bacteroides fragilis str. 3986T(B)10
atgataacagattacgataattgcctagatgacaaagtggatgaagaacttttggcttgtttgaatcttcaaaatcctaaaagtttcttcctatttgccggtgctggctccggaaaaacaaggtcattagtcaatgttctagagcaaatcaaagataagtacggagacgaattgaaactccgtagaaagaatgttgccataataacttatacaaatgctgcctgtgatgaaattattcaccgcttaaaaaatgatcccacatttgccgtttcaacaatacacagctttgcatgggaattaatcagacattacacggcagatattaagaactggctacgtaatacactaaacaaagaaatagacgaattagagattgaagaatcgaaagggcgtcctggaactaaaacatctgttgatagaaaaaggaagattgagaataagaaaaatcggctttcgacattagatagaatatcaaaatttgcatataaccctaatggcgacaatatagaagataattcgttaagtcatactgaggtcattagcataa

SEQ ID NO: 74344 - DNA, 1833 bp, Bacteroides fragilis str. DS-166
atgcaaaagatactgattaacgaaattagaatagatggattccgtggattgaaagattttaaaatgagcctttctgaaactacggtacttactggcatgaataatgtcgggaaaacttctgttctaaaagcgctacagctgttgtttggaaacagctcgttcctttcaacagaagatttacacattgacaagaacggcaaatcaaattatatcattgttgatgccaaaatagtagcaattgataatgatggaaaacgtattgcaaatttctcagatgtatgggaaattgcatttggtgcggataatataaaaatggatgctgaagaacacgcctatgtgcctttgcgtgttaaatacacttttcaaacacttcagaactcatttaatagggatatgcaaatcttgaatgaatgggactcggcgggcatcgcttggcaaaatttgaaaggtaaaaaatctacagttaagggagattattttcagtttcactatctggatgcaaaacgggatattcaggatgatttaaaagccagaacctcctatttaggtaaaatgcttggtgatgtagttagtaattatgacccgaaagatgttgctgaattagaacaaaaaataagttctttaaatgcagaagccatagaaaagagtgatgtgcttagaaatattcaggaatcactaaaagggattgacgctacaatggactcttcaggcaaagtctatgtgtcaccttttgctaagaaattgcgagatttgaacaagagcttgactatccattatggaacggaggatagtagttttacaatggactatcatggtatgggtactaggagttggtcttccatgttgtcgtttcgggcttttgtaaagcaaatgtgcgacagcaagaacccagaagacgaggcttttttgccgattatagctatagaagaacctgaagcacatttgcatccgaatgcacagaagcaactctacaaacagatgaacgaaatgccgggcattaaaataatatcaacacactctccatatgtggctgcatgtgcagaattatcagagttgagaggtatgtataaagccgctgagaatacagtttgtggaagtttgcccgttacagaactaacttcagaggaacaaagaaaaatcaggcaagccgtattgactagcaatggcgaactgttgtttgccaaagcaattgtgttgggcgaaggtgagacagaagtacaagctttacctattttctgtcaacaacattggggattgactccagttgagtccggtctgtcgtttgtcgatgcaaagggatgtggtaattattatccatttgtagcccttgctgaagcgtttcagataccttggtatattttctctgatggagaaaaagacaccaagaaaggtcttaaaaaacttttgaagaggacttacaatgaagataaggaactggcagaacagaataatattttcatcatttcccctgaaaaagattttgaaggaatgctccttgatgatgggtataaagatgaaatagaaaaggctatcgaacagttgaaaggagaaggctacattgatgaatttatcaggaaattcaatcataagcctaaagggagggaacaaactcccaatatatgtaaaagctgtaatcaacatatatttgtggatattgaacgaatatatgatggtgaagatggtagattgacagctttggatgatataatggagaaaaataaggctcagctaggtccggtattggcaaattgtataattgaaagcgaaaaaccattacctccattagtagttaaactatttgatggaataaaaaaggatatatgtcatgtgtaa

SEQ ID NO: 74345 - DNA, 1845 bp, Bacteroides fragilis str. DS-166
atgtgtaagataaagttatctcccaaacaacaagaaattgcatcattgacagatggtgcagttttagtacgtgcaagtgctggtagtggcaagacaagagtacttgtggaacgtataaaaatgttggctggtatgaccaagcgtaaggtattggcaattacatttacgaacaaagcctgtgaggagattagaacaagacttgcagaagtggatgaaaatctattggagcatgtttttgttgctactttccatggtctatgtgaatcaatcattgaaagccatattgccgccactaggtttgtgacaatgccacaaatttttgcagatgacgatagaaagaaaatcttggaagaaacaattactgagactccatctttaagccagtggtatagaggactggatgataaagaacgtagggaaactctttatcgggcattggataatatcagccttataaaacggtctgtgattttagatgacgaactgtataatgttattaaagatgagcagatgcgtaatctatatttaagttatagagagcagatggattcgctaaacgcaattgattttgatgatttgttgcttaatgcttatcaattactgatacataatccaagaattgcagacttatatcgaagaagttttacatacatttgtgtggacgaggctcaggatttaaacaaagctcaatacatggttcttcgcgcgattactggtggtgagcataagaacgtaatgctggttggcgacaccaaacaatccatatatgcctttaatggttcaagtagtaaatatatggatgattggtttgtgaaggactacaatccgaccgtatataacctaaatgagaattatcgaagtgcgaaggcgattttggattatgcacaaaaggtagtgcatgatgacaccttagatgtaaccttaccttatacaggcgtttgtaaggaatatgcttatgatacaccatgtgaggaagcgcaagaagtcgtaagtggtataaaatcattggttggtgctgaaatagaaggttatgacgggaaattgagttattctgatattgcagtacttgctagaaataaattcgttcttggaaagattgaagaacaattaaaaagtggcggactgccatatcattataaaactacgggagcaggtttggaatttgcatccactgctgctaaagcttttgatttggctatggtagtacgaaccaatccctatgatagactgcatcttgatatgttgcagtctatagtaggcgtgagccattgcaaatcattagaacaagttgtagaaaatattagcgatgcattcttaaaagaagtcgtgcagcaagcctcactattaaaagatgatggtagtaatatgtatcaaactgtcaaatccatattgaacactttaaaagcctccaatgcttcggaatttaaatcaacagatgaagttttggctgtttttgatgaatttgaattgttaaaacatcattggagttcttatgctaagagtgtaacaaactattctttgtctgcttttcgtaatgcaatgtcgttgggacaaacctctgtcacttcttcggacggagaaggggttacattgagtacagtccacactatgaaaggccaacaagctgtagtagtattccttgtgggtatggatgaggggacattccctgattatcgtgctattaaaaaagggaacaatagcattgaaatgcaacaagagaaaaataacctatatgttgcaattactagagctcaaagacatctttatatttgttaccctcaaaaaagaaagatgccttggggcgattggtctccaagaaaaaaatccagcttgcttcccaagtaa

SEQ ID NO: 74346 - DNA, 1272 bp, Bacteroides fragilis str. 1007-1-F #8
cctggacaagaacatccatttgtgacatatgttaaatcagcaaacagaagcattaatagttggtttaatgatgagctacaagcattaggaaaagatggtttaccaattcttgggacaagtaataaggagcaaataaaagataagatagattcatttttacatgcttttattaattctaatataaatagcagccttacaattacggaacctaaaatacgtaatatactagaaactatttctattgttatagaattcgcacaaaatatggggctaggcactatgaataggctatatatggcgacagaactgcttcacttaaataaagagtgggatggtctaaaattatgtttaatagaagaactagaagcacatttacatcctcaagcgcaaatgaaagttatttctgctttacaatgtcagaaagtacaattcatcatgtcaactcatagtccaaatattgcatctaagataaaaatttcggataaagaaaacacaaacattattctatgttatgattctgacgtgtatccattgaatactgatacgaccagacttgatgaagatgactgtatattccttgatcattttttagatgtaacaaaatcaaatttgttttttgcaaaaggagttattattgttgaaggttgggcagaagaattattgatacctgtaattgccaataagttaggatataatcttaccaataaagaaatttcaattgttaatgttggttctactgcatatataagatatgctaatatttttataaggactgacggaaagatattaaatatgccaataagtatagtaacagatctcgatgtcagtccggaaaaaataaaaaaagaagaggtagagcttgatacaattgaatattcagaaatcagtcacgaagtggagttggaaaagtctaagaaaattttagatagtcttgctttgcccgatgaatcaaatgtcaaaattctcatttctccacattggactttagagtggtgtttatatctttccagcacattaaatgaatgttttaaggagtgtgtatctaaagtccattctaaaactgaaggttttaaaaaaaataaagctgggaaatatgatgaagaaaaattcaaaactacattaataaagaaacttaaagatcgaactttagataaagtagctattgctcatgaattatgtcagcaaatatgttcgttggacaccttagccatacctgaagatgatagtatatattatttagtggaagcaattaaacatgtatctaaagtatga

SEQ ID NO: 74347 - DNA, 1953 bp, Bacteroides fragilis str. 1007-1-F #8
atgagaagaattgatgataatctaattagtagtgtacaagacttccttttacctaaagggtgtaattttgatgatgaacgtcggaactttataaaagagctttcatcctgtgatttgttagctgtacctgggagtggcaaaacgactgctttaatagcaaaactttgttgtatggctgaaaatcttgaaataggagatgcaatattagttttatctcatacgaacactgctgttgaagaaatccgaaaacatctttccaaaaaagctgcgaaactgtttgaatatcctcataatgtatcgacgattcaagaatttgtagataaatttctcgcaattccatattatgaaaacaagtataagagaggaatagaaattattgacaaggatagatatgatgctgaaatacagcgaattttaagtagatgttgggatcgaaggattctgtattgcaaacaccaatttgactttacatcagtacgattcatcagttcctttggagaaccaaggattggattgggaattgaaggaagtgatatatcctataaaattccaactacatggagaggaaatgaagattttaataaacaatatgtttgcaattggttgttaaaggcaaaaaatgagattttagaaaaaggaatattgcattatgatgattgctattatttagctgaggaatacataaaagagtatccagagataaagagtgtattgcaaaaacgttttaaatatattcttattgatgaaacgcaagatatgcagctgcatcaattaaaccttattgataaattattttattcagataattgcatcttacaaagaataggtgatcctaaccaatcaatttataatgctgtaacagatacttgtgattggcttcctagaaatcccatgtatattaataattctctgagattatccaaagagattgcagacgttgtaaatccgttcactcttataactggtgatgatggaacaggtaaagctagatttgttgtaaatggaaaaaatgtattagattctccaatacttcctacgttattattatttaatgaagagacaatgccattattgaaaggtaaatttaaggatttgatagaaagaaataatcttcagaatacaattaatgggaaaaagtatgggtttcatataatcgggtggaatgcaaagatttcagaaccggaatttaacatagaaaaattacggttagataatatatttccaaacacaactaaagtcactacaagtaagacatacgatacaatctctgagtttcttcaatttagtgaaaatgagacgattagccaatgccaaaaaactgtcttcgcaatactatgtcatattttacgactgtctggtgtagttgatgtaaatggacgtaattttacaataaagacactgctcaaacaatataaaaataacgaactgataatattaaaccagacggtttttaagatatctgtagcgataaagcaaaatgattttgaaactgcatataagttattgaaacaggtcgttgatagtgatttaaaatcaaaatttgaacttcaacagaatgcatatgtagataattttattggaaatacttttgtgaagtataacaacgaagaaaaagaggaagaagattcaatcccaataaaaataggaacagtgcattctgtaaaaggaatgactcattgtgcaacaatgtatgtagaaactttttttcataactatgaatgtaaacatttaataaagaaacagaatagaggaggatttcaacctagtccattcttcaaagatatagttgacaaaaaatcttcaagagcaaaacaagctatgaaaatgttatatgttggaatgtcacggccgacacatctattatgctatgctagtttaaaaatgaattggagtagcgatgctttgaagaagatgagagaaagtggttgggaaattattgatttgacaatataa

SEQ ID NO: 74348 - DNA, 1935 bp, Bacteroides fragilis str. 2-F-2 #5
tgggatgatattgttccgtcacttgatatttggatagatgtaagcgaatctgaagcttaccaagtatataaaataataccttcacttacatggaagaaagattcagtaggagtacgtttgcgttttgaaccaaaagatattaagtctctttatgcggattacaaaaaagaggttatgaaagtacgtagtttacaggattctcctgaatataaagagacaaaaaatttaaaactttatcctcaaaatatgtgggattttttaaatcataatcataatttattagcttatttcaatatcaaatattatgtgcttgattcagaaaagataaatcacgaattggagtctgaggtacaagttacccctgatgattctctcgaagaaaatccgttagtggacttaattcgtattgatagtatagaggcatttcgtgaattctccgatcctatggggaaaaatgaaagtgatatagatacactttcaaaacaattacaggcatactaccgtcaaaactatactgatgagactattatagagacgggagatttgaaattaatggaagaattatctagggccaatacctcttatgatttgaagttacagaaaagtttctctatgccaataggtgaactatccaatataaattatccaggattccaaaatccttctattagtattaggagtaatgttaatattgttgattctatttctcatgattcgtcagtacaattctctatacaaggtaaaccagaattatcacttccagagaagtataatggattgggattgagaaatctcatttctatatatctaaaacttatccaatttcgggaacaatggacgagaaatagcaaaaatgaagaagatgtgaaaaaatcaatagaacctatacaccttgtttttatcgaagaaccagaggcacatcttcacgcccaagcacaacaagtttttatacgaaaagcattagaggcactgactaatgctgctgaaaataatgcattgaaagaaaattccaatcttactactcaattaattgtgagtacgcattctaatcatatagtaaacgaagtagacatgaactgtttgcgttatttcagacgtgttttagacgaaatcattggtataccggtttctaaagtcgttaatatgtcccgaacatttggagaaaatgaaaacgatacaaaaaaatttgtaactagatatattaaacttacgcattgtgacattttctttgctgatgcagcaatactcgttgagggggcagcagaaagaattcttatgcctcattttattaagagggaaggtatggataattattatatttctgttatggaaataaatggaagccatgcacatagatttagcagccttttaaaaaagctcaatattttgacagtaatagtaactgatattgatgctcagcaagaagtggaagaagatggtaagaagaaaaaaaaatctagccttccccaaagaaggcaaagtcaaacgaccaataacgatactataaaacattggattggaaaggatgaaatagatgatttattagaattaccagagacagataaaataaaggataatgtacatgtagtctatcagactggagttgatgttgtgtggattaaagagaaagaaacgatatatccatatacttttgaagactcgttaattttcactaatcttgatttgtttcgtggagatgagaagttgaaaaaacttggtacggttactactttttataattatttgcatagtataaaggacttgaaaacattccatatgaagatctttgataagttagaatcttcttccaatgtaaaagctgaatttgcaaacacattgttgtatgcggaacaatttgaggcattacagactcctgcctatattagagaggggttggaatggctaaaatcatattttgaatttaatcataaataa

SEQ ID NO: 74349 - DNA, 1854 bp, Bacteroides fragilis str. 2-F-2 #5; identical to SEQ ID NO: 74341

SEQ ID NO: 74350 - DNA, 1756 bp, Bacteroides fragilis str. 3998 T(B) 4
acagtttagagtatttgatgatattactctctatttcaagaatggaataaatattctgataggagaaaataattcaggtaagactgcaattatagatgcgctgcgcatatgtctcggatgtgggaaaccagataattatatctacattcaagaaagcgatttgcatatcaatcccacagatccaactgaaagcaatactacaatacaatttgacctaacatttgaatttggagatgctctgattgaaaaagaatgtttctatgatttcatatcgcaagataaagaagatccagccaagcaaacaatacaattgcatttgaaattcatccaagaaaataatgggaagaaaaaatatttcaaacggataatatggggtggagataatgaaggacagcaagtcccttacgaatctttgcaagaaatattctatacctatttaagtccactaagagatgctgtaagctgtctacgtccttattcttacgacaataagacatctcaattatttaatcaacttacaaaatacaataaaggtgaggaagagattgagttaaatgaagaaagaaaagatttgctcgctaaaaacttgtaccatgtctttgaagatgatgcttcggactggaaacatattctaacaacaggaaaaagtaaggtcaatgcacatcttgaagggacgggaataactcgtaaacatcccaatatagaaatgcgttatgttggacggaaattttccgatgtggtacgaggggtcgaattaaaatgtccggtctacaaaacgatcgaggatggccaagaacaaaagtattttgaattgtatcaaaatggattgggtgaaaataatcttatttttacgtctgttgtgttaggtgaccttatcaatagatgcgaagataatgcactggaaatctataatgcattgcttgtagaagaacccgaagcgcatttgcatccgcaatatcaaaatacgttttttgaatatctgaatgaactacaaagcaaaggacttcaagtatttgtaacatctcactctccgacgattacggcgaaatcggatgttaatcatatttcagttttacaacgaaaacaaaacatcgtacaatcattttcatttggtagattaacggaaagtgattatccgattgagagcaaacggcatctgcgaaagtttttagacaccacaaaagctcagttattttttgctaacggtgtattattggtagaaggtatcgcagaagctattattataccaattctcgctaaaaaatttctctctgagaaaatagacttgtgtaaaagtggaatcgaattagttaatattggaggtgtcgcattcaatcattttgggttattattcaataatgatgatgagagaaagcgacttctgtcgagatgtgcgattattactgatagcgatcccaaagaggatggggatatatctgacagagcgcaaaatgcaaaggatttagagaaacataacctgaaagtatgtttggctcctcatactcttgaatatgatttattcgaacaatcggaacagaataaaaccataatgcgagatgtatatcgcaaacttcatcctcgaacggaaatattgaaatccgaatttgatgcacaaactttaatgcaatatttggagcagaataaagataaggctgaatttgcattgcaactttatgatcgattagaaaaagaagaagcgtttgacgtacctgattatatcaaggatgcgattttattcgtagctcccacagaataa

SEQ ID NO: 74351 - DNA, 1782 bp, Bacteroides fragilis str. 3998 T(B) 4
atggatgttcagttatcagcacaacaacaggcagttgtagattgcacagaaccgaggattgtcgtaaaggcctgtccgggaagtggaaaaacgttctctgtggctgcgcgtatggcaaaacttttacaagagaataatctgtcgcgacaccaaggaatagcagccctatcttttaccaacacagcatgtgaggttatacaaaaagaaattaaagagacattcggttacgcaaatataggctatccatcatttatcggaacgatcgacagttttataaatacgtacatatttctgccttatgcccatttagttatgggatgcgattgtcgtcctgaaatcatagggacagagtttaataaatggtttgattatgatccggctcaaacaagacatattagagataagttcggtagaaatattattacgttccgtgatgtcaattattatttcgatatcatatcgtttgggcttgatgaagaattattacggttagcaccatatcaagcataccattttggaaaggcggattgggaaaatccaaataagaaagatggttcgctcaaaaaaaatatatctgaattgatagaaatgaaatggaaacatttcaatgcaggtaaggttaatcaggccgatgcaacatattttgcatttaggatattaaatgaatatccatcaatagcacaaaatatagttcgtagatttccaatcctaataattgatgaagcccaagatacaactgagttgcaaatggcgataatcgacatattttctcgatatggagccaattctattatgttgattggagatcccgaccaggctatttttgagtggaatacggccaatccgcatttatttatggagaaatataatagtccggattggcattcattggatttatcagaaaacagacgcagctccgaaaaaatatgtcaattggctaatcgtttctctggaaatgcaatgagctcgatagcaagcgacaaagattacacagacgaaccatgtattaaaggtcatctcgacacgccggaatcagtaaatcaaattatgaatcatttcatcgaaaaatgtaatgagatgggattggatgaatctgaatatgcagttgtatttcgaggacaaaagtttggtgagacgaattttggattagtaaacaatgatagttcatcaaaacagaatagtccgtggataaacggacactatggcgttagagatattgtgtatgggaaatatttgattgatcatggaaaatacactgacggactatctcttatagaaaaaggctgctataaaatagcaaagcgagtacggtatgttcccgcaagtactatgcgaaaggaaatagcagaagttgggtttagaatacatagagcagaaatgtttgattttattcaaaaattaccttcaacgaatgatactctatctaattggattacggaacttcaacaaaagggcataaatctaactgttgattttggaaaggcgaatgtccgtattgaatcgctttttagaatagtaaatcatcaatttcggcaagagcgaccttacctgaaaacaattcattcggtaaaaggcatgacattggaggctattttagtatttctatctaaaaaagctgtccgcacgaactatgcaacgattttgaataatcctgcaaagtattctgttgacaataatgaggaactccgcattgtgtatgttgcatgtacacgacctaaaaagttattatggatagccgttccatcagacgatatcgattgctggagaaataaattgttctaa

SEQ ID NO: 74352 - DNA, 2205 bp, Bacteroides fragilis str. 3986 T(B)9
atgagaatatcttgtcttgaaatacaaaatttcagaaaattaaaatcttctcgaattgatattgcagatgatagaacgatatttgtcggggctaacaatagtggtaaaacttctgctatggattgtttgattttatttttcagagacaagaaaagttttactacacaagattttactctatccaattggagagaaatcaataaaattgaaaatgattacatagtctattctaaagaatcagatttagatgaaaacaagttatctatttctgcttggcaaccattcgtcccacaattagatgtgtggattaatgtggaagaaaatgagatacattacgtgaaccggattattcctacgttggattgggctagtgggaaattgggtattcgattaaggtttgagcctaaagatataaaaactctgtatacggattatactacagctaaatctacaattgaagaattaacgaaagatcgaagcaaaaaggcaacgaaattatggcctattcacttgtgggattttttacagaagaaattacacacatattttacagtcaatgcatatattcttgatcctagtaaatttgggcagggagatacgcctcaactactttcagaagataatatacctattgatttcgatccttttcaaggtttagtaaagattgacataattaatgctcaaagaggtttctcagaccctaatactcctgaaacgggtattagtaacttgtccagccaactacgtgaatactactcaaaacatataaatccaacagagactatagatgccactgacttggatgcattggaggcaattgaggaagcgaataaggcttttgacatacgattagaagctggcttttcctcctctctcgatgaattgagaaacctgaattaccctggatttggtaatccggaaataagcatttcaaccaaagtcagtccggttgatggactcaaacatgattcggcagtccttttcaatgttcaaaaaggggaaacagacgaacaatgcctaaggttatcggaaaaatacaatggtttaggatatcagaatctaatttctatgattttcaaactcattcgatttagagatgagtggatgaaagtcgggaaaattgccaaaaattcgactcatgagatagaacctttacatattattctggtggaagaaccggaagcacatttacatgctcaagtgcaacaagtgtttatacgtaaagcatatgatgtattaagaaatcatgctcgtcttaaagagaagaaagacttctgtacacaattaattatcagcacacattcaagtcacatcgcacatgaatgtgattttaagtctttgcgctattttaaacggaatattacccaaaaccaaattccgacttcaacagttataaacttatccaaaacatttggtgcggaagatgaaacaacaaaatttgcaaaaaggtacttgaaaacgacccactgtgatttgttctttgcagatgccgcaattctcatagaagggcaagcggaaagaatgctactacctttctttattaatcaagaatttccgaagctcgcttctgcatatatttcattgctggaaatcggcggaagtcatgctcatcgactaagaccactaattgatgatcttggtataatcaccttgattataactgatatagactctgttgatccgaatgcacataggagatcagttcgtcccgaaaaggggaaaaactacgtcactaatagttctacgttaaagcaatggactcctgctaaagaatctattgaggagcttgttgatttagcatcaactaaaaagcaatcctcaaatggcttggtgagagtcgcataccaatatggcactaaaatcacttttaaaaataaagtagtcactgtttatccctatacatttgaagaagcactagtttttgacaacattgatctattcaaatcaatgaagggagatggcttgataaagaaatattcggaagcactgaatgaatcgacaattaaagaatgtttaagaaaaatgtttgaagcattggataatgcaaaaaaggcagaattttctttgaatctacttttcattgatgacacgaaaaaaatcaaaactccaacatatatttcagaaggtctaaaatggctttcagaaatattagagaaaaacagcagtaactgtagtatgtcggtttcttcaaatgctataaaatga

SEQ ID NO: 74353 - DNA, 1899 bp, Bacteroides fragilis str. 3986 T(B)9; identical to SEQ ID NO: 72893

SEQ ID NO: 74354 - DNA, 1782 bp, Bacteroides fragilis str. 3998T(B)3
atgtatttgagtagtttgcatatcagacagtttagagtatttgatgatattactctctatttcaagaatggaataaatattctgataggagaaaataattcaggtaagactgcaattatagatgcgctgcgcatatgtctcggatgtgggaaaccagataattatatctacattcaagaaagcgatttgcatatcaatcccacagatccaactgaaagcaatactacaatacaatttgacctaacatttgaatttggagatgctctgattgaaaaagaatgtttctatgatttcatatcgcaagataaagaagatccagccaagcaaacaatacaattgcatttgaaattcatccaagaaaataatgggaagaaaaaatatttcaaacggataatatggggtggagataatgaaggacagcaagtcccttacgaatctttgcaagaaatattctatacctatttaagtccactaagagatgctgtaagctgtctacgtccttattcttacgacaataagacatctcaattatttaatcaacttacaaaatacaataaaggtgaggaagagattgagttaaatgaagaaagaaaagatttgctcgctaaaaacttgtaccatgtctttgaagatgatgcttcggactggaaacatattctaacaacaggaaaaagtaaggtcaatgcacatcttgaagggacgggaataactcgtaaacatcccaatatagaaatgcgttatgttggacggaaattttccgatgtggtacgaggggtcgaattaaaatgtccggtctacaaaacgatcgaggatggccaagaacaaaagtattttgaattgtatcaaaatggattgggtgaaaataatcttatttttacgtctgttgtgttaggtgaccttatcaatagatgcgaagataatgcactggaaatctataatgcattgcttgtagaagaacccgaagcgcatttgcatccgcaatatcaaaatacgttttttgaatatctgaatgaactacaaagcaaaggacttcaagtatttgtaacatctcactctccgacgattacggcgaaatcggatgttaatcatatttcagttttacaacgaaaacaaaacatcgtacaatcattttcatttggtagattaacggaaagtgattatccgattgagagcaaacggcatctgcgaaagtttttagacaccacaaaagctcagttattttttgctaacggtgtattattggtagaaggtatcgcagaagctattattataccaattctcgctaaaaaatttctctctgagaaaatagacttgtgtaaaagtggaatcgaattagttaatattggaggtgtcgcattcaatcattttgggttattattcaataatgatgatgagagaaagcgacttctgtcgagatgtgcgattattactgatagcgatcccaaagaggatggggatatatctgacagagcgcaaaatgcaaaggatttagagaaacataacctgaaagtatgtttggctcctcatactcttgaatatgatttattcgaacaatcggaacagaataaaaccataatgcgagatgtatatcgcaaacttcatcctcgaacggaaatattgaaatccgaatttgatgcacaaactttaatgcaatatttggagcagaataaagataaggctgaatttgcattgcaactttatgatcgattagaaaaagaagaagcgtttgacgtacctgattatatcaaggatgcgattttattcgtagctcccacagaataa

SEQ ID NO: 74355 - DNA, 1782 bp, Bacteroides fragilis str. 3998T(B)3; identical to SEQ ID NO: 74351

SEQ ID NO: 74356 - DNA, 2046 bp, Bacteroides fragilis str. DS-208
atgtatattaaggagattaaaatttcaaacttccgtaattttagggatgcttcggttcccttccatgaaggagtgaatgtcataataggtcataataatacaggtaaaagtaacttgctccgtgcaatggggttagtgcttggctatagtgacggtcatagattgtgtacaagtgacttattttatgaaacagatgtgacaaaacttcaacagcaatcaccacgtatccaaataactcttgttctccgtagaagtgagggtgaggccttggattctgtagaaatgggactgttctccggtatgatggttgatcctgcattaagcgaagaagctgaattgagatacgagtttaaattggctgattcgcaagaggacaactataaggcagatgttgctattgcaactacagctaaggagatctggaaaatcatagatcatgactacatcaggctctataggagcagtcgctcaggtggtaatcaggcagcaggtatcagcgttaatgatactttggggcagattgacttccagttccttgatgccattcgtgatgtcagtcacgacctatacgccggttataatccgctccttagggatgtgctgaacttcttcattgattactcggttaagaatgattctacaaagacagaggatgagataaaggaacaattgaaaaccctaagagatgattttgtccaacaatctaatccactgatgcaaactttacaaaataggttacagaatggtaaaaatgtgtttctgaagtacgcactcgacacaggcgcaacattcaacggtgctgtgcctgattttgatggaacggtgacggaaaatgagatgtttgcggtgttgagaatgattatcaagtatgctgttggcatagaagtacctgcgacttataatggtttaggctataacaatctaatctatatgtcgcttttgcttgcaaggatgcaggcggacagcagcatcacctatatgaaacgcaatgccaaggtactctcattccttgctgtagaggaatgtgaagcacatctgcatccagctatgcagtataagtttctacagtttctacaggacaacaatgcaaatggacatgtacgccagatattcatgacctcacattctacccaaattgcctcagccgtgaaactggatgacttgatctgcttaacttcacccgtattaggacagatccatgttggctatccacgtgtcatttataaagaagataatattgatgatgtgacatccaagctatatgttcagagatttctggatgcaaccaaagcggatatgttctttgccaaccgattgatattcgttgagggcgttgcagaggagttgttgctcccagtctttgccagatatttgaataagaatcttacagatgagcatgtgttggtggtgaatatgggtggtcgctatttcaaccacttcctaaaattgtttgatacgaacaatccatacaccatcaacaagaagattgtctgcttgactgacattgatccctgtaggaaaaagaatgaacctgacgaggattatgaagcctgctacccatacgaatacaatatagatacagctaactacgactataagcatcatgcagatacagaggtagctcaatatgcagcccatccaaatattcggttctataggcaagatgtaacatatggaaaaacgctggagtatgacataatgcgtgagaatcccgattgtgaactgttgctgactaactccgtttccaatttgaaggagataaaagctatgatggcagaacaggatatgaacaagatgatgagtaaaatgcgaaatagtgaagcaaatacacgtatcaagacatccataggtgcatcgaagtggacggatgaagagaaacgaaaagctctacttgcatcacgctatttgaactctgtttcaaaaggcagcaatgcgctggaactaaacgtggtacttatggctaatctagataaacctgtagcagatagaaaaaagttccatgtaccccaatatattgttgacgcattaacatggctattatcataa

SEQ ID NO: 74357 - DNA, 1662 bp, Bacteroides fragilis str. DS-208
atggctattatcataacatcagaacaaaccatacctatagacgaaccgtttaaggtgtgtgctggtcccggtgcgggaaagacgcattggctgataaatcatatcaagaatgtggtgtcaaacagtcacaaacttgatattgttaaaaaagtagcttgtatcacctataccaacgtgggtactgatactatcacctcacgtttgaatattgggaatgacgtggttgaggtatgtaccatccacagtttcttgtatgccaatgtggtaaaaccctacgttcatttggtagctgaagatttcgaattgaagttagatgaacttgtagtgatagatgattctaattttaaatcagaaggaacagctaaaatcgtactaaaccgtattggtaggtcatggttagatgccaaaatctatttgaaaggattggagagtgcaaactggcgttatgaaaaccatgagtacaaacattacaaacccaattacccacaggtttattacactaagagtggcaagcggtatgtgggcaatgactggtatatggggttcaaaagatggctctggagtggaggttatatgtcttttgatgacattttgtatttctctcatattctgctttcaagatacccaaacatatataaattaataaaagctagatatccgtatatttttgtggacgaatttcaagatacaattccttttgtagttgatttcttgacactattaggcaatgatggggtaattattggtgttgttggcgacaaggctcaatccatatatgactttcttggtgctacagtgcagcaatttgacaattttgctttgccagagatgcaagagtttgagataagaggaaataggcgtagcacaaagcagattatagaattgttgaatattgtccgaactgatttttcacaagactggctgaatggagcagaaggaatggtgcctgaattgcttgtgggcgatatgctaaattgttatcaacagagcatagaaaaaagtgggactgacgaaatacaatctcttgcctttcaaaacgtacttgctaattcgatgcgtaataagaatgggatgcgcaaggcagagaaaatattagagatggattttgacagcaatgtcgagcgtcagatggtgataaaggcgttgataaaagccgtggaatacacaagaatgaacgacttgcgaaatgcttggcatcagttagacattatagatcgcgaaagatcactaactatcgtgcttctaagacacttgctgaatggctataaggattacaaaaacggaagcatgatggatttctacaattttctagtgaatgatttacatgtcaagatgcctaagataaaaaagaagacaatcaaggatttctacatgaaccatacatatgccgatgctgcccttggggtgaagtatggtgattcaaacgacaagcataagactatccataagtcaaaaggagaggagtatgataacgtgtttgtcgttctgaaagaagaagatgacatagagttcttgctaacaccagacctgaatggcaacaatgcgcatcgcgtatattatgtagctgccagtcgtgcgattaaacgattgtttatcaatgtacctactctaagtgcagaaaaccgaatcaagtttgaaggtaaacctattaatatttcataa

SEQ ID NO: 74358 - DNA, 1827 bp, Bacteroides fragilis str. 1007-1-F #4
atgtatctatctgagctaaaactttggaattttagaaaatttagtaaaaatgacggaacaatagaatttgattcgccacatttggtagttccttttaagaaaggaattaatatcttaatcggagaaaatgattcaggaaaaacagcaataattgacgctattaaattggttttacgtactcatgctattgagtggatacgtgttgaagaaaaagattttcatgaagctacagactctatgagaattgaacttgttattagtgatatgtctgaaaacgaggcatccatttttacagaatggttaagttgggataataaaacatctaagccatatcttcgcttaatatacgctgcaaatattattaatggacagattattcctggagatgtctcggctggacctgatgcaaatggtaaagttttggcttttcaagctcgtgaataccttaaaactgtatatttaaaagcattgagagatgcaagtatagaattaactgcaaagaagagttctagagtttcacagattttacaaggtcataatttatttaaagaggaacctggacaagaacatccatttgtgacatatgttaaatcagcaaacagaagcattaatagttggtttaatgatgagctacaagcattaggaaaagatggtttaccaattcttgggacaagtaataaggagcaaataaaagataagatagattcatttttacatgcttttattaattctaatataaatagcagccttacaattacggaacctaaaatacgtaatatactagaaactatttctattgttatagaattcgcacaaaatatggggctaggcactatgaataggctatatatggcgacagaactgcttcacttaaataaagagtgggatggtctaaaattatgtttaatagaagaactagaagcacatttacatcctcaagcgcaaatgaaagttatttctgctttacaatgtcagaaagtacaattcatcatgtcaactcatagtccaaatattgcatctaagataaaaatttcggataaagaaaacacaaacattattctatgttatgattctgacgtgtatccattgaatactgatacgaccagacttgatgaagatgactgtatattccttgatcattttttagatgtaacaaaatcaaatttgttttttgcaaaaggagttattattgttgaaggttgggcagaagaattattgatacctgtaattgccaataagttaggatataatcttaccaataaagaaatttcaattgttaatgttggttctactgcatatataagatatgctaatatttttataaggactgacggaaagatattaaatatgccaataagtatagtaacagatctcgatgtcagtccggaaaaaataaaaaaagaagaggtagagcttgatacaattgaatattcagaaatcagtcacgaagtggagttggaaaagtctaagaaaattttagatagtcttgctttgcccgatgaatcaaatgtcaaaattctcatttctccacattggactttagagtggtgtttatatctttccagcacattaaatgaatgttttaaggagtgtgtatctaaagtccattctaaaactgaaggttttaaaaaaaataaagctgggaaatatgatgaagaaaaattcaaaactacattaataaagaaacttaaagatcgaactttagataaagtagctattgctcatgaattatgtcagcaaatatgttcgttggacaccttagccatacctgaagatgatagtatatattatttagtggaagcaattaaacatgtatctaaagtatga

SEQ ID NO: 74359 - DNA, 1953 bp, Bacteroides fragilis str. 1007-1-F #4; identical to SEQ ID NO: 74347

SEQ ID NO: 74360 - DNA, 1770 bp, Bacteroides fragilis str. B1 (UDC16-1)
atgagcctttcagaaactacggtactgaccggcatgaataatgtcgggaaaacctctgttttaaaagctctacagctgttgtttggaaatagctcgttcctttcaacagaagatttacacattgacaagaacggcaaatcaaattgtatcattgttgatgccaaaatagtagcaattgataatgctggaaaacgtatcccaaatttctcagatgtatgggaaattgcatttggtgcggataatataaaaatggatgctgaagaacacgcctatgtgcctttgcgtgttaaatacacttttcaaacacttcagaattcatttaatagggatatgcaaatcttgaatgaatgggactctgcaggcatcgcttggcaagatttgaaaggtaaaaaatccactgttaagggagattattttcagttccactatttggatgctaaacgagatattcaggatgatttaaaagccagaacctcttatttaggtaaaatgcttggtgatgtagttagcaattatgacccgaaagatgttgctgaattagaacaaaaaataagttctttaaatgcagaagccatagaaaagagtgatgtgcttaaaaatattcaggaatcactaaaagggattgacgctacaatggactcttcgggcaaggtctatgtttcaccttttgctaagaaattgcgagatttgaacaaaagcttgacgattcattatggaacggaggatagtagttttacaatggactatcatggcatgggaactaggagttggtcttccatgttgtcgtttcgggcttttgtaaagcaaatgtgcgatagcaagaagccggaagacgaggcttttttgccgattatagctatagaagaacctgaagcgcatttgcatccgaatgcacagaagcaactctacaaacagatgaacgaaatgccgggcattaaaataatctcaacacattctccgtatgtggctgcatgtgcggaattgtcagagctgagaggtatgtataaagccgcagagaagactatttgtggaagtttgcccgttgcagaactaacaccagagaaaaaaaaaaaaatcagaaaagccgtattgacgagcaatggcgaactgttgtttgccaaaggtattgtgttgggagaaggtgaaacagaagtacaagctttacctattttctgccagcaacattggggattgactcccgttgagtccggtctgtcgtttgtcgatgcaaaggggtgtggtaattattatccgtttgtcgtccttgctgatgcgttcaaaataccttggtacattttctcggatggtgaagcaaaagcccaaaaagaactcaaaaaacttttggaaaggatctataatgaagataaggaactggcagaacagaagaatattttcctcattcccgatgaaaaggattttgaaggaatgctccttgacgatgggtataaggatgaaatagaaaaagctatagaacaattgaaaggagaaggctatattgataaatttattagagaaaataatcataagcctaagaaacgagaaaagacttctaaagtgtgtgaaagttgtcatcagaatatttttgttgatatagaacgaatatatgataatgaagatggccgactgacagctttggatgatataatggagaaaaacaaggcccagttaggtccggtgttggcaaattgcataattgaaagcggaaaaacattacctccattggtaattaaactatttgatggaataaaaaaggacatatgccatgtgtaa

SEQ ID NO: 74361 - DNA, 1857 bp, Bacteroides fragilis str. B1 (UDC16-1)
atgtgtaagataaagttatcttctaaacaacaagaaattgcatcattgaaagatggcgcaattttagtacgtgcaagtgccggtagtggcaagacaagagtacttgttgagcgtataaagatgttggctggtatgactaaacgtaaggttctggcgattacgtttaccaacaaagcttgtgaggagattagaacaagacttgcggaagtggatgaaaatctgctggaacatgtttttgttgcaactttccatggtctgtgtgagtcaatcattgaaagccatatcgccgctacaagatttgtgacaatgccgcaaatctttgcagatgacgacagaaaaaaaattttggaagaaacaattacagaaactccatcattgagccagtggtatagggggctgaatgataaagaacgtagggaaactctttatcgggcattggataatatcagtcttataaaacggtctgtgattttagatgatgaactgtctaaggttattaaagatggacagatgcgtaatctatatttaagttatagagagcagatggattcgctaaacgcaattgattttgatgatttgttgcttaatgcttaccaattactgatacataacccaagaattgcagacttatatcgaagaagttttacatacatttgtgtggacgaggcacaggatttaaacaaggctcaatacatggttcttcgtgcgattactggtagcgagcataagaacgtaatgctggttggcgacaccaaacaatctatatatgcctttaatggatcaagcagtaaatatatggatgattggtttgtgaatgactacaccccgaccatatataacctaaatgagaattatcgaagtgctaaggcgattttggattatgcacaaaaggtagtgcatgatgacaccttagatgtaaccttaccttatacgggcgtttgtaaggaatatgcttatgatacaccatgtgaggaagcgcaagaagtagtaagtggtataaaatcattggttggtactgaaatagaaggttatgacgggaaattgagctattctgatattgcagtacttgctagaaataaattcgttcttggaaagattgaagaacaattaaagagtagtaacttgccatatcattataaaactacgggagcaggtctggaatttgcatccactgctgctaaagcctttgatttggctatggtagtacgaaccaatccctatgatagactgcatcttgatatgttgcagtctatagtaggcgtgagccattgcaaatcattagaacaagtcgtagaaagtattagcgatgcattcttgaaagaagtcgtgcagcaagcctcactattggaagatgatggtagtaatatgtatcaaaccatcaaatctgtattgaatactttaaaagcctctaatgcttcggaatttaaatcaacagatgaagctttggctgtttttgatgaatttgaattattaaaacatcattggagctcttatgctaagagtgtaacaaactattctttgtctgcttttcgtaatgcaatgtcgttggggcaaacttcggttgcttctttggatgtagaaggggttacattgagtacggttcacactatgaaaggtcaacaagctgtagtagtattccttgtgggtatggatgagggtacattccccgattaccgtgctataaaaaaagggaacaatagcattgaaatgcaacaagagaaaaataacctatatgttgcaattactagagctcaaagacatctttatatttgttaccctcaaaaaagaaagatgccttggggcgattggtctccaagaaaaaaatctagtttgcttcccaaacaaacgattgtataa

SEQ ID NO: 74362 - DNA, 1827 bp, Bacteroides fragilis str. 1007-1-F #10; identical to SEQ ID NO: 74358

SEQ ID NO: 74363 - DNA, 1953 bp, Bacteroides fragilis str. 1007-1-F #10; identical to SEQ ID NO: 74347

SEQ ID NO: 74364 - DNA, 2046 bp, Bacteroides fragilis str. S24L26
atgtatatcaaagagattaaaatttcaaacttccgtaacttcaaggatgcttcggttcctttccatgaaggagtaaatgtcataataggtcataataatacaggtaaaagtaacctgctccgtgcaatggggttagtgcttggctatagtgacggtcataggttgggtacgagtgacttattttatgagacagatgtggtaacacttcaacagcagtcaccacgtatccaaataacacttgttctccatagaagtgagggtgaggccttggattctacagaaatggtgctgttctccagtatgatgactgatcctgcattaagcgaagaagctgaattgagatatgaatttaaattggctgatgtgcaagaggacaactataagacagatgttgccaatgcaactacagctaaggagatatggaaaatcattgatcatgactacatcagactatatagaagcagtcgttctggtggtaatcaggtagcaggtatcagcgtcaatgatgctttggggcagatcgatttccagttccttgatgccattcgtgatgtcagtcatgatctatacgctggttataacccactccttagggatgtactgaatttcttcattgattactcggttaagaatgattcaacaaagacagaggatgagataaaggaacaattgaaaaccctaagagatgattttgtccaacaatctagtccattgatgcaaactttacaaaatagattacaaaatggcaaaaacgtgtttctgaagtacgcactcgatacaggcgcaacattcaatggagctgtgcctgattttgatggaacggtgacggaaaatgagatgtttgcagtgttgagaatggttatcaagtatgctgttggtatagaagtaccagcaacgtataatggtttaggctataacaatcttatctatatgtcgcttttgcttgcaaggatgcaggcggacagtagcatcacctacatgaaacgcaatgccaaggtactctcattccttgctgtagaggaatgtgaagcacatctacacccagctatgcagtataagttcctacagtttctacaggacaacaatgcaaatggacatgttcgccagatattcatgacctcacattctacccagattgcctcagcagtgaaactggatgacctgatttgcttaacttcacccatattaggacagatccatgttggctatccacgtgtcatttataaagaagataatattgacgatgtaacatccaaacaatatgttcagagatttctggatgcgaccaaagcggatatgttctttgccagcagattgatattcgttgagggcattgcagaggagttgttgctcccagtctttgccagatatttgaataagaaccttacagatgaacatgtattggtggtgaatatgggtggccgctatttcaaccacttcctaaagttgtttgatacgaacaatccatacaccatcaacaagaagattgtctgcttgactgacattgatccctgtaggaaaaagaatgaacctgacgaggactatgaagcctgctacccatacgagtacaatacagatacagtcaactacgactataagcatcatgcggatacagaggtagctcaatatgcaacccatccaaatattcgattttataggcaagatgttatgtatggaaaaacgctggaatatgacataatacgtgagaatcccgattgtgaactgttgctaactaactctgtttctaatttgaaggagataaaagctatgatggcagaacaggatgtgaacaagatgatgagtaaaatgcgacatagtgaagctaatactcgtatcaagacatccataggtacatcagagtggacggatgaagaaaaacgaaaagccttacttgcatcacgttatttgaactctgtttcaaaaggcagcaatgcactggaactaaacgtggcgcttatggctaatttggataaacctgtagcagatagaaaagagttccacgtaccccaatatatcgtagacgcattaacatggctattatcataa

SEQ ID NO: 74365 - DNA, 1548 bp, Bacteroides fragilis str. S24L26
gtgtcaaacagtcgccaacttgatgtggtgaagaaggtagcttgtattacctataccaacgtgggtaccgataccatcacttcacgtttggatatggggaatgatgtagttgaggtatgtacaatccacagcttcttgtatgccaatgtagtaaaaccctatgttcatctaatagctaaagactttggactgaagttggatgaccttgtggttatagatgactcaaattttaaatcagaaggaactgctaaaatcgtattaaaccgtattggtaagtcatggttagatgccaaaatatatctgaaaggtttgacgagagccatgtggcgttatgaaaaacatgagtacaaacattataaacccgattacgcacagacttattacataaagggtggcaaacggtatgtgggtaatgactggtatatggagttcaaaagatggatatggagtggagggtatatgtcttttgatgacattttgtatttctcttatatcctgctttcgagatatcccaacatatacaaattgataaaagctaaatatccatatattttcgtagatgagtttcaagatacaattccttttgtgattgacttattaacccaactaggtaatgaaggggtgattgtgggcgtggctggcgacaaagctcaatcaatttatgactttctcggtgctacggtgcagcaatttaataattttgttgttccaggtatgcaggagtatgagatacgagggaataagcgtagtacaaagcagataatagaattgctgaatattatcaggactgatttctcgcaagactggctgaatgggacagaagggatggtgccagaattgcttgtaggcgacatgcttaattgttaccaacagagtatagaaaaaagtggaactgacgaaatacaatcgctggcctttcaaaacgtacttgccaattcgatgcgtaagaagaatgggatgcacgaggttgaaaaaatattagagatggattttgacagcaatgtggagcgccagatggtgataaaggcgtttataaaagccgtggaatatacaagaatgaacgacttacgaaatgcttggcatcaattagacatcatcaatcgcgataggacaataaccattgtggctctaagacgcttgctggatggctataaggactataaagacggaagcctgatggatttctacaattttatggtgaatgatttacatgtcaagatgcctaagataacaggtaaggcaattaaggagttctacgtgaaccatacatacgccgatgctgcccttggtgtgaagtatggtgattcaaatgacaagcataagactatccataagtcaaaaggagaagagtatgataacgtgtttgtcgttctgaaagaggaagatgatatagagttcctgctgtcaccaaacctgaatggcaataatgcgcatcgggtatattatgtggctaccagtcgtgctattaaaagattgtttatcaatgtacctacgctgagtgcagaaaatcgcattaagtttgaaggtaaacctattaatattccataa

SEQ ID NO: 74366 - DNA, 2199 bp, Bacteroides fragilis str. S38L3
atgcgtatcaatcatgtacatatacgaaatttcagaaaattgagaaattgtcgtattgatttcgatgagaatcaaacaatctttgtaggagctaataatagtgggaaaacatctgctatgagtgctattatatggtttttaaaaggaaaagatagatttacaactagagagtttactttaactaattggataaagataaacgaacttgcagataaatggcttatatctgatgaagtagatcccttgttactgacccccaatcaatgggatgatattgttccgtcacttgatatttggatagatgtaagcgaatctgaagcttaccaagtatataaaataataccttcacttacatggaagaaagattcagtaggagtacgtttgcgttttgaaccaaaagatattaagtctctttatgcggattacaaaaaagaggttatgaaagtacgtagtttacaggattctcctgaatataaagagacaaaaaatttaaaactttatcctcaaaatatgtgggattttttaaatcataatcataatttattagcttatttcaatatcaaatattatgtgcttgattcagaaaagataaatcacgaattggagtctgaggtacaagttacccctgatgattctctcgaagaaaatccgttagtggacttaattcgtattgatagtatagaggcatttcgtgaattctccgatcctatggggaaaaatgaaagtgatatagatacactttcaaaacaattacaggcatactaccgtcaaaactatactgatgagactattatagagacgggagatttgaaattaatggaagaattatctagggccaatacctcttatgatttgaagttacagaaaagtttctctatgccaataggtgaactatccaatataaattatccaggattccaaaatccttctattagtattaggagtaatgttaatattgttgattctatttctcatgattcgtcagtacaattctctatacaaggtaaaccagaattatcacttccagagaagtataatggattgggattgagaaatctcatttctatatatctaaaacttatccaatttcgggaacaatggacgagaaatagcaaaaatgaagaagatgtgaaaaaatcaatagaacctatacaccttgtttttatcgaagaaccagaggcacatcttcacgcccaagcacaacaagtttttatacgaaaagcattagaggcactgactaatgctgctgaaaataatgcattgaaagaaaatcccaatcttactactcaattaattgtgagtacgcattctaatcatatagtaaacgaagtagacatgaactgtttgcgttatttcagacgtgttttagacgaaatcattggtataccggtttctaaagtcgttaatatgtcccgaacatttggagaaaatgaaaacgatacaaaaaaatttgtaactagatatattaaacttacgcattgtgacattttctttgctgatgcagcaatactcgttgagggggcagcagaaagaattcttatgcctcattttattaagagggaaggtatggataattattatatttctgttatggaaataaatggaagccatgcacatagatttagcagccttttaaaaaagctcaatattttgacagtaatagtaactgatattgatgctcagcaagaagtggaagaagatggtaagaagaaaaaaaaatctagccttccccaaagaaggcaaagtcaaacgaccaataacgatactataaaacattggattggaaaggatgaaatagatgatttattagaattaccagagacagataaaataaaggataatgtacatgtagtctatcagactggagttgatgttgtgtggattaaagagaaagaaacgatatatccatatacttttgaagactcgttaattttcactaatcttgatttgtttcgtggagatgagaagttgaaaaaacttggtacggttactactttttataattatttgcatagtataaaggacttgaaaacattccatatgaagatctttgataagttagaatcttcttccaatgtaaaagctgaatttgcaaacacattgttgtatgcggaacaatttgaggcattacagactcctgcctatattagagaggggttggaatggctaaaatcatattttgaatttaatcataaataa

SEQ ID NO: 74367 - DNA, 1854 bp, Bacteroides fragilis str. S38L3; identical to SEQ ID NO: 74341

SEQ ID NO: 74368 - DNA, 2046 bp, Bacteroides fragilis str. S38L3; identical to SEQ ID NO: 72686

SEQ ID NO: 74369 - DNA, 1662 bp, Bacteroides fragilis str. S38L3; identical to SEQ ID NO: 72687

SEQ ID NO: 74370 - DNA, 2046 bp, Bacteroides fragilis str. Ds-233; identical to SEQ ID NO: 72686

SEQ ID NO: 74371 - DNA, 1662 bp, Bacteroides fragilis str. Ds-233; identical to SEQ ID NO: 72687

SEQ ID NO: 74372 - DNA, 2034 bp, Bacteroides fragilis str. 2-F-2 #4
agagagtttactttaactaattggataaagataaacgaacttgcagataaatggcttatatctgatgaagtagatcccttgttactgacccccaatcaatgggatgatattgttccgtcacttgatatttggatagatgtaagcgaatctgaagcttaccaagtatataaaataataccttcacttacatggaagaaagattcagtaggagtacgtttgcgttttgaaccaaaagatattaagtctctttatgcggattacaaaaaagaggttatgaaagtacgtagtttacaggattctcctgaatataaagagacaaaaaatttaaaactttatcctcaaaatatgtgggattttttaaatcataatcataatttattagcttatttcaatatcaaatattatgtgcttgattcagaaaagataaatcacgaattggagtctgaggtacaagttacccctgatgattctctcgaagaaaatccgttagtggacttaattcgtattgatagtatagaggcatttcgtgaattctccgatcctatggggaaaaatgaaagtgatatagatacactttcaaaacaattacaggcatactaccgtcaaaactatactgatgagactattatagagacgggagatttgaaattaatggaagaattatctagggccaatacctcttatgatttgaagttacagaaaagtttctctatgccaataggtgaactatccaatataaattatccaggattccaaaatccttctattagtattaggagtaatgttaatattgttgattctatttctcatgattcgtcagtacaattctctatacaaggtaaaccagaattatcacttccagagaagtataatggattgggattgagaaatctcatttctatatatctaaaacttatccaatttcgggaacaatggacgagaaatagcaaaaatgaagaagatgtgaaaaaatcaatagaacctatacaccttgtttttatcgaagaaccagaggcacatcttcacgcccaagcacaacaagtttttatacgaaaagcattagaggcactgactaatgctgctgaaaataatgcattgaaagaaaattccaatcttactactcaattaattgtgagtacgcattctaatcatatagtaaacgaagtagacatgaactgtttgcgttatttcagacgtgttttagacgaaatcattggtataccggtttctaaagtcgttaatatgtcccgaacatttggagaaaatgaaaacgatacaaaaaaatttgtaactagatatattaaacttacgcattgtgacattttctttgctgatgcagcaatactcgttgagggggcagcagaaagaattcttatgcctcattttattaagagggaaggtatggataattattatatttctgttatggaaataaatggaagccatgcacatagatttagcagccttttaaaaaagctcaatattttgacagtaatagtaactgatattgatgctcagcaagaagtggaagaagatggtaagaagaaaaaaaaatctagccttccccaaagaaggcaaagtcaaacgaccaataacgatactataaaacattggattggaaaggatgaaatagatgatttattagaattaccagagacagataaaataaaggataatgtacatgtagtctatcagactggagttgatgttgtgtggattaaagagaaagaaacgatatatccatatacttttgaagactcgttaattttcactaatcttgatttgtttcgtggagatgagaagttgaaaaaacttggtacggttactactttttataattatttgcatagtataaaggacttgaaaacattccatatgaagatctttgataagttagaatcttcttccaatgtaaaagctgaatttgcaaacacattgttgtatgcggaacaatttgaggcattacagactcctgcctatattagagaggggttggaatggctaaaatcatattttgaatttaatcataaataa

SEQ ID NO: 74373 - DNA, 1854 bp, Bacteroides fragilis str. 2-F-2 #4; identical to SEQ ID NO: 74341

SEQ ID NO: 74374 - DNA, 1137 bp, Bacteroides fragilis str. 3719 A10
atgctattacaaaaaatctatataaaaggctatcgtaatttcaaagaggttacagtcaatttaaataaaaatagtcttgttataggagcaaacgatgtgggtaagacaaacctgattcatgctatgcgtttgcttttagataagggcttttcagattatgactttgaattgaatgattcggatttttatgcgtatgaagatacacaagaggtaatcattaggatatatttcactgatgtgacagatgagtgcgttattgcaaggatgcctggcaagtatagcgatgccggtgagatggtgatacaatataaagcagcgaaggagaaaggcaaagttaattaccatttctattgtggtaagagtgataatgagacggatttaactgaaattgaaggtccttggtatagacgattcttgaatttgaaatatataagtagtagaagggatttttggggatatatcaacaagtcgaagaatatgcttttaaatcaggcaaaagataatagagaatccgaaattattgaacaagatgatgctttgtatgacgatatagcagaaaaacttcaatatgttgataaaaaaattccagagttgtcgtatgtaaagaatgctacagatcgtctgaatgaagaacttgacaaattgtccatacacaacagggagcaaaggatcgtgtttgatacttcgacaacagaaatagacagagtgattaatagcgtgtcgctggcctcaaaatatggagacaaaagtatgataattggcggagagggtagaatcaatcaaatctatctttctctatgggcaacacaaaacgaaaattcagagttggcgaacgaagtgtctatcatctgtattgaggagcctgaagcctatcttcaccctcatcaacagcgtgggcttgctgcttatttgagcaaaactttaaatggtcaaataatattaaccagccattctccattcatcgttagtgaatttagtccaaattctatcattaggctttataaaaaagaggataataaaaccatagtagcttcagatggatgttcgaaaataattgaagatggaatagatggcttggggtacagaatgagtgtaattccagccgaggcttttttgctgactatgtcattcttatag

SEQ ID NO: 74375 - DNA, 1644 bp, Bacteroides fragilis str. 3719 A10
atggaacctacacccatccagcgtaatatcatccaagaagaaggaaatactgtagtgcttgctatgccgggcagtggtaaaacctttgtgctttcagagaaaattaggcgaatattagagtctgatgtcttaaaagattatcaaggtgttattgcgatttcttatactcgtaaagcttcaggacatttgaaacgtaagactcttcaaaatggcacatgggagaaaaattcattctttggaacgatagatagcttctgtttgacacagattattctgcccttcggacattatgttataggatatccgaaggaagaagttgtgccaattacagagaatgatttagaaaaggacaaaatggtagattttgaatggataaataagatacatccggattatgaagagataaatgaggctgtttgggagaatctttatgagttattcaaggaagggaaagtattggtcagttcgttagaacttgtggccttacacattattaaaaattgtcctgcttgtagggctcatttgaaagcacggtttaagtatgtgttcatagatgaatttcaggatgcagatacttatacgaatggaatatttcttgaacttatagggctggggttaatcggaaatgcagtaggagatgtgaatcagtcgatttttggttttgcacataaagtgagtgattatttagtcgcacttgaaacaatggaaggatttacatcttataagttggcagagaactttagatgttcaatacccattgtgaactattcaaacagacttcttgatgcaaactgtcagttgttggaatgtgaaggggaaatgggtgtagaacatatcgcagtgaatggtgatgaagaaatagtggccgaatacctagacaatacgataattaatgattgtaagaaatgggaggtaacagatttcagtcaagtggcaattcttgtgagaagcacaaagatgcaggaaatgatagatgggtatttggatatacctcatagggttgtgatttcaactccgttagatgatgatttgaatcctcgatcacatctttttgcgcagttattgcaatactattttgatgagggaatgccatttatgtcggtggtagattattatatggactttgcacttttgtcatcatgcgctcgaaaacgacttcttggaatccgtgatgagattaggtcggtaaataaagatgatatgatagatgcgttgccaagactattcaaaaacattgcaaacattttgttgcctaaatatcaagagggtagctcgataaaacatttgaactcggtgctgaattctaaggactggatagatagctatagatcattttcagctaatgaggtggtaattatgaccttgcataagtcaaagggattggagttcgatattgtctatcatcttaacatgaatgaatttgagattccattcaagcaatataagaatggagttgcctgctatcctaatgaggcgcaagatttagatttgcattatgtaggtgtgaccagagcaaagaaattgtgtgtgctggtgagtaattccacaaggcacaactctaaaggtgaggcaaagaaaggggagccgtcaatttttctaagtagaaacggggttgaggcattaagaaacaattattattactaa

SEQ ID NO: 74376 - DNA, 1827 bp, Bacteroides fragilis str. 1007-1-F #9; identical to SEQ ID NO: 74358

SEQ ID NO: 74377 - DNA, 1953 bp, Bacteroides fragilis str. 1007-1-F #9; identical to SEQ ID NO: 74347

SEQ ID NO: 74378 - DNA, 1782 bp, Bacteroides fragilis str. 20793-3; identical to SEQ ID NO: 73752

SEQ ID NO: 74379 - DNA, 1782 bp, Bacteroides fragilis str. 20793-3
atggatattcaattatcagcacaacaacaagctgttgttgattgtaacgagccgagaattgtcgtgaaagcttgtccgggaagtggaaagactttctctgtggctgcgcgtatggcaaaacttttacaagagaataatctatcgagacatcaaggaattgcagccatatcttttaccaacaccgcatgtgaggttatacaaaaagaacttaaagagacattcggttgtcgaaatatagattatccttcatttatagggacgattgatagttttataaatacgtacatatttttgccttatgctcatttagtcatgggatgcaattatcgtcctgaaatagtaggaaccacgtttaacaaatggttcgattatgatccgacccaaacaagatatattagaggtaagctcggtgaacgaataattacatctcgtgatgccaactactatttcgatctcatatcgtttgggcttaatgatcaattattgcgattggccccatatcaggcatatcatttcggaaaagcagattgggataatcccaataagaaagatggttcacccaaaaaggttatatctgaattgaaagaaatgaaatggaaacatttcaatgcaggcaaggtcaatcaggcagatgcaatatattttacattcagaatattagataaatatccttcaatagcacaaaatattgttcgtcgattcccgattttaataattgatgaagctcaagacacaacagagttgcaaatggctataattgataaattatctcagtgcggagcagaatctattatgttgattggggatcctgaccaagctatttttgaatggaatactgccaatccacatttatttatggagaaatacaatagtccagattggcattcattagatctgtcggaaaatagacgtagctccgaaaaaatatgtcaattagctaatcatttctctggaaatgaaatgtgttcaatagcaagcgacaaagattacacagacgagccatgtattaaaggtcatctcgacactccagaatcagtcaatcaaattacgaatcatttcatcgaaaaatgcaatgagatgggattggatgaatctgaatatgcagttgtatttcgaggacaaaagtttggcgagacaaactttggattagtaaacaatgataattcatcaagacagaatagtccgtggataaacgggcattacggcgttagagatattgtatatggaaaatatttgattgatcatgggaaatatactgacggactatctcttatagaaaaaggctgctataaaatcacaaagcgagttcggtatgtttcctcaagtactatgcgaagagaaatagcggaagtagggtttagaagacatagagcagagatgtttgattttattcaaaaattaccttcaacgaatgatacactgtctaattggattacgaaacttcaacaaatgggcataaatctaactgttgatttgggaaaggctaatgtccgtattgaatccctttttagaacagtaaatcatcaatttcggcaagaacgaccttacctgaaaacaattcattcggtaaaaggtatgacattagaggctattttagtatttctgtctaaaaaagctgtccacacgaactatacaacgattttgaataatcctgcaaagtattctgttgacaataatgaagaactccgcattgtgtatgttgcatgtacacgacctaagaaattgttatggatagccgttccatcagacgatattgattgttggagaaataaattgttctaa

SEQ ID NO: 74380 - DNA, 2205 bp, Bacteroides fragilis str. 3986 N(B)22; identical to SEQ ID NO: 74352

SEQ ID NO: 74381 - DNA, 1899 bp, Bacteroides fragilis str. 3986 N(B)22; identical to SEQ ID NO: 72893

SEQ ID NO: 74382 - DNA, 2205 bp, Bacteroides fragilis str. 3986 T(B)13; identical to SEQ ID NO: 74352

SEQ ID NO: 74383 - DNA, 1899 bp, Bacteroides fragilis str. 3986 T(B)13; identical to SEQ ID NO: 72893

SEQ ID NO: 74384 - DNA, 2076 bp, Bacteroides fragilis str. A7 (UDC12-2)
atgtatatttcaaaagtatcattagtgaattatcgcaattttgagaattcatttttccttttcaataaaggaataaatactataattggagaaaatgcatctggtaaaaccaatttattcagagctattcgtcttatattggatgataacttattatcttctgcatataaacttaatgaaaacgatttcaatagaaatttgataaattggaaaggaagatggattataataagtttggagttcagtgaaatatcaaatgaagaagctatccaagctttattcgtttatggaagtggagtcatagcagatgataaagttaaaaaggcaacttataatttattttttaggcctaagcctgaaataagaaaacagctttcagaattaaaaaaaggagatcatgaaggcttaaatagtattttagataaaattactatcaatgattatgagactttttttacggggaagagtactgttgattttaatgataaaaatgtacaatgtgaattgatgggagactttgaaaatgtaattttcaattatgaaatagatgaatcaaagtttggaggtcgcattcctcatcagttatctataagcaaagaagttgcatttactttcattaaggcattgcgagatgttgtgtccgattttcaagataataagaagaatcctttattgacacttctaaaaagtaaaagtgaagagttaaatgataaagattcagagttaatctcaaataaagtaaaagatttaaacgaaacaatagaagatctaaatgatattaaggaaattactaataatatttccgaaacaataaaagaggcagttggtacaacgtactctccttcttcattgtctataaaatctaatcttccaaacgaggccgaaaaattatttcatgcattaaaattgtttataggagaaccgggagaggattatgaaggtagtattcatgaattaagtttaggtggggcaaatttaatattcctaacattgaaacttcttgagtataaatatagaaaagggaaagatcgcattgcaaactttcttctaatagaagagcctgaagcacatatccatacacatatacagaaggctttatttgataaaatagaatacgaagatacacagattatttattcaacacattctactcatatttcggaggtttcaaatatctcaaatatgaatattataaataggtttaagaattattctgaagtttatcaaccatttataggcctaaatgatgaagaaataatgcatatagaaaggtttttagatgccataaggtgtaatattctatttgcaaaaagtgtaatcttagtagaaggagatgctgaagaaattctaattccagtaatggtaaagaatactttaggagttagtttagacgaacttgggataagtttaatcaatgttagaagtactggatttgaaaatctcgcacagttatttcataatcagagaattaagaaaagatgtgctattattacagatttagataaatctataacaggagaagatacagaggcctcaaaaagaggtttaagtagaaaagcaaaattagattcaattaaaaatgcaaatgaatggatatgtccattttatgcaccacatacttttgaggtagaatttcttggaaatggtaataaagacatagtcttatcaacagttaaagatgtatataaagataaagacacaatcgaattgtctgaacgagaaataaattctagtgatataaaggaatacggaaaaagaattttaacaatggcaaattataagggtaagggatggtatgcaatacttttgagtaattatataacgccatcagtgtgtatacctaaatatatattagatgctattgtatttgcaaaatctaaattttcaaacgaattaattgttcaaatgctagaatatgtattagatacatatgatgaaaatgaagaaattgataatcttaaaaacgaattaaaatcgtataaggaaggacgtacttcttttgactatattaagaaatctttagaagaagtattgaatgataatgaaccaatattatatatattaaatcaactttag

SEQ ID NO: 74385 - DNA, 1776 bp, Bacteroides fragilis str. A7 (UDC12-2)
atgtttgtttggggaaaaaatgatttgaatccagagcaggaaaaggctatatataatgaaaacagtatcttattaatagcatgtccgggaagtggaaaaacaagaacaataacctataagatagcttatgaactgtctaaattggaatccaataaacaatatattgttgccatcacatatacaaatcgtgctgcagatgaaataaaagagcgaatagaattattgggggtagatactgaacaactatggattggaactattcattcattctgcgttgaatggattcttaaaccgtaccatatgtatatagaagaactaagatttggatatgatattattaatacgaatgatactgagaattatctagtgtctttatgcgcttcatattcaacaccaaagaaaaaaattacatattgggattgtctttgttattgcttcacatcggaaggcttgaagataaattgcaccaaaccaacaataaaggagactgtagaattaataatctatgattactatcagaatttaaaagaaaagcatgaaatagattatgaattaatattatattattcatattgtcttttgaaagagaatcaaagtatatgtaagactctatctaatatttttccttatattttaattgatgaatatcaagatacaaaagaattgcaatatatgattttaggtgcaattttaaaaactggaaaagagaataaagcttttattgttggtgatccgaatcaatctatatatggtaatttaggaggttttccaatggataaagctcaattggaaagtgtaacgggattatattatgacgagttatcattaagtaataattatagatcatcatctcttcttgtatcatattttgattactttaaaacttatgcaaacaaaatagaggctacaggaaaaacgaaggattaccaaagtgttattagttataataagaccatttcaatagaagatttagaaaatgaaatagttcgtataattcaaaaaaatgttgatgaatatcatatctctccgaatgaaatatgtatacttgcaccacaatggattcatttatctggcttaacaagaaacttaatggcacgcttacctcaatatagttttgatgggccaggtatggcaccatttgcacgtgatatagataatttttggtataaattatcacgtattatattaacagattctactccgggtttatatatcagaagattacgttgggcaagtgaaatagtaactaatctaatatcgattggagtaactaatattgatttatctgctaaacaaatattatacatttgcaatagtatattaataaacgaacaagatggcttggaatatctaaagaaatttttcaatgcatttcttgacagggttaatattgacattaatcagaataaatatttaaaaatgcattatgatgcattttttgatagttctaaaaaacgtatagagagattgaaaaaggaaggtgcagagtttataacgaacattgatacttttagaaaagtttttcaacaaaaaaagggaattactatctctacaaaccatggggtaaaaggagcagaatttgatacagtaatagcttttgggctgttagatggatatgttccacattctagtgagtcaaataaggaagagagtgccaaacgaatattgtatgttattgcttctagagctaggaaaaacttatatttaatatcagaacaaggtcgaaataaaactccaactcccatacttagtaaatatggatataaatataagtaa

SEQ ID NO: 74386 - DNA, 2046 bp, Bacteroides fragilis str. S24L15; identical to SEQ ID NO: 74364

SEQ ID NO: 74387 - DNA, 1548 bp, Bacteroides fragilis str. S24L15; identical to SEQ ID NO: 74365

SEQ ID NO: 74388 - DNA, 1833 bp, Bacteroides fragilis str. S36L5
atgcaaaagatactgattaacgaaattagaatagatggattccgtggattgaaagattttaaaatgagcctttctgaaactacggtacttactggcatgaataatgtcgggaaaacttctgttctaaaagcgctacagctgttgtttggaaacagctcgttcctttcaacagaagatttacacattgacaagaacggcaaatcaaattatatcattgttgatgccaaaatagtagcaattgataatgatggaaaacgtattgcaaatttctcagatgtatgggaaattgcatttggtgcggataatataaaaatggatgctgaagaacacgcctatgtgcctttgcgtgttaaatacacttttcaaacacttcagaactcatttaatagggatatgcaaatcttgaatgaatgggactcggcgggcatcgcttggcaaaatttgaaaggtaaaaaatctacagttaagggagattattttcagtttcactatctggatgcaaaacgggatattcaggatgatttaaaagccagaacctcctatttaggtaaaatgcttggtgatgtagttagtaattatgacccgaaagatgttgctgaattagaacaaaaaataagttctttaaatgcagaagccatagaaaagagtgatgtgcttagaaatattcaggaatcactaaaagggattgacgctacaatggactcttcaggcaaagtctatgtgtcaccttttgctaagaaattgcgagatttgaacaagagcttgactatccattatggaacggaggatagtagttttacaatggactatcatggtatgggtactaggagttggtcttccatgttgtcgtttcgggcttttgtaaagcaaatgtgcgacagcaagaacccagaagacgaggcttttttgccgattatagctatagaagaacctgaagcacatttgcatccgaatgcacagaagcaactctacaaacagatgaacgaaatgccgggcattaaaataatatcaacacactctccatatgtggctgcatgtgcagaattatcagagttgagaggtatgtataaagccgctgagaatacagtttgtggaagtttgcccgttacagaactaacttcagaggaacaaaaaaaaatcaggcaagccgtattgactagcaatggcgaactgttgtttgccaaagcaattgtgttgggcgaaggtgagacagaagtacaagctttacctattttctgtcaacaacattggggattgactccagttgagtccggtctgtcgtttgtcgatgcaaagggatgtggtaattattatccatttgtagcccttgctgaagcgtttcagataccttggtatattttctctgatggagaaaaagacaccaagaaaggtcttaaaaaacttttgaagaggacttacaatgaagataaggaactggcagaacagaataatattttcatcatttcccctgaaaaagattttgaaggaatgctccttgatgatgggtataaagatgaaatagaaaaggctatcgaacagttgaaaggagaaggctacattgatgaatttatcaggaaattcaatcataagcctaaagggagggaacaaactcccaatatatgtaaaagctgtaatcaacatatatttgtggatattgaacgaatatatgatggtgaagatggtagattgacagctttggatgatataatggagaaaaataaggctcagctaggtccggtattggcaaattgtataattgaaagcgaaaaaccattacctccattagtagttaaactatttgatggaataaaaaaggatatatgtcatgtgtaa

SEQ ID NO: 74389 - DNA, 1845 bp, Bacteroides fragilis str. S36L5; identical to SEQ ID NO: 74345

SEQ ID NO: 74390 - DNA, 1833 bp, Bacteroides fragilis str. S36L11; identical to SEQ ID NO: 74388

SEQ ID NO: 74391 - DNA, 1845 bp, Bacteroides fragilis str. S36L11; identical to SEQ ID NO: 74345

SEQ ID NO: 74392 - DNA, 1827 bp, Bacteroides fragilis str. 1007-1-F #7; identical to SEQ ID NO: 74358

SEQ ID NO: 74393 - DNA, 1953 bp, Bacteroides fragilis str. 1007-1-F #7; identical to SEQ ID NO: 74347

SEQ ID NO: 74394 - DNA, 2013 bp, Bacteroides fragilis str. 3976T8
ttggtagttcatttcaaggacggtgtgaatgtgctgattggtgaaaatgattcaggtaaaacagccataatagatgctatccgttatgtcttgaaaacccagagtggagagtttattcagtttgatgacaaggatttctatcaggattatgagggacagaggaaagatgaattcaaaatagaatgcgtatttgatgggttaaatgggcaagattccggtttgttttgggaatggttgtcatggaacaatgataagacaaaatatttactgaaagtatggctgtatgtaaagcggaaagataacgtcataatgccgactttctctgctggatttgatggactggctgaacgaatggactctgaagcaagagaacttctaaaagttgtatattttaaaccacttagagatgcccttacagacatgactcacggctacaagtcaaggttggcacagattctaggttcacacgaacttttcaaaactcagaaggatgcagaaggcaataatgcaaagcacaaacttgagacggactacgagcatctgaaagaggatatagagaactattttaggattggcggcaatggtgagagtataacaagtgaaatcaataattttctaagggatcatttcttactgaatggtgacccgcgaaatgcggagattaaactaacaggaggagagttaactgaaatattgaggctgctagacttgattatggaaggcaataaatcgggacttggtacgctcaacctgctatgcatagcagctgaaatgttactttttaacaatcaaaagaaaggattgaagttggcacttgtagaagaattagaggctcatcttcatcctcagtatcaattgaggctgattgaatacattgcttctcagcagaaaaatgaacaatttatactttccactcatagtattacattggcctctaaaatcaagattgcaaatttaattgtgctgaaagggaaggatgcattaccaatgtcatcggaatatacgttgatgagacctgctgactacaaattcttagagcgattccttgatgctacaaaggccaacttgttttttgccaaagggctgattatggtggaaggggatgctgagaacttgttaatacctgctattgcccaattgattggaaagaatctttatcagtacggtgtatctgttgttaatgtgggaagtacagcgtacaagagatatgttagtatatttaaacgcaaagacggtaaatcatttggaatgcccatagctgttgtttcagatcttgatgtcagagctcttgaatattacgatgataattgtaatgatcgcaagacgccaaaatattggttgatagaaacattaagacccgaattagaggaaatctcacaggatgtggattatgatgctatgccaactgtttttagaagtaaatccgcttttgagaaagaagttagactgcacaaaacagaaacctttggacctattgttgaaacaattaatcgtatgaaagctgctttgacagaagataacaagactgtcttgaatgaggaaatgttagtgcagattaggaaagaaaagacaaaacagttggagaatgatatcaatgcggatcggataaaaatatttctgcctaaagcatggacattggagtatgaaattgccgggagtgggttgtataggttgttggcaacagcgataaaagcagcccaaaaagaagtaaccgacccagaacatgaaatgacagatgaggctttgatgggtttatggagcgaggttaaaaccgattatcctgacggacatgtaccaactaaagaggaagtatataaaatttttgcgcccttaaatgaagggattatcagtaaagccattgcagcacagtatttagctgggatgcttgctggagaattacctcctgttagtaatggagcagtagataggcatgaagtaaaacgcattgttgagacagatgaaaaattgaaatatctagtagatgcaatcaaacatgttacagaacaattctaa

SEQ ID NO: 74395 - DNA, 2151 bp, Bacteroides fragilis str. 3976T8
atgccatttgctactgacgaagaaataaaaatagctcacgatattctattgaaaggaaagaaacctttcgatacccataggatagatattataaaagagaatagcagttgctatgtccaggcaagtcctggaagtggcaaaacaacggctttgttggcaaaattgatgatccttgccaataaaatgcctctatatagtggaaaaggtgtatgtgtattgacgcatacgaatgttgccatcgatgagataaaggcaaaacttggacaaaaagcaaatgtgcttttccagtatcctaatttttttggaacaatacaaacttttctccacaaatatattacagcagctgcgctccattatttttatggtagtcaaatagcatacgtggatgatgatgtggccaatgctgtacttctaaaaaaatatggtagattaacctatgaaaacaaacttaagggattgatatatgcacgtactatttcaaaagagcatttaattgaagttgatgaaatagaagcattgggaggtatggatatattgacgtccgctaaagttattaaaaggaagggaaagagagtttataaatatgattttcaattggggaaatatgactggaataagattccccaaaatattaaagcattaattcgtactaagagagatagaattattgacagtcaaggaaaagatataattctttcattcagaattgattggcttaacaataaaattataactgatttcggttcgatagggatgtgtactgaagctggtgctgaatatgtaaaacttaaagaggaaatgtttacagaaggtattttgtcatttgatgacgcttatgatttagcatttcggtatatacaggaaaaggatctgaatttcaatagtttctcagacaagcggttccaatacctttttgtggatgaagttcaggattgtgacaatcagcaggttgaacttataaaaaagatatttgctgatgataaagtcgttattcaacgttttggagattactgccaagctatctatgaaggggaagaaaatgatggtgttgagaataatgaactgaaaggtgagaatgttttatacatacatgatagcaatcgcttcggagaaaacatagctaaaccactacgaacgttatgtatggagaacaatcttcaacttcggggtaatgaagaagtaccttctgtaaaacccattatcatcacttatgagaatcccttgtcagtacttcctagatatgtagaattgctcaattctacatcaattccagctatgaacaatctctctgttttggaaatcgcaaacaaagagaggcaaaaagatccattacatagggtgaatgttaaagcttgtggatgggtgggaaagaaaggagccaatgatagaaaaaggttcatagaatcatacttcccggcttttgaaagaaaaaatgggaaacaaagaatggaaggaaattctttcgatgactttatactcaagaatcctcatgggactgttaaggattatgccgcatctattattcagggcatattaaagttgttggatttatgtgatataaaaaatggtagtagacgccacaccagaacctccttattagaaatcttgatggctaataacatagaacagaaagagaactttctaaaggaggtcatgaattggtctttactcgttgttcaaagtcatagcgacaatgacatacataatataatagaagctatttatcaatatgtcgtaactaatttattgcctttgtttgggaaaggcataacgccagaggccagcaatttttttaatgcaacaaatggtggatttcaaaatgggcaagttgtggaaccagggaatatttacaacgaaaatggcattgatgtagaagttgccacagtacatgccgtaaaaggtgaaacacatgcatctacactctatctagaaacatcttattatgggtgtcatgagtcagaacgtttgtctgaacaatttaaaggaatagcatatacaggtgaagatgaaagaacacttagaagtttaagagttgtatatgtaggtatgagtcgtcctcgttacatgttatgtgttgcaatacagaagaatagatttgacaagatggattgctccgagctgagagaaatttgggatgttgttgatgcctga

SEQ ID NO: 74396 - DNA, 2076 bp, Bacteroides fragilis str. Korea 419; identical to SEQ ID NO: 71890

SEQ ID NO: 74397 - DNA, 1779 bp, Bacteroides fragilis str. Korea 419; identical to SEQ ID NO: 71891

SEQ ID NO: 74398 - DNA, 1827 bp, Bacteroides fragilis str. 1007-1-F #3; identical to SEQ ID NO: 74358

SEQ ID NO: 74399 - DNA, 1953 bp, Bacteroides fragilis str. 1007-1-F #3; identical to SEQ ID NO: 74347

SEQ ID NO: 74400 - DNA, 2046 bp, Bacteroides fragilis str. S24L34; identical to SEQ ID NO: 74364

SEQ ID NO: 74401 - DNA, 1548 bp, Bacteroides fragilis str. S24L34; identical to SEQ ID NO: 74365

SEQ ID NO: 74402 - DNA, 1833 bp, Bacteroides fragilis str. S36L12; identical to SEQ ID NO: 74344

SEQ ID NO: 74403 - DNA, 1845 bp, Bacteroides fragilis str. S36L12; identical to SEQ ID NO: 74345

SEQ ID NO: 74404 - DNA, 2199 bp, Bacteroides fragilis str. S38L5; identical to SEQ ID NO: 74366

SEQ ID NO: 74405 - DNA, 1854 bp, Bacteroides fragilis str. S38L5; identical to SEQ ID NO: 74341

SEQ ID NO: 74406 - DNA, 2046 bp, Bacteroides fragilis str. S38L5; identical to SEQ ID NO: 72686

SEQ ID NO: 74407 - DNA, 1662 bp, Bacteroides fragilis str. S38L5; identical to SEQ ID NO: 72687

SEQ ID NO: 74408 - DNA, 1785 bp, Escherichia coli; identical to SEQ ID NO: 73688

SEQ ID NO: 74409 - DNA, 1818 bp, Escherichia coli; identical to SEQ ID NO: 73689

SEQ ID NO: 74410 - DNA, 1827 bp, Bacteroides fragilis str. 1007-1-F #5; identical to SEQ ID NO: 74358

SEQ ID NO: 74411 - DNA, 1953 bp, Bacteroides fragilis str. 1007-1-F #5; identical to SEQ ID NO: 74347

SEQ ID NO: 74412 - DNA, 1827 bp, Bacteroides fragilis str. 1007-1-F #6; identical to SEQ ID NO: 74358

SEQ ID NO: 74413 - DNA, 1953 bp, Bacteroides fragilis str. 1007-1-F #6; identical to SEQ ID NO: 74347

SEQ ID NO: 74414 - DNA, 2205 bp, Bacteroides fragilis str. 3986 N3; identical to SEQ ID NO: 74352

SEQ ID NO: 74415 - DNA, 1899 bp, Bacteroides fragilis str. 3986 N3; identical to SEQ ID NO: 72893

SEQ ID NO: 74416 - DNA, 1983 bp, Escherichia coli 1-110-08_S3_C1
atgaaaattacacaaatggagatcaaaggttttaagagctttgataatgtagggcaaactataaatataaattcattcaccagcttaattggagggaatggaacaggtaagacggctgttctcctcgcattgacaaggatgtttggtgtcaaaagctccgatagaattgttcaagttgatgatttttatgttcctcctggagatgaaatcgatactcaagatgaaagagaattatcagttcgtgtaaaatttgaatttgcagatctgcaagatggtgaggacgattcagtcgctgatttctttaagcatttggtctcaaatgaagcagaccagatcccatactgtatagcaaaattaaaagctaaatggacaaaaactaatcttgcagaaggggatatagatagtgatttagtatgggaaataggagaatatgaaaaaaatattacagcatatgaaagatcaaaaatccatgttcattatgtccctgcttatcgcgatcctgctcaacaactgaagcaaacagccggaaccatcatgcaccgtttgataaatgcagttgaatggtctgaacagatgagttcaacggttgatgaggttgcagaatcaatcggaaaccagttccaagaagaaattggggttcagacaataacatcttcattgggcagaaattggaaaactctttttagcggagggtattttgaacagcttaaaattcagccagtaatgaatggaatagaagatgtattaaagcatatagatactgtatttatgcctactccggtgactcagccattaccaactgaaagattgagtgatggtatgaagtcattgttttatctttcgttagtcaaatctgcatttgatattgaagatgagatcattaattcaggagaaaatgaattatcaatatcagtagaagcattagatcctccaaatttaacgataatattaatcgaagaaccagaaaatcatctttcaccccaatatttaggaagaatagttaaactatgtgaagatatatctgagaatgatcgagcacaggttgttttaacaacacacgcaccttcattactcaatagagtagaaccagaaaatataaggtattttcgtctacatgataataaaaatactgttgtcaaaccaatattattaccaagcgaagatgaagacgatggagacaatgttgatactttcacttatgtaaaagaagcagtgaaggcatatccagaaatttattttgcaaaagttgtaatacttggtgaaggtgatagcgaagaaatagtaatacctaaaatagctcaagtaaatggtatagagcttgacacttcattgataacatttgctccattaggagggcgatatgttaatcatttttggaagttactcaatgagctttcaattccacatgtgactcttctcgactatgatttcaagagaggaggaggtggtggttggggaagaattaaatatgcagtcaaacaattaatatctataggtgcagataaaaatgaattgttaagtattacttcaggaactttaagtgatgaagagcttgaaaaaatgcatacatgggatgaggatcaagataatgaatcggcatggattaattgtctaaaagattataatgtttatttttcttacccctacgatttagattggctaatgcttaataaattctttgaggattataagacatttgttcccaaaaatggtgggccaagattgccaaaagatgacgatcatgaatatgataataaagttaaatcggcaattgctgcagttttgaaaaaagaagagaaagatattgatattagtgagttcgatgattatgaaaaatatttttggtatcgttacctatttttaggaagaggtaaaccattatcgcacaattatgttctatcaaaaatggaagacgataagttaagagatgatagtcctgaagttcttaatgaaattatcgaaacagtaagaggattactttaa

SEQ ID NO: 74417 - DNA, 1848 bp, Escherichia coli 1-110-08_S3_C1
atgccgactattaaagatgccgattgggttttaaaggatatccaagaagtagaagacgaggctatgagggtaattcgaaatagtacagggcataatctcgttcttgctggtcccggtgcaggtaaaacagaattattggctcagaaagcttgtttcttgattgagacaggaaaatgcagcaataaaaaaataattgcattatcctttaaaaaagatgcggccaaaaatcttcaagatagagtaaactcacggcttgatacaaaatatagacacaaatttgaatcaacaacatttgatgcattctgtaaaagtattgttgatcgctttaaaagcactattccggaatcttatcgtccatcaaatgactatgaaataatctttccaaataataatgatttagttgaagaaattaaaagagaggccgtaggctttgaaggtttaacatctgaagaattaaataaattacaaccttataattttgaagagaattatatagtaactccttataataaagcattagaacattctgttgatggcaggataagacggtttgtgtggttacacttattaaaaccaaaatcaaggatttcattcaagatgattaattttcttgctaattatattattagtaggaatcaatatttatctaatgctataaattcaacatatgactatgcttttatcgatgagtttcaggacacaacatataggcaatatgagatttttaagagcattttcttgggtaaaaaaataaaaataacagcagtcggtgatacaaaacaaagaataatgggttgggcaggtgcaatgcacaatgcttttgatgtgtttaaaaaagattttggaatcgaacaatctaatgaattagttagcaatagaaggtcattaaaaaacctcataaattatcaacgcatgatggaagctttcatgaatcatgctgatataaagcctgatatgatgttgattgaaaatgaaggttcagctaagttactacaatttgacgaaagtagtattgaaggggcatatatagcattatgtatccagcaatggattgctgaaggagtaaatgaaagagatatatgtatactgctaagaaacccggctaaacaatatacagacgatatcatttcagcattgcaatatttgaaaatacaatgtcgccttgagaacgagtatcaggatcttttaaatgaagctgtagtacagttacttttacaaatgctaatgtttgtctgtaatagaaaatccatagaaagctgggccactacaatggagcttctatgtaatataagaggagtaagtaaaagaggtgatgttacacggttagaaaaagaacttagccagtttattaaatctcatcgggtaattaaaggagaaattgtcgattatttatattcattattaagtatatttggtgtcgataaaataaagtcttactttccgcagtatatgagtgggaatgttttagaatatagcatagaattactttctcgccacctcgataagttagatgtaaaagaaaacacatcagaagccattgatttattacttggcaataaaacaatacctcttatgaccatccataaaagtaaagggttagagttcaggaaggtcatcgttgtggggcttgaacctggtgcctattttggtaaagaagaagagcaaatagaaaatcaaaaaacagtctttgtggcattttcaagagccattgaagaagtattaatgactcgttgtaaaataagaaacaatagttatggcaggggttttaagcagaattgtaatgatataccgttaataacaaacatgataacttattgtggtatcgaggctgaagattatcaaggttga

SEQ ID NO: 74418 - DNA, 1983 bp, Escherichia coli 1-110-08_S3_C2; identical to SEQ ID NO: 74416

SEQ ID NO: 74419 - DNA, 1848 bp, Escherichia coli 1-110-08_S3_C2
atgccgactattaaagatgccgattgggttttaaaggatatccaagaagtagaagacgaggctatgagggtaattcgaaatagtacagggcataatctcgttcttgctggtcccggtgcaggtaaaacagaattattggctcagaaagcttgtttcttgattgagacaggaaaatgcagcaataaaaaaataattgcattatcctttaaaaaagatgcggccaaaaatcttcaagatagagtaaactcacggcttgatacaaaatatagacacaaatttgaatcaacaacatttgatgcattctgtaaaagtattgttgatcgctttaaaagcactattccggaatcttatcgtccatcaaatgactatgaaataatctttccaaataataatgatttagttgaagaaattaaaagagaggccgtaggctttgaaggtttaacatctgaagaattaaataaattacaaccttataattttgaagagaattatatagtaactccttataataaagcattagaacattctgttgatggcaggataagacggtttgtgtggttacacttattaaaaccaaaatcaaggatttcattcaagatgattaattttcttgctaattatattattagtaggaatcaatatttatctaatgctataaattcaacatatgactatgcttttatcgatgagtttcaggacacaacatataggcaatatgagatttttaagagcattttcttgggtaaaaaaataaaaataacagcagtcggtgatacaaaacaaagaataatgggttgggcaggtgcaatgcacaatgcttttgatgtgtttaaaaaagattttggaatcgaacaatctaatgaattagttagcaatagaaggtcattaaaaaacctcataaattatcaacgcatgatggaagctttcatgaatcatgctgatataaagcctgatatgatgttgattgaaaatgaaggttcagctaagttactacaatttgacgaaagtagtattgaaggggcatatatagcattatgtatccagcaatggattgctgaaggagtaaatgaaagagatatatgtatactgctaagaaacccggctaaacaatatacagacgatatcatttcagcattgcaatatttgaaaatacaatgtcgccttgagaacgagtatcaggatcttttaaatgaagctgtagtacagttacttttacaaatgctaatgtttgtctgtaatagaaaatccatagaaagctgggccactacaatggagcttctatgtaatataagaggagtaagtaaaagaggtgatgttacacggttagaaaaagaacttagccagtttattaaatctcatcgggtaattaaaggagaaattgtcgattatttatattcattattaagtatatttggtgtcgataaaataaagtcttactttccgcagtatatgagtgggaatgttttagaatatagcatagaattactttctcgccacctcgataagttagatgtaaaagaaaacacatcagaagccattgatttattacttggcaataaaacaatacctcttatgaccatccataaaagtaaagggttagagttcaggaaggtcatcgttgtggggcttgaacctggtgcctattttggtaaagaagaagagcaaatagaaaatcaaaaaacagtctttgtggcattttcaagagccattgaagaagtattaatgactcgttgtaaaataagaaacaatagttatggcaggtctttcaagcagaattgtaatgatataccgttaataacaaacatgataacttattgtggtatcgaggctgaagattatcaaggttga

SEQ ID NO: 74420 - DNA, 1983 bp, Escherichia coli 1-110-08_S3_C3; identical to SEQ ID NO: 74416

SEQ ID NO: 74421 - DNA, 1848 bp, Escherichia coli 1-110-08_S3_C3
atgccgactattaaagatgccgattgggttttaaaggatatccaagaagtagaagacgaggctatgagggtaattcgaaatagtacagggcataatctcgttcttgctggtcccggtgcaggtaaaacagaattattggctcagaaagcttgtttcttgattgagacaggaaaatgcagcaataaaaaaataattgcattatcctttaaaaaagatgcggccaaaaatcttcaagatagagtaaactcacggcttgatacaaaatatagacacaaatttgaatcaacaacatttgatgcattctgtaaaagtattgttgatcgctttaaaagcactattccggaatcttatcgtccatcaaatgactatgaaataatctttccaaataataatgatttagttgaagaaattaaaagagaggccgtaggctttgaaggtttaacatctgaagaattaaataaattacaaccttataattttgaagagaattatatagtaactccttataataaagcattagaacattctgttgatggcaggataagacggtttgtgtggttacacttattaaaaccaaaatcaaggatttcattcaagatgattaattttcttgctaattatattattagtaggaatcaatatttatctaatgctataaattcaacatatgactatgcttttatcgatgagtttcaggacacaacatataggcaatatgagatttttaagagcattttcttgggtaaaaaaataaaaataacagcagtcggtgatacaaaacaaagaataatgggttgggcaggtgcaatgcacaatgcttttgatgtgtttaaaaaagattttggaatcgaacaatctaatgaattagttagcaatagaaggtcattaaaaaacctcataaattatcaacgcatgatggaagctttcatgaatcatgctgatataaagcctgatatgatgttgattgaaaatgaaggttcagctaagttactacaatttgacgaaagtagtattgaaggggcatatatagcattatgtatccagcaatggattgctgaaggagtaaatgaaagagatatatgtatactgctaagaaacccggctaaacaatatacagacgatatcatttcagcattgcaatatttgaaaatacaatgtcgccttgagaacgagtatcaggatcttttaaatgaagctgtagtacagttacttttacaaatgctaatgtttgtctgtaatagaaaatccatagaaagctgggccactacaatggagcttctatgtaatataagaggagtaagtaaaagaggtgatgttacacggttagaaaaagaacttagccagtttattaaatctcatcgggtaattaaaggagaaattgtcgattatttatattcattattaagtatatttggtgtcgataaaataaagtcttactttccgcagtatatgagtgggaatgttttagaatatagcatagaattactttctcgccacctcgataagttagatgtaaaagaaaacacatcagaagccattgatttattacttggcaataaaacaatacctcttatgaccatccataaaagtaaagggttagagttcaggaaggtcatcgttgtggggcttgaacctggtgcctattttggtaaagaagaagagcaaatagaaaatcaaaaaacagtctttgtggcattttcaagagccattgaagaagtattaatgactcgttgtaaaataagaaacaatagttatggcagggctttcaagcagaattgtaatgatataccgttaataacaaacatgataacttattgtggtatcgaggctgaagattatcaaggttga

SEQ ID NO: 74422 - DNA, 2334 bp, Pseudomonas aeruginosa PA99
atgcatttgaagaagctggccgtcaggaatttcagacggctgcgaaacgtcgtaattgatcttgcctccgacatttctatttttgtcggttccaacaacagcggcaagacatcggtcgggcacgcactccagttgttcactggcagcggccgcttcaacattcacgactttagcgccgagctctggaccgacatcgttgcgtttggcgagggtgagggcgaagcgcgccttccaacgatggaaatcgacgtctggttcgaaatcggtccggacgatgttcaccgcgtcatcgatcttcttcccagccttgcctgggaaggcaagctggtggggatgcgtgttgcctatgtgcccagcaatcctgcggcgacgcatgcgcgctatgtcgaagtacgccagcgcgtgctcgacgcggtcgctaagggtgaagacggagcccccatcttcgatccctcgccacgtaacctgcgggagttccttcgcgacaggctacatgacgaatatgagctgcgctatttcgtactcgatcccgcgcggttcgatgcgaagatggtcgcagaggatggctatgacccagccactctcaccggacgcgaccggagcggccgtgagatcttgaacggccttctccacattgacttcttgaacgcgcagcgccatctctcggacagtccagggggctctcgcgccgaagatctctcccgtgttctcagtcgcttctacgggcgcaacctcgaacagaaaggcgaagatatcgaggcgttgcgcgccctcgcagcatccgaagtctcgcttaacgagcatctcgaacgagtgttcgaaccgacgctcaagagtttgtcgaagctcggttatccgggcctctcaaacccgcgcatgatgatccgctcggccctcgacccggcccagatcatgagcggtcgagatggtgcgatcgtccactatgcgttgggagccgatgacgggaatcctgacccgcctaccttgcccgatcggtataacggtctcggcttcaaaaacctcattttcatggtcgtcgagctgctcgacctccacgctcaatggctggcgatcgaggaaaaccgtccgccggtccacctgatcttcatcgaggagcccgaggcgcaccttcatgcccagcttcaacaggccttcatccgcaaggtgatggacatcctaacgctcaagggcgaggaccgcacgcactacacgagccaggtcgtcgtcacgacccattcgacgcatatcctttacgaacgaggcttccggccgatccgctattttcgtcgaagccgtgcacagaatgtgtcgacctccgatgtgctcaacctctcggttttctacgacagcaccgatccggacatccggagcttcctcgagcgctatttgaaactcgcgcactgcgatcttttcttcgctgatggcgccgtgctggtcgaaggcaatgtcgaacggctgctattgccgcagatgatcgccaatgccgcgccgcggctgcaatcgacctatctcaccgtcctagagatcggcggggcgttcggctaccgattcaaagcgctgatcgagtttctcggattgacgacgctcatcatcaccgatctagacagcgtgttcggtccattggcgaaggatggcgagggtgctgcacccgctggtcaaccggaggccgcggagccagctgccgagaacgcgcaggctgccagcgctgacgctgacgctgacgctgaggatgtagacgatgacgaggaggatttgccggcggcggcggagaaacccgggaaggcgtgcatcgccagtcatccgggcgcggcgacgtccaaccagactttgctccaatggctaccgaaatgcgacacggtcgccgccctgtgggaggcgacggctgagcagaagatccaggcgaggacggaagacaatgacgctttggtgcgcgttgcctatcagtgtcggaccgatgtcacctggggcggagaaaccctggcgctggccgggcgcacgctggaggaagcatttgcactcgaaaatcttcaatggtgccaggacaagaaccgtaagccgcttcagctccgcatcgctaaggccgacgagaagaacctgacaacgcttgcggagcgcatccacaagcgcgtgcaggctaagagcttcagcaagaccgacttcgcactcgccttgctcgccgaagatccgagcagttggtcggtcccaacctatatcaccgagggcctgagctggcttgagaccgagattgcgccgccggaaccggacgaggaccagccgcatgagaacgcgccccagggcgcaccggccgccgccggcgacgaggtagcagcatga

SEQ ID NO: 74423 - DNA, 1878 bp, Pseudomonas aeruginosa PA99
atgacaagccggatcggcagtcctgacacacaagccgatctagatgttcgagcgtgtctcgatcggacgccgccacgctcgtttgtcatggtcgccggtgcggggtccggcaaaacgacctcgctgatcaaggctatcgcgcacctggccgagacccgcggtcctgccctgcgccgcgccgggcagcaaattgcctgcatcacatataccgaagtcgccgtcggtgagatttcggccgatgtcggggcctcgccgctattccacatctcgaccatccacagtttcctgtggtcggtcatccggccgttccattcggatatcgcggcttgggtagccacccgcatcgacgagaagatcgcggagcgacgcgcacactacgacaagcctcggactcaggcgaaaacgaaggcccgcctcgaacaggagatcgcggatctcgaggccgagctggctgcgatcggtgaagtagagaagttcgtctacggcaccggcagcagctacgctgaaggcatcctcggccacgacgatatcctcaagctcaccccagcctgtgtcgcagtgcatccgctgctgaggcagctcgtcgctaagcgctttccctacatcttcgtcgatgagagccaagacaccaatccggaggtcgtcgaggcgttacggcacattgcgggcgaacatcctggtctgtgcgtcgggttcttcggagacccgatgcagaagatctatatgagcggagcaggcgctgtcccgctgaacgacggctgggcggagatcacaaagcccgagaacttccggtgcccgacatcggtgctcggggtcatcaatgcaatccgcgcccctggcgacggtcttgagcaggtgcgtggtcggaagataaccattgatggcatcgagcagccggttgccggcacctccaatctgttcattctgccggcggacgcggagcggagtgcgcgcctagcggccattcggcagtggctggccgccgaaaccggtgacggtctgtggctaagcgacgtgcgggaaggtgatgtccgcctgcttgtgctggtgcaccgcatggcggccaaccggctcgggttccctaatctgtacgctgcgctcaatgaccgagcccctatgagtctgagtgaagggctgagcgatggcacagcctggccgctccgtccacttgtccagcacatacttccgctcgttgtcgcggcgcgagcgggcgatcggttcacagtgatatcgaccttgcgcagcgaatgcccgaggcttgaaccagcgcggcttcgagggcaagcgacggcccccgttcttacagcgctacagcaagcgctcgacgggcttgtcggtctgctggcagcaggatctcaggcgaccatccgggacgtcttgacgcatgtgcgagataacgagttgctgcacctcgatgatcgcttcgccatgcatctggttgcagaaccagtggatgacggcagtagcggcttcgagaacgttcaagcctatctggcatgcagtgtcgacgaactctgggcctaccggcgctacttcacagaggagtcaccgttcgcgactcatcatggagtgaagggtgcccaatttgagcgcgtattggtcgtcattgacgacgaggaagctggcttccggcagtattcttacgggaagtatctcgggtacgtccccctctcggacaaggacgaagccaacatagcggcaggtgaagagtccgtactcgatcgaacccgccgccttttctatgtgtgctgctcgcgtgcaatgaaggacctggcagtcgtggtctttgtgcccgatgtcgcaacggcccgcaccgcgatcgttgcgcagaatctgttccccgaggccgtaatccgaggtgcggagcatctgggctga

SEQ ID NO: 74424 - DNA, 2052 bp, Paenibacillus sabinae T27
atgcggctcaacaaattaagaataagtaactttcgtagttatggaccaacggaaacggtaatagatttcgaagatattacaacatttatcggggctaacagcagtgggaaaagtgctgcactacaggcgctaactaagttgttcggagaaacaaatgcagatagagcgttagagaaatccgatttttatgtatcacatgacgaagtacttgaagatttggagagacgagagctttacatcgaggcgaatttctcatttccggaaattgagaacgatgaaggtgaaacacattatgcaatacctacgtattttgataactttgttgttgaaaacactggcgagccaccgttcttgcgaattaggcttcaagcttcttgggagcaaagcaatacgccagatggaatcatagaaagtaaagtcagctatgtgtctctatcagaggatgcagaagaagtagctacgaagattccgccaagcgagctctcacaaataaaaatcatctatgttccagcaattcgcaatccatccacgttattgaggaatgcgaccggaacattgctctggcgtgtattgaagagtattaactggtcaaccgaaacaaaggagaacattaaggatcaattaaaacgtgctgaagaatccttgtttgaagaggctggattggaaagggtaagggattcactgaaagatcactggaaaaaataccataaggatacccgatactcggaagcaaacatcagattcaatagcacagacctggatcaattaataaaaaagtttgaagtggattttatgccatccataacgcaaaaagcatattccattgattcattaggagatggtcttaggtctttattctatttgtcactcgtggattcgtttctagaaattgaacagcaagctatggaaaatagtgaagatgaggacgcgccacaatttaacattcaaattccggccttaacaattctcgctatcgaagaacctgaaaaccatgtgtctccacatttattgggcaatattatcgttaatttgaatagaatcgcttcaaaaaataattcccaagtcattttaacctcacatacgccagctattgtgaagagggttttgcctgaatcaattcgatatttcaatatttcggtagatgaggttgttacgaaagttaaaaaaatcgtattacctcgcttacagggatctgcagaaaatgaagaagcgtataaatatgtaaaagaagctgtgagggcatatccagagatttacttctcgaaattagttattttaggggaaggggatagtgaagaaatcgttatccctaaagctattgaattggagacagaagatcatttggatagcatttcggtatctgtagtgccgcttgggggaagacacgtcaatcacttttggaagcttctaaatgaactggaaattccttatgtcacactattggatcttgataaggaacgaaatggtgggggttggggacggattaaatatgctttatcgcaattgattaaaatcggtgtggataagagcgaactattatcattaatgggtggaagcatccttagtgatgaagatctgaatgacatgcatacttgggatgaaagttatgtggataaccaaatgtcttggttacaaaggttagaaagctacgatatttatttctcaagcccattggacttggactttatgatgttagaggcgttcccggatgcatataaacggatacttagggtcaatgaagggccacgaatagacaaagtaggaaaagtactagagatagaaaatgacgaaccagaattaccggaatatttagaacgtgttagtaatgcgactaagcatgcattaaaagaaggagggagtagtggtgatacttacacgatcgaacagaaaaaattgatggtgtggtatgattacttctttttacaacggggaaaaccggtcacccatcggttagcgatactgaatatcactgatgaattgttcgaggagcgcttaccggcaccattgaaacggctgattgctagtgtgaaacataaaatttctggtgaataa

SEQ ID NO: 74425 - DNA, 1878 bp, Paenibacillus sabinae T27
atgaaaatcattgataagaatagatgggaacctgccgacggactaatgcttgaacctgctgcgctacaagttgtaaaaagcgaagacaacgctttaattattgctgggcctggagcaggtaagacggaattgcttgcccaaagagcctgctatttgcttgagacatctacctgcaaggtgccaaggaaaattcttgcaataagttttaagagagatgccgcgaagaaccttgctgaacgggtagagaaacgttgcggtacagagctttcaaagcgattccaatctatgacgtatgatgcatttgctaaaagtcttgtggatcgtttctatttaggtattcatgaggattacagacctgattcagtctatgatatcgctgttgcggaccgaactcaaaacgatatcaggacagcgtatgagcatgctggttttatacctcccgctgggatgcggccaggtgacataaacaacttgttggaaaaggaaatcgttcggcattctttaccattgcctttggataataaatatccaacaagggctgcttggtcactcttacttaaaggtgaagtgactagtacagctagattgtcgttcgctatgatcactaggctggcaacgtatttgttagtatcaaatcctcaattgaggaaggcgttgcaattgacttatagtcatgtatttctcgatgagtttcaggataccacgaatattcagtatgaatttgtgaaggcatgctttcataattccaactcggtattaactgcagtgggggatggaaaacaacgtattatggtatgggctggagcgatgagagagattttcccaacttttcagtccgactttggagcaactacttatcggttagtgatgaatcatcgatcagcaccaagactcattgaaattcaaaaaatgtttttttcaagatttaatgagcaacccatatcaatccaaacaaatccaaaatggcaagcatctgatggccgagcttatcttcatttgtttgaaaatcatatccaggaagcccaagcaattggaggcattgttcagtcttacttagcagatggtagccataaaccgaatgatatctgtattcttgtgaaacaaaaaatagatgtgtactgcagcgaaatgattacggaatttaataaaataggaatacaggcgagaaacgaaggggtatatcaggacttccttaaagaagatttcatatccctttgtattcacacaatgattatagcaatcagaagaaatgcaggttcatggacttattgtaggaatatatttctcgatttaaaaaacatggatgaaacatcttcgaagattcacgaatcacagagagaattaagtgattttattaagaaactcaaatctgatttgaggtcaataagtaacgaaaatgatctggggaatatattaaaagaaatttgtgacttttattccattgatgcactgaaagcgtactttccgcaatatttgagatcaaattatatcgaaaagctacgtttacagttggctaaatatttgtgggaagaatacataaaagcgggcagtttggacattgcaatcgataatttgcttgggaaaaatacagttcctattatgacaattcataagagtaagggattagagtataagacaataatttttttgggactagaggatgcggctttttataaatttgcagatcagagggaagagcatacagcaactttttttgtagctctctcaagggctaaaaacaatcttcattttactttcagtaaagtacgaccgattggattataccgtgatgatcaagataggaaaattattatggatttttatcatgcattacgcgattcaggagttgtagagccggtagttcataccataatgtag

SEQ ID NO: 74426 - DNA, 2142 bp, Klebsiella quasipneumoniae
atgcatatatctgaacttacattaataaattatagaaatttcaaacaaagcaagttcttttttacaaaggcaattaatacagtgattggggagaatggtacagggaaaagcaatctttttagagctataagattaatgctggatgatgaaatgctctttagggcatataaattagatgaaaatgattttagtcacgagttaggcgattggaaaggtcactggataattataagtttgaagttctctgatatttcacatgatgagtctgtacaatcacttttcattcatgaaagtggtgacgtaatgaatgatgaaggagagtatattcaaagtgcaacatataatcttatttttagacccaacatttctaagcgttcagagttggctgaaattcctcatggtgattttatcgaattggagagggtgaggtctgaaataaaaatttctgactatgaagttatttttacaggccgtagttatgctgatttttatgataaggaaatatataagaagattgtaggtgatttcgacaagtgtatttttcccgataagattgatgtgaaagatgtaggatggaatcttggaaggcagatttcattgtccaaagatgtctctttcacattcattaaagcgctcagagatgttgtttcagactttagtggcagtaaacgtaatccgttgcttgagttacttgaattaaaaagcgaaagcttaaatgacgaggactacgaaaaaattattgatgatgtgatctctctaaacagcgaaatagaactgttgcccgatgttattcaggtatcggaaggaattcactcaactattaaatcgacagttggtgaagcattctcaccaacaaaactcataattaaatctaagctaccggaagagcccaaagagcttttaaaatcactaacccttagtgtgagtgaaggtagcgagtattttgatggtagcatcagtgacatgagtttgggaggggctaatctattatttttgacattgaaaatattaaagtataaatatcttatcaataaaggcaaggtggctaacttcatattaattgaagagcctgaagcccatttacatactcatatacaaaaggcattgttcaaaaatttaaactttgataatacacaaattatttactcaacacactccacccaaatatctgagtcatctaaaatcagcagggttaacattatatcaaaaaaagaaaaagcaaatgatgttgatgtatgccaacctagcacgggtcttactccacaggagatttctaaattagaacggtatctagatgcaaagcgtgggaatttactttttgctaaaaaagttgtactagtcgaaggtgatgctgaagaaattatgattccagcgatgttttttaagcattttggaatctctcttgatgagttaggtgtaacgattgtgaatgttggtagcactggttttaaaaatattgctagcatttttcatgaatctaggctgagaaaacgttgtgcgatcatcaccgatttagataaatcaatttatagttcaattaaaaaaactgatgggaagattttacatgctaaaaaacgaaaggcagaacgttctgaaaagttagggaaggaaaggaaaaaaatattggatgatttttgtaaaggcaatgattatgtaaaagcattctttgctgaacaaactttcgaagtcgaatttataaattttttccagaacgagacgtatcttaaatcagtggtgagcgaagtttactctaatgaaaacaaaatattgacagttaataaagatttgagttccccttcaattgaaatttgcggcgatcgtgttttgtctgtggcaaaatatatgggcaaaggctggttggcattgatgctagctgataaaatagatcataatgtcgtaattcctccatacattttagatgcactttctttctctatcggtaagttcaatagagtaatcctcatctcggtcttgaagtataaaagaagtaagcttggagcgtatgaaactaaagacattgctccagggatagacgagatattagataagttaaatggaaaagaacttttgcagagacaagagattcgtaatcttatttctaaggtgtttggtattgatgatgctttagtaaggatgatatag

SEQ ID NO: 74427 - DNA, 1443 bp, Klebsiella quasipneumoniae
atgaacgagctaactttgaaaggttttcttagtgatgagcagataaagtctgtattgcatgaggggaatgcagtggtaatggcttgtcctggaagtgggaaaactcggactttatcctataaaattgcttatgaattatctaaaggcaaagtaaaccgttttataattgctttaacgtatactaatagcgctgcggatgagataaaaaaaagaataatggagttgggtgtttctattgataacttatggataggaacattgcattctttttgtcttaaatggattattaaaccttactctgctttatgtgatgaaaccagatatggatttaaaattattgatcctcacgattcggaagaccttaaattacagttatgttctaaatacagtagagactatttcaaaacggattttggctggtgtgaatacggattgagagaaaaagataagcatgggaaagaagttgttgaaaaatattatgaatgtttaagggatagtggctttgtcgattttgaacaaatagtatatctttcttataaagttgtcagcaataaccatttcgttgcaaaaaatctttctaatattttcgaagttgtaatggtagatgagtatcaggatacccaagtattgcagtatgagttattgttttctctactgaaggtaaaaaggaatagctgtaggttgttttttgtaggagatcctaatcaggcgatatttaattcaatgggaggcgttgctttagattttgatttgttttcttcgcgcactggagttaaatttgatttattgcagttaaaagataattatcgctctagtcagcaaatagtggactatttcactaattttagaacggtgaccggagaggcgtttgaagcatgtggagagttcagaaactataagtcatcaattactttcgataattcatgtctgatggaagacctagattcaaatatttctaaatttattgctgaagctattgtggaaggtatctcagttaatgagatttgtgtaattgcaccttggtggtatcatctttcagaaattacccgaaggttgatggcaataatgccagatgttgcatttaacggtcctggtataacgccaatatctcataatagagaaagtttatggtataaatttgcaaagatagctctcattagcccttctccgtataactacaggcatcgaatttcaactgccggagaaatatttgagcaattgattgatgcaggttttttcattgatttgaaattatgctctccaaaattgtttttaaagcattgcaatgctgtcaaagttaatgagattggtggggtggagtatttgagtgctttctttgaaaaggcctgcctttattttgattttgatgtgttaagttcaaatgaatttgctgattcttatgatgctttttttcttcagctgaaaaaagaaaagaaaaattaa

SEQ ID NO: 74428 - DNA, 753 bp, Acidomonas methanolica NBRC 104435
atgctcgcgggattttccggccaaaagatcatcacaacccattcgggtgatcttctggctgccgtgccattaaaagcgctgcgccggcttcgtcgtgtcgatggggatgtaaaggcgttccagatagcggacggcgcaattgacgaactcgagttaaagcgcttggaccatcatgtccgccgccatcgcgggggctttttgtttgcgaaagtttggatactggttgaaggtgaaactgacgaaaccgtcttccaagaatgtgcgcgtatcttaggtcacgacttattcggagagggaatctgctgctttaagtttgtggaactgggtgttgccccgttcatccggcttgcagaccaactcggtatcagctggatcgttgtggcagatggggatgcagcaggaggcaaatatgtcgcgaccgcacgaggtcttttgaatggtcgaaatgtcgacgagcacattgttcaacttccgacttatgacattgagacattactatgtctgcacggctatggtcacttatacgcagcctccgtgtctccccagaaacttgccgccaaccccaatcctcatactcacggaactgagcaatactgggaacacgttgtcaataagctgcagccagaaaaaggcaagccgacaagaatattgcctgtcatcgatgcgttggaggacgctggccctccagcagtgccccaggtcatcaagagcgtgatcgatcaggcactcattgcagccaaggaaggtgcatga

SEQ ID NO: 74429 - DNA, 1914 bp, Acidomonas methanolica NBRC 104435
atgatggttgacctgtctacattaaacgatcggcagctagaagctgtccgatggaacggcggtccacttctcgtactagccggcccagggtcggggaagacgaccgttctcaccaagcggatcgcatgcttgctggaacaatccagcagcgatcatttccgcatcttggcacttacttttacaaataaggccgcttctgaaatgcggaatcgcattgaagcgtttgtccctggttctggcaaccgggttctactaaccacctttcattcattcgcaggcgaccttctccggcagcatggccacctgatcggtctacggcccgacttcaccattctggcccaagacggagagcgaatcgcagtgttggacgatgcaatcagtcgcgtcactgatgttgatgtatcacaatattctggcgagcgcatattgcctctgattggccgaattaccgagaacgatgtgtcccccgacgttctacaaaacgtcttaacctcattgccggaagaccggcgcgacgcaattggtctaatatatcaacaataccgccgttgcttaattgcgacgaacagtttggattttccttcgcttataggcgaggcgctgaaacttgtgagggataatcctgcggtatgcaaacaagtaaaacgaatatacaagtatgtttgtgtcgatgagttccaagatacaaatttatcgcaatatgcgtttatgaaattactagttggcgataatgatagaaaccttttcgtcgtcgccgatgacgatcaaatcatctatcaatggaatggtgccagtcccgaacgtcttctgggcctacgtaatgattttggcatgagcgtagttcaactgccagccaactatcgctgccctccggccgtcattgaccttgcaaataatttaatcgctcacaatgtatcgcgctcaactaacaaggaccgactgctggctctcaaaacgggggcgactgaccaagcaattcgtgtgtttcggttttccgatttcgatgatgagttggcatgggttgcgtccgatattgcatctaagcccgaggtggaaaaggctcgttgcgttgtactggcgcgcactcgcaaagcattagaaaaagccgtggaaaaactggcggccaaaggtgtttcagcctacctcgcgatgcgaaaggacgaattcgtaagtgcgccgttacggtggcttcatgccgcgttgcgtctggcaaacagcccccaggatcgggagcagattcagcgtttgactaaggcgttttacatcctggaaggcctgcagatcgatgcggcagcggtggccgcgaacgcacaagcttttgaaggtagctctttgcgtgccttcgttgacctagcgcttaaacacgacaaccttagcgacgctacgcgaacatatatagagcattctctgtcgcctctgatcgatagactcgattttcggactttttgcaaagggtctttcccctggttcgacttggttcaaaacatagctccagacatggaaggccatttcgccgattatgcagatgagcggtccacttggcattcgctcgtcgatgagatcgaacagcagtttggtgccacagcgacaacccttaatgttcttttgcaagaactgaacatgagatcgaagacaccaccgccgccaaagggtgcagttccttgcttcacgatccatgcttccaagggaatggagtttgggcacgtctatctcatcgccatggtcgaagatcagctgcccagttgggcggccgttaaaaaaggaccgcagagcaaggaaatgcaggaagaacgacgtaattgcttcgtagcaatcacacgcaccgaggaatcgctaacgatgacgttttcggaccggatgcttgggtggaacaaagctcgctcgcggttcctcacagaaatgggtgtggcatga

SEQ ID NO: 74430 - DNA, 1824 bp, Escherichia coli O15:H18 str. K1516; identical to SEQ ID NO: 71786

SEQ ID NO: 74431 - DNA, 1893 bp, Escherichia coli O15:H18 str. K1516
atgaatctatcaaatgctcagcgccagatcgttgaagcccctatggatatagctattcaagtgcttgcctcagcaggttctggaaaaactcgtgtcttaacagagcgtgttcgatatatattgaataatacaaagagagatgctgttattgccctgacctttacgaataaagcagcggaagaaatgagttcgcgtttaagtgattttgatccagatgaagacagggtctggattgctacgattcactctgttgcgcagcgtattttagaaaaatacggacacaccattggtttgccatcagatttgtatatatatgatagagataaggatcgtatggaagtctttatgcagtctttgcgtgaagatggtattgatatagatgaatatctctccattgcagattccaaggaattgaaaaatagagagcgaaatctgcaatcgtatatggatatattttcaaaaataaagagagagttgcttactgagtttgaggtatctgagttgtatccagataataatatctggaaaatatatcaagattatcaggcttcattacttaatagtggcggtatcgattatgacgatattttagtatatgcacatcggattctgctcacgcatgattggatagcaaaaatatatcgttcaaaatataaacatgtttgtgttgatgaagctcaagatcttaataaagcgcagtatgaatttattaaggtgctgtgcggtgatgtgataaaaagtattcttatggtaggtgaccctaatcaaatgatttatggttttaatgggtcatcaaaagactacttttgtgaagattttattaatgatttttttcctaatcagtttgagttaaaggagaattatcgtagtgccaaagctattattcgcgcagcaaataagttaagaccgggatcacaagcagagattgattatgccttagagggaggcgttagaatctcagaatttgcttcagaagaagatgaagctgatacggttgtcgctactataaagcatcttctggaattgaaagttcacgatgagattgagggggatatttcactaaacaatatggttgtgattggccgtaatcggtttgtttttggcaagcttgaaaaatgccttaaagaaaatttgattccttactctttgaggaaaggagagagagcgttagaaccttcgactagatttggaaaagccctggactatgccattagagtgaagttgaattcaaaggattgggttgatggaaaaaaattatgtcaagtactttgcatatcagagccggctggctggacacctgatgtattgcgagagatggcggttcaaatttcatcatcagatgatgattactctattgtatttgaaaaacttcttactactattgatagcttaaatattgaaaatcctaaaattcccaagctaataaaggaatttaatgctcttcttacatcgttagttgaaaatcacaatggtatttcagacgataaaatagaagacgtcaagttgagtattgaggagcttaaagagtttagtggtatgtggactcgatttaagcgtaaggggttaggtgattcattagttgcatttaggaacgcattggcattggggcaactagctgaaagtagtatggatgaaggcttaactttaagtacagtgcatactatgaagggactggaaaaggatatcgtgttcttgataggtatgtgtgaaggggttttcccggattacagagctagaacgcccaaagagcttgaagaggaacgcaataacgcttttgttgcggtgacaagagcgaagcgttggctgtacgtttcttatcctaggcagaggatgatgccttggggcgaccttaggtttcagcaaaaatcccgatttgtcagtgaaatagaataa

SEQ ID NO: 74432 - DNA, 1794 bp, Acinetobacter baumannii R1B; identical to SEQ ID NO: 71916

SEQ ID NO: 74433 - DNA, 1782 bp, Acinetobacter baumannii R1B; identical to SEQ ID NO: 71827

SEQ ID NO: 74434 - DNA, 1965 bp, Draconibacterium orientale
atgtacattaacaaaataatagttcaaaatttcaggttactgaaaaactctatacttgacttagagaatcaagaggataaagacctttcaatccttatcggtagaaataacagcggtaaaacatcgtttataatgctctttgataaatttctaaaaaaatcatcatcgttcaattttgatgattttccggtatcattaagacagagcatttttgaaataaatgaagaaactgatattaatgatatttcaattaggcttattattgaaataacatatacagataaagataatcttgagaatttatctgaatttattcttgacctaaacccttccgaaaataaagtacatatactgtttgaatgtagtattgataaaaaaagacttcttaaagagattgaaagtgttaaacctgaaagccgtaagcggtttataaagaaaaatctgtgtaattacataaacactaatatatatacgtttgatacatacgataacttaaaagctgaaaataggaataagcttatcgagaaagataaaaaatccattgacaacttaattaattaccaggttatccatgcaaaaagaagtgttgcaagttccgaagccggtgaaagctcaaaaaaggtgctttcaaatttggctacaaaatactatgataaaaaaacagagaatcaactttcatcagacgacctggatgtaattaatacttcacttcttgaaatggataaaacccttgaaggaaagtatgaagaattctttgataactttttaaacaaatcaaaggactttctggctatgaccgaattgagggttgtatcagacttagaatcaaaagaaattatatcaaatcactccaaaattgtgtatggttcagaagatgaatcattgcctgagcatttaaatgggcttggctacatgaatattctttatttactgttgcaattagagattaagaaagaatttttaatagaaggcaataaagacattaatctacttttcgtagaagaacctgaagctcacacgcatccacaaatgcaaacagtctttatcgaaaaagtaaggactattttagaagatattccagcactacaaacatttattaccactcactcatcccacattgttaagaatagtaatttcaaggatataagatatttctacaatgacctaggcaatagaattgtaacaatcaagaacttttatactgaactccaaaagaaatatgaaaaggaagaagatgaatttaaatttctaaatcaatatttatctattgcctctgcggagttattttttgctgagaagataatctttattgaagggcttacggaaaaactacttcttccatattttattcaacaatatgataagaccaatactgatgaagttttgctgtcatctcaaaacatatcgctactagaaattggagcaaatgctaaagcatttagccactttatagatttcttaggcataaaggctttaataataactgatattgacacaacaaagaaaaatgcaaatggcagatatagtgcagaacctgtaaaaaatgcaacacatattagcaatgctactataaagcatttttataaagctcccgattttagccaaatcaaagaatggagtgattggtttattaatctgaaagaggataaacatcacaaagaagattcaaatataaaattgtcatttcagcttgaggaaaaaggttatcacggaagaagctttgaagaatcttttattagcattaatgtagataatttaaaagctaatatttcagaagttaaagggcttaaagatgatgcagacgaaagtctaaattcgattgatgatatagatgaattaacgaaaagcattttagagaaaaaatctgattttgcctcgtcattactttggttagcactcactaaagatgttgattggaatatgccttcatacataaaaaaaggattagtatggatagcaaaataa

SEQ ID NO: 74435 - DNA, 1968 bp, Draconibacterium orientale
atggatagcaaaataacagcattagagcaagtatttaactgtataagggaagagcaaaattttgttcttcaaggtggtgctggtagtggtaagactgaatcccttaaacgtgtaattgagcatatatcaaaaaactatcctggaaaaaaaattgcttgtattacacataccaatttagcagttgatgaaattaagtctagggttgatgatgattataccatctgtacaattcactctttcttaaacgacttaataaaagactacaagaaaaatcttcatgaggttattggtgaaatcttcaaacttaaaaaagtcgataatggagagcataaggattataaaaagtgctatgaaaaatatgcttcaacattgcattctgtgttgaaagaaacagtaccaaaggtagttggtaaaagagagtacgataaagagccagatagattctataatgaattaaatgcaaatattgagaagcttaattctgaaatagaagttttaataaaagaaatagatttcaatgaggtaaggtataatgaaacaagatttgacagctttagagatttgtcatttggacatgatagtctacttgtaatggcatccttgctatttgacaattattctctgctcacaaaaatattacaagataagtacgactttatttttgtagacgagtaccaggataccaacaaggcaattgttgatattttcctgaataaaattccttcagatagtaaaactataattgggctttttggtgactcaatgcagggtatttatgatgatggaattggagatgttgaagaatatattgcaaatggattgcttaaaaaagttgaaaaggaagataattataggtgttcagaacaggttattgaatttataaatcaacttcgcgatgatggcttaaaacaagaagtagcttttaaaacaaagaatggcgaagtagaaacaaaaatagatagacaaggtgcagttaagctttattattccatttatgacggctcaagaaccgcaagtggtaatcctcagaataaagaggaatatttacaacatctaaattcagtaattaagcatgttgatgataacaattacggttataaaaagctaatgcttacaaataagtccatagccagcgaagtaggctttgaaaatctatataatgtatttaatgacagatatgttgatgttaaggaagaaattgaaaaagatttaactagacttcaacttttagatttagcagaattatccaaagcgtattcaacaaaggattataatttcattattacagaactgaaaaaagctggatttctgataactaccattgaagataaaaagaaaatcagttctattcttgataaaatagtagcttccgaacatggagcaattgaacttttggaacttgcttttgaaaatagacttcttaaaaagtcggattcatatagttcatacattgatagaaaagattcatttttgactgatattaaggatgatgagttttatcctacttttaaaacttattatgaaggtggacaaaacacatttaccaagatggcgaaagaagtcgatggattaaacgaagaagtatttaaagaattccaaaggttatataagaaagaaagattctacaatgatttgttttctagtaagataaagtttaaagagattttaaactacttctcttatttgaatgaagaaacaaactacataaccatgcacaagacaaaagggtcgggtattgaaaatgttatggttgtgttagatgaatatttttggtatcagaagtataagtttaaaacaatctttgatgaaagtgaaattgacactacaaagaggttgtacaatcaaaagttattctatgtagcatgttcaagagctattgataacctaatctgcattagacttattgctcctgatgaaaaagatgatttgttaggttatttttcgaactatgaagaaataaaaatatag

SEQ ID NO: 74436 - DNA, 2397 bp, Pseudomonas aeruginosa PA96; identical to SEQ ID NO: 73790

SEQ ID NO: 74437 - DNA, 1932 bp, Pseudomonas aeruginosa PA96; identical to SEQ ID NO: 73791

SEQ ID NO: 74438 - DNA, 2139 bp, Pseudomonas aeruginosa BWH036; identical to SEQ ID NO: 73802

SEQ ID NO: 74439 - DNA, 1782 bp, Pseudomonas aeruginosa BWH036; identical to SEQ ID NO: 73803

SEQ ID NO: 74440 - DNA, 1851 bp, Pseudomonas aeruginosa BWH035
atgcaggtcgcgcgtattcacatcgagaattttcgcggcgttaaggacgcaactctcgatttcactaagcacgtggtacttctcggggataacaacacgggcaaaacaacggtgctggaggcgctcgatcttgtcctcggacccgaccggttgaacaggacaccgccgatcgacgagcacgacttctaccatggaagatacgtcgctaaaaccaagaagtctgtcccaggagatcagggcgagggcggaatgcaggagcctggcgccgaaaacgatgtagccggcgccctggaagacggcgctggcgcggaggcgccggccgaagatcaggcgctgcagattaaagttgacgtcacgatcattgatctgtctgaggaacagcgcaatcggttcggcgactacatcgaattctgggacagtaaggagaagaagctctatcaggaagcagtcccagagggcatcgatgcggacgtgatctctccagcgctgcgcatttccttcattggacagtacgactcggaagaggatgacttcgagggtaagacgttctacacgcagactctcgcagacgggggcaccccccaagccttttcgaagaaagataaacaggtctgcgggtttttgtatttgcgctccgtccgcacaggctcccgggccctgagccttgagcgtggaagcttgcttgatatcatcctgcgcctcaaggaggtgcgtcctcagatgtgggaggacgcgatcgggagaatctctgagttttcggtcgctgaagaccctaccctcggaatatccggagtccttcaaagcataaacaacgcattgaagaagtacgtgccgaaggaatggggcgtcgagccgcatctcaagatctcgaacctgacacgggagcatttgcgcaaggtgatcacggcgttcatcgcgaccggcgatggagctcacgctgccccgttctaccgacaggggaccggcacgatcaacatgttagtgctcgcaatgctttcgcagatcgccgaggacaagcagaacgtcatcttcgcgatggaggagcccgagactgccatccccccctacgctcagaagcgcatcatccatgaggtccgcaatctggcgtcgcaaacgctcttcacgtcgcactcgccctatgtgctggaagagttctccctcgacgaaaccgccatcctatcccgcgactccgtcggagtaataaagcaatcccgggtatcgcttccggaaagcgtcaagctcaagcgataccggcaggagttcaggactaggttctgtgaaggcttgctggctcggcgtgtccttgtggcagagggtgcgacagaagcttcggcatttccggtggcatgtcggcgccttgccgaacttgacccggccaagtacgcctctttggaagcgctcggtatttgtgttgtcgatgcaggcggagagggaagcatccctgatatggcgaggctgtatagggagatagggaaacggacatttgccctgtgtgacctgcaagacgccgcggcccaagcgcaaatccaggtccaggtcgagcacatgtacatgcacaacgagaagggcatcgagaacctcatcctgaaaaacacgccgcaggcggcgatggagaggttttgtgaccttctccaatggccggcagacctggcggcgaagtttccaaatcccaaggcggatgttgtcaacgcccttatggcgtacttcgcaaagaagaagggcgatttcggcatcgcagagtacgtcgcccaatgcagcgaggccgaaattccgcaatggatcagagaggcctgcatgcacctgaaggaactgagcatgttgccgcctgcgccggctgcagtagccaaatag

SEQ ID NO: 74441 - DNA, 1806 bp, Pseudomonas aeruginosa BWH035
atgaagctctctgagaagcaaaaggaagtcctcgtagccgaaggtcatctcctggtgatcggcggcccgggggcaggcaagacaactatctccattctcaaggcggccaagctagcggcaaccctgcagcctggtcaggaggtcctgtttcttagcttcgcgcgcgctacgattagccgcgtcattgaggccatcgagaatgaacatgacatcccgaaagccatcaagtcacggatcagagtcgagacctatcactcgttcttttggcgcatccttcagacccacggatatttactcggcctaccgaggccgctaacgatcctgactcctgccaacgaggcaatcgcgctatcggctgtccgaagtgagtacaaagccgaaggcaagctgagtgaggcggataaggccgaaaagaaggccaaagagcaagccgaacgacttcggcaggccaaggtcgaggggcgcgtgtgcttcgacctatttgcctgccatgtcgccgaacttctcgagcgaagcaagcggcttcgtgagctgattgctgctcgctaccccgtcatcatccttgatgagttccaagatacgaacgccgatcaatggcgagtcgtacaacagcttggctgcgaaggagtgttggtcgctctggcggatccggagcagcgtatctatgactggatcggtgccgacccggcccggcttgaccagttctgcgcaacgttcgagcacacggaaatcgtgctgcaaggcgagaaccatcgcagcgccggaacagagatccttctcttcggagatgaggtcttgacggggaggttttcgaagaagaagtacctcggcatcgagctcgaaacctatcccgcgaacgagaacgaagcctttaccgcgctgatcacccagacgtatgccgctcgcaaaaggctcgtcgactcaaagaagaaggactggtcgctcgctatcctcgttcctacgaagaaaatgacgcgagcagtctcgaatgtgtttaggcagccgcttgcgaagatgccaccgattcgtcactcagccgcggtcgacctcaatgcagccattctgggagctgagatcgtctcattcatgctgcagccgctgtgtctgttccacctcgatggggtgatcgacctcttgtgcaattacttccaggggaagggcggtgactctccggcgaaatccgacctgcagcaggcagcaagcattcgtaaggccttcgccctctacgcggagaagaaggctgccgataagccggtgcccaagaacagccttatggttccgctcttgcagacatacgaacaactgagagcaatccccttcacgggcgatccggatgaagactggcgcgctgtcaggaagaccatggagaacggtgcttgcctccgcttgagagaggttgccattgaagtcaagaacatccgtctgctggagcgcgggactcaattgcgccaggcgctttcggaggactggcggactttcgggcgatacgaaaacgcccttgacatcaccaggcaggcatttgtccgtgagcacttcgctactcagtcaaacccagaaaatggggttgtcgtcatgaacatgcataaggccaagggaaagcagttcgacgaggtgatcatctttgagggttggcctcgatgcgtgaagaagaagatcgtggcaaacccagatcggatcgtgagggcaaatctgagggaaaacattgacgatcaggccagacagaatcttcgagtcagcattacacgagggaagcagcggacgacgattctgaccccgcgtgaggatccttgtgtgattttcgtctaa

SEQ ID NO: 74442 - DNA, 1872 bp, Pseudomonas aeruginosa BWH033
gtgcatcttgtgcgtgttcgcgtccggaacttcagaggcatcgcctacggtgaggtccacctcaatggacacactgcttttatcggtgacaacaacgccggcaagtccacattgctggaagcggtggacttggtacttggcccggagcgcctgagtcgtcgccctgtaatcgatgagcacgatttctatgccggtacgtacgtagacccggccaagaacgaggtcgtcccgatccaggtcgaggttattgtcgcgggactctctgatgagcaactgcggcatttccgggaccatatcgagtggtgggatacacagaccaagtcattgcttgtaggggcacccccggagggaacagatgcgccccatgtcggagcggcaatacgcgtcttcttcaacggttggtatgacgtagatgaggacgacttcgctggggatacctattacgccactcccgaaatgccggatggctcctacccccggttctctgcgcccgacaaacgaaaatgcggttttctttatctgcgcaccctgcggaccggagctcgcgcactcagcctggagcggggctctttgttggacgtgatccttcggctgaaggaaacacgactgactatgtgggaggatttgctcgaccagctgagggcactgccagttggagagaccgaggacatcggcgagttgcttgtcgcagtccaagatgcagtacggcactacgtaccatccgactgggcagagcaaccccacatgcgggtttcggacctcactcgcgacatgctccgtcgaaccctgactgtcttcatgggtactggagcgaaaaggccggacggctcagtctattccgccccatatcagcaccaaggcactggcacgattaacacgctggtattggctctgctttcgatcatcgccgaactcaagcaaagcgtgatcttcgcgatggaagagccagagatcgcgcttccgccgcacacccagaaacgaatcatcaattcgctgcgccagaagtcggcacaggccatctttacctcccactcaccctacgtgctggaggagttcgagcctgcccaggtagtggttctcaagcgcacggccggtattatgaccggggttcctgctacatatccgccagcagtcaagcccaaggcctatcgcacagaattcaaagcacggttctgcgaagccctgctggcacgctacgtacttgtacttgagggccgtacggagttcgacgcattgcctgccgctgcccgccggctcgccgagctggatcccacgcgattcaaatcgctcgaaaacctaggtgtggctatcgtcgacgcccgcggcgagaccaatgtcgcgccactgggtgcattcttccgctcactcggcaaggtcgtgttcgccgtatttgacaagcaaacgccggaggcgctcgcaaccatcactgcctcggtcgatcatgcctatgagtctgcgactaagggctttgaaaaccttgtcttgtatggcgcgtctgaggttgcactccgcagctatgctgctgttgtggttgttggcggtgattggccgcagcatctcgcggcatacacaccaacacccgcaacaccgctggccaatctgcaggtggctctgtcgcactattttggctgggccaaaggcggtggcgacgccggcgacttgctcgcctcctgtccaaccgccaatgacatgcccgaatacgtgagagccacgctggcagccatcaagaacgtcattgagccacctcagccgcctccattacctccccagctagccggcgtgccccctctcccagaggctgcagctaagccaccgccattggcagcagcctatgggaagttccaaccgtccccgccccagcctctggcatga

SEQ ID NO: 74443 - DNA, 1713 bp, Pseudomonas aeruginosa BWH033
atgacggaagtgtggagcgatcagaagcgcggcttcctggcgtccgctgggcacaccttggcgctaggtggtcctggtgcaggcaaaacacacgtcgcgctggtcaaagcgcgtgatgagattcgctctgggttgctcaaaccaggccagaagatcctcttcttgagcttcgccaggcctaccgtagcgcgcatcatcgaaaaggcttctgagctgatttctcgcgaggacctgaagcaacttgaggtcagcacgtaccacggttttgcttggagcattctccgaagccacgcctatctgttgaatggcaggccgagcttgcagcttctgccaccacccgaggcagcagcgcatttggcagatatcgataaggcccagcacgaaaatgagaagcgacgcctattcgagcacgagggccgcctgcatttcgacttgttcgcaagcttggtcagcgaactgctgagccgtagtgaccggctaagcgccatcttctccgacgcctatcccgttatcatcctcgacgagtttcaggacacaaactgtgatgaatgggcgctgatccagcagcttggaaagcgtagtcgcctcattgctctggccgaccctgaacagcggatctatgagtttcgaggcgctgatcctaggcgggttggcgactttctggagatcttcggcgccgcccacttcgatttcgcaggtgaaaaccaccgcagcagcggtaccgatatcacgacctatgggaatgacctgctcactggcgcaaacaagggcaaggtctatcagcaggtaaaaatctcgcgttacggcttcatgcatggaaagagcctgcacttcaatgccaaggccgcagtgctctcggcgttggatcgcctcaaggcaataccggacaaatcgatagcgatcctggtgccatccaaacggctgatgctcgagctttctgattacctttcttctgcagctgatggtctaccagagctacatcacgacgttgcaatggatgctgaaccgccggctctcgccgctggcgttatcgccacgttactggagggggggacggctggcgatgtggcgagccgcatgcttaatgcacttcactcgcacattcgtggacgccgcggaggcaagcctaccccccagtccgagctggacctggcaggtgctcttagcggattcctctcctcgggaaagatccgcggtgccaaacgccagctgattgtcagcgaagttcagcgtatcgcagagttgcggcagcaactgcaattaacgggcgaccctgcggaggactggttgcagctgcgcggcctgttgcaagcgtccgctgcggtagccttgaagcaagtagcaacagatgctcgctaccttcgacttcttcatcgtggctcggtactgcgggctaacttgggtgcgctgtggcgtgcccagggagagtacaagggggctgaggaagcagtccgcagtgccttgatgcaggagcatttcgctgcaggtcaaaaggactggcgcggcatccacctaatgacgatacataagtccaaagggaaagagttcgacgaggtcatcatctacgacggcctattccagcgcattgccaaagccccgcaggatccaaaaatctgcgctcaggatcttttagtgctacgggtgggagtgactcgggcgatacgtcgaaccaccattctgactccgaagcgcgatacctgccctttcctgtga

SEQ ID NO: 74444 - DNA, 2139 bp, Pseudomonas aeruginosa BWH031; identical to SEQ ID NO: 73802

SEQ ID NO: 74445 - DNA, 1782 bp, Pseudomonas aeruginosa BWH031; identical to SEQ ID NO: 73803

SEQ ID NO: 74446 - DNA, 1905 bp, Pseudomonas aeruginosa BWH030; identical to SEQ ID NO: 72778

SEQ ID NO: 74447 - DNA, 1551 bp, Pseudomonas aeruginosa BWH030; identical to SEQ ID NO: 73783

SEQ ID NO: 74448 - DNA, 1959 bp, Pseudomonas aeruginosa 3577; identical to SEQ ID NO: 73774

SEQ ID NO: 74449 - DNA, 1896 bp, Pseudomonas aeruginosa 3577; identical to SEQ ID NO: 73775

SEQ ID NO: 74450 - DNA, 2115 bp, Pseudomonas aeruginosa PAO1-GFP; identical to SEQ ID NO: 72562

SEQ ID NO: 74451 - DNA, 429 bp, Pseudomonas aeruginosa PAO1-GFP; identical to SEQ ID NO: 72561

SEQ ID NO: 74452 - DNA, 2424 bp, Pseudomonas aeruginosa BWH058; identical to SEQ ID NO: 71738

SEQ ID NO: 74453 - DNA, 1932 bp, Pseudomonas aeruginosa BWH058; identical to SEQ ID NO: 71739

SEQ ID NO: 74454 - DNA, 2355 bp, Pseudomonas aeruginosa BWH057
atgaccacagaccagatctctgcttcctctctcaccgatagcccacccttgatcccagcggggccttcccccaaagcagctgtagctatcgacaccccgccgctccggctcgcctgccttgaggtctgtaattttcgacgcctagccaagacccgacttgagctcgacgaggtcactaccattttggtaggtgccaacaacagcggcaaaacttcccttctcacagtcctccgcaacttcttgagcgagtcacccggattccgcgcgttcgacattagcctttcgcagtgggcgaagttgcgcgaggtatgccaccgctgggaggcacttgatgaggatcccacgacggactccaaggatgccgaatcatgggaagccgagtatcaggaactccaggcgtgcatgcccttcattgatctttggttcgacgctaaggagggggcgtacagccatgttgcgccgttcatcacctcgctgaagtggtcgggtggcgcagttggtgtacgggtacggctcgaacctgttgcagacgcgaacgaacttcgcaatctggcttggcgctaccgtgaggcgcgcgccccggtccgagagcttccgaaggatggccatgcctggccgatagatctgcttgactactggcttagacattctgcagatctgcgacgcatagcagcttaccgtcttgaccccgtgaagggccccttggccgataaatcgcgccgtgacttgcaggagctgccacttggatcacaaccgatcgagttacagcatctgcgcaagctcattcgtgtggattttgtaccggctcaacgaggactcggtgccgaagaggacgaaatgcggtcagagtccgcaagttctcggcccggattgttctcaagccaactcatgaagttcgctcggcaacacttgaacgtagccccatccggtcacggacatcgagaagacttggtcaaggccgttgctaatgcacaagcagacctcgacaaatctatctacaaggcgttaaagccagcgatggaggacgtggagattctgggttacccaggcctacatgaccctcaccagttccattttcgtacaagaatccagaccgcagaccttcttgctcacagcacggccgtacagtacctcctggacaaaactgctgttgatgagtccttgcctgaacactctattggcctcggctatcagaatctgcagtctctgagcttcatgctcgtgtcgttccgcgccgcacgcctcaatccgccgcagggcagtccggcggcagttcacctcgtgatggttgaagagcctgaggcccatttgcacgttcaggttcaacgaaatttttcgaagaacgcccacgagctcattcgtccaaaggagcacgtgcatagctacctccgcagtcagctgctgatcagcacgcactcgagccatctggctcatggagacaacttcacgcggctacggtacgtgaggcgggtggccagcacgggacttggcgcaaaacccagcacgcaggtcgttaacctgggcgatgcgttcggcgaagacgctccaaccaggacgttcgccgaacgctactttcaggtgcaacacaccgacctgcttttcgctgacgccgccatcttcgtggaaggaacagcagagagaatgctggtgccacttttcatcgagcgggatttccccaagcttgccaagaagtacgtttctttcctcgacatcggcggtagccacgctcaccgccttaaacccctggtggagcgattggggattccgacgatcgttatcactgacttggatccggttctgccaacccgaaccgataaggggcgcctagtccgggcagcggtgcacatcgccggccaagaaaagttagagtgtgggaatgacacattgacctcatggcatccgatgctggcggagtttcaagcttttggaaagccgacgcctgcccagctggtgtggacatccgacacgggcgctcaagtccgcttcgcgtggcagcttccggttgcggctgccagcgagcagtggcccagctcgtttgaggactctctagttctctccaacatcgattggttcaaagcgttggaagaggaggttgaccccatcaccgctgccaaagtaaagcaccgcggcaccttggcaaaggtgataggtcttgtgctcgactacccagaccacgccgagctgctcaaggaactccatgcgatgctccgcgggagcttcagtaaaggagatttcgcggcaaccctgttcgaacggctaaatgctggccaagacctgaaatgccccgcatacatcacagacgcgctcacctggctgagcgggcaactcaacgtcactgcgggagagaccccttga

SEQ ID NO: 74455 - DNA, 1953 bp, Pseudomonas aeruginosa BWH057
ttgagtaccgctctgccatcgtttggaaacgatcgcgacgctcatgtcgtcgaagatatctgcggctacatcacgacaaccccgcctcggagtttctttctcttcgctggcgcagggtccggaaagactcgcacgctaattgaggttttgcgtcgagtcactggagtgataaagcatgaagcaggggctcactatgcagaacgacttaggtctcgtggacagtcggtgcgtgttatcacctacaccaaaaacgcgaccgccgtcgtcaacggtcgtctcggcgaaaattacctgaccgaagtatcgaccatccattccttttgctgggaactcatccagggctttgatgatgacatccgggaagccttgcttgcgttcaatgccgaagatcttgtggctgccaaggcccatgcgatgggtaagaaaaggggcgagtccgacaccgaccggcggaagtatgcggagatcgaggcagaggcggaggaattacggaagactgatgaatttaggtatagcccggacagaaacaccttcggtccgggggcgctatcgcacactaacgttctggacgtgaccgcatggctaattgttaaacgcccaacgctgcagcgcatcctagaagaccgtcaccccctcatccttattgatgaatcccaggacacgatgaagggagtacttgatgcactatttgaactctccaaaaaccgtccggatcgcatcacattggggctcctcggggatcatcggcagcgaatctaccctgacggtcaccacgacttaccgtcacacgtgccggaagactgggcgcgccctgcattgcagatgaatcatcgtagccaaaagcgcattgttgaactcattaacaagatttggggctcggacatccagggccgtactcaacccaagacgggtgtcccccagcaccctaggacagagaaaaacggtggaaccgttcgaatctttgtcggcgatgctaagacggattccgccgagaagatccggagggaaacggaatgcgcgttggccatgtcggccgagactgccttatccgcctggcaagagcgtgggcgtggttacaaaaccctcgcccttgaacacaaacttgccgccaaacgaggcaatttttacgaggcataccgctcgattgagctgctggacaaggatgccgcggtgcccaagagcaatggcgagcggacggggcccactatggtgaggccgctcctcggcccaatggttgaacttgccgaatgtctgcagcctaatggttcagtgaacgagttcgccgtcatggatgtgttgcgtaggcacggcgcacttgcaaatgtcccggaatctcgcgccgagcgtcaggccgcgctggacaaagctcacgctgcagttatgaggttcgcaaccgccgccgccaagcccggaataaccgtgcgagaagtcttggaaccaatcatcgaagccagcctcttcgaagcggatagtcgcctagtcgaggcctacggtgattcgtcgccgcctcctccagagccaaagacaaggagcaaggaagcgaaggaggaccgacgtaagcgtggctggcacgccctcttcggcacgccctggcaagaaattgctcgttatcacgcctatcttgggggtgaaaccgaactcgcgacgcatcaagtcgttaaaggttctgagttcaagcatgtcatggtcatcatggatgatgaggaagctggcggcacgtggttctcctacgacaagctcttcggcgctgaggaattgagcccgactgatcttgagaacgttgacgggggaaaagagaccactattgatcggaccctaaggctactttatgtcacctgcagtcgagccgaggaaagcctcgctctggttctttgggcgaagaaccccgctacagcgctcgacgcaatcaaacagtccgaatggtttaccgagaacgagcttaccgctttgtag

SEQ ID NO: 74456 - DNA, 2355 bp, Pseudomonas aeruginosa BWH056; identical to SEQ ID NO: 74454

SEQ ID NO: 74457 - DNA, 1953 bp, Pseudomonas aeruginosa BWH056; identical to SEQ ID NO: 74455

SEQ ID NO: 74458 - DNA, 2304 bp, Pseudomonas aeruginosa BWH055
atgcgaatcaagtttgtggagatttccaatttccgaaagctgaaatctacccatctcgatttagataaaaacacgacgattctggtcggtgccaacaacagcggaaagacctctgcaatgctggcgctgcgcatcttcctactatcacctacgcgcttgaatcttcgcgacgtcacaattgccaattggaccaagattgatctactggggagcgagtgggaagccggtgcggagcccaccgtcgatctggattcgctacttccctcgctggatgtctggcttgacgttccgctccgcgagatccagcacgtcgtcgatatcctaccaacgttagattggtccggcgggctgctgggggttcgactagcgtttcgaataaaaaatctcgacaaactcaagagcgaatatatcgcgcaacgaactgcggcgcgggacgcggctatcgttgggccgaacggtgagtcgatcaagattgcagtctggccacgcaaccttacagaatttctggagcgtcggctgcgagcacatcttgaactcctagcctatccccttgacccagctgctgttgttccgccgggaagaagcggcctcgcgacgccgcaaaggctccccgccaccgcacttgcgttcgagcatccaccattcaaaaaactcatcaagattgacgaaatcgccgcgcagcgcgacttcgccgacgctagcagcagtgacggcggtgaagacaagggggaggcgaacaatcgtcggttcaaacgtcgcctctcagaccagttacgctcctattatgatcgccatctcgacccgacgaagacgccatcggacaaggactatgaagcgctcggagcaattcaagcggctgagcgcagttttgacgcgcgacttgaggaaggcttttccgctgcctttcaagagctagaggatctgggttatccaggcatgagtaatcccaagctcaagatctcgacccttcttcggggaacggatgggctcaagcatggatcgtccgtgcagtaccaggttgcagacccttcaggggacggcagcaacaccctccaactaccagaggactattcggggctcgggtatcagaacctgattgccatggtgttcatgttgatgggcttccgcgacgagtggatgcgcgtagagaaagccggcattctcgagggggccgacgtgtcacacgagatacagccactgcacctcgtgctagtagaggaacccgaagcccatcttcatgcacaggtccagcaggtcttcattaacaaggcctatacactactccgaaagcacgccgatctgggtgtcgcggaaaactattgcactcaactgatcgtcagtacgcactcgagtcacgtcgcgcacgaagctgacttcgccaatttacgctattttcggcgccggccggcggccagcatgggggagacgccgaccactacggtggccaatctgtcctacatcttcggtgatggggacgagacaaagcgcttcgtgaaacgctacctcaaggcgacccactgcgatctcttcttcgcagacggcgtcatcttcgtcgagggacaggcggagcgcatcctggtgcctcacttcatccgccatcattttccagagctgtcgcggcgctacgttacgttgctcgaactcggcggaagtcacgtgcacagcttccgcaatttagtcgacgcgctcggcatcgcgacgctgatcattggcgatctggatgccacaacggcggttaagattatcgacaaaaatatgcgagaaacaactcgttggaagtcggctcgccccgagcagggcaaagctcagcaaaccgcaaactcagttctcaaagattggcaccccgggaaaaagcttattgatgaactcgtcgcgctaccgcccgatggacacatttcaacggctggcggcgactatgagctgtatgtcgcctatcaaaagccagtcaacgtgaagggtgcttccgaagacagcgacctcatcattccgcgaacctttgaggacgccttgatcctggagaatttggcagtcgctggaaagatcgaaggttcgatcacctcggccaaggttcgcggcattgtcgctcaggatctgtccggagatgagcttgaggatgagctgtttgagctgttgaagacggccgagaaagcggcgttcgcgctcgactgtctcatgttggaggaccccaaggcgctcaagccaccaggctatattgcggccggtctcaagtggtttgaaggggcggtaggtaaggacatcgcccagagcgaaatccagggagcagaggatcagcatgatcattga

SEQ ID NO: 74459 - DNA, 1911 bp, Pseudomonas aeruginosa BWH055
atgatcattgaaacggccgcgccagacttcgatgagagcgccgacgtacagatacgggcctgtctgaatcccgccgcgccgcaaagcttttttctctacgccggggcaggatccggtaagacgcgctctctgaaaagggcgctcgacacctttcgcgaagatcatggcgcgacctttaggcggactggtaagaagatcgcggtcattacatatacgaacgtcgcggccgacgaaatcgccgaacgtgtcggagaggatccgctgtttcctatatcgacgatccacagcttctgctggcgccatatcgaggcctaccatcgtgatatccaggcgtggctcctcaacagacttccggttgagcttgccgacctacgcgagaagcaagcgaaggggcgctctggcaccaaggccgcgcaagaccgcgagagggccatcgcttccacgatgcaacggattgagtggctcagtgttcctcggcggtttacctacagccccaacggcgataattttggtcaggactcgctatcccacgcagaggtgctgaaaattaccgctgcgttcattgaaaccaaaccatcgatgcaggcgatcttggttaacagatttcccttcttgctcatcgacgagagtcaggatacgaatagagggctgatagaagccttctttgccctagctgccgcacacaagggcaagttcgcgattggcctattcggcgataccatgcaacgcattttcttggatggtcatcccgagctggagcgtctggttcccgcagactgggcgcgtccggctaagcgccttaaccatcgttccccccaacgcgtgattgccctcggcaatgtgctaagagagcctgttgatggccaataccaggtagcccgcgaagacagcgaaatcggtattgtccgtctctttgtgtctcccagcgatgtccttgataagcctgcacttgagcggcgcgcgcgcgatcgaatggccgacttgtgtaacgatctccagtggcgtgaggaggctgcggtcaaagcgctgacgctcgaacatcacatggcggcatcacgccgtggtttcttggagatgttccaggcgctcaaccaggattcacgcctatcgacaggtctgcgcacaggggacttagccgggctcagattattcaccgatagagtcgccccgctgattgccgccgcgcgtatgaaggatgacttcgcagtgatggcgcagctgcgcgcgacctcgccgcttctccagcgtgcagctatcgctcggctcgcgcacacggatgatccgttattaccgattcgcgccgctgtagaagcactgcttaccctggatactgacggccaggaaaccactttcctcgccgtgttggaatgcgtcgcaaaacatcgtttattcgagattcctgatgcgctacgcccatttgttgcgaatggagctgaagaaaacgatgtcgagctggccggcgatgagagcgcaccgggcgaagaggacgcgccggaagagaggtctcctgcgagcttggaggcctggcgagcattcctggaaacaccgtacaggcagtcgatcccattcgcggaatacgtcagtgataaagggcccctcggtacacatcagggtgtgaaaggcctggagtttgaacgtgtcctggtgatcctcgacgatagcgatgcacgcggctttctgttttcttacgacaagttattcgaagtgacaccagcaacaggagctagtcgtaaaactcctgctgacacggctgaagagggcaccgtgcgcacgcgtcgcctgttatatgtgacctgcactcgtgcccagaaaagcttggcgctggtggcctacacgaaggatcccgaagcgctcattgcggcggcgctgcgcaacaactggttcaaggcggaagaaatcgagcgactatga

SEQ ID NO: 74460 - DNA, 2139 bp, Pseudomonas aeruginosa BWH051; identical to SEQ ID NO: 73802

SEQ ID NO: 74461 - DNA, 1782 bp, Pseudomonas aeruginosa BWH051; identical to SEQ ID NO: 73803

SEQ ID NO: 74462 - DNA, 2292 bp, Pseudomonas aeruginosa BWH049
atgcgaatcaagtttgtggagatttccaatttccgaaagctgaagtctacccatctcgatttagataaaaacacgacgattctggtcggtgccaacaacagcggaaagacctctgcaatgctggcgctgcgcatcttcctactatcacctacgcgcttgaatcttcgcgacgtcacaattgccaattggaccaagattgatctactggggagcgagtgggaagccggtgcggagcccaccgtcgatctggattcgctgcttccctcgctggatgtctggcttgacgttccgctccgcgagatccagcacgtcgtcgatatcctaccaacgttagattggtccggcgggctgctgggggttcgactagcgtttcgaataaaaaatctcgacaaactcaagagcgaatatatcgcgcaacgaactgcggcgcgggacgcggctatcgttgggccgaacggtgagtcgatcaagattgcagtctggccacgcaaccttacagactttctggagcgtcggctgcgagcacatcttgaactcctagcctatccccttgacccggctgctgttgttccgccgggaagaagcggcctcgcgacgccgcaaaggctccccgccagcgcacttgcgttcgagcatccaccattcaaaaaactcatcaagattgacgaaatcgccgcgcagcgcgacttcgccgacgctagcagcagtgacggcggtgaagacaagggggaggcgaacaatcgtcggttcaaacgtcgcctctcagaccagttacgctcctattatgatcgccatctcgacccgacgaagacgccatcggacaaggactatgaagcgctcggagcaattcaagcggctgagcgcagttttgacgcgcgacttgaggaaggcttttccgctgcctttcaagagctagaggatctgggttatccaggcatgagtaatcccaagctcaagatctcgacccttcttcggggaacggatgggctcaagcatggatcgtccgtgcagtaccaggttgcagacccttcaggggacggcagcaacaccctccaactaccagaggactattcggggctcgggtatcagaacctgattgccatggtgttcatgttgatgggcttccgcgacgagtggatgcgcgtagagaaagccggcattctcgagggggccgacgtgtcacacgagatacagccactgcacctcgtgctagtagaggaacccgaagcccatcttcatgcacaggtccagcaggtcttcattaacaaggcctatacactactccgaaagcacgccgatctgggtgtcgcggaaaactattgcactcaactgatcgtcagtacgcactcgagtcacgtcgcgcacgaagctgacttcgccaatttacgctattttcggcgccggccggcggccagcatgggggagacgccgaccactacggtggccaatctgtcctacatcttcggtgatggggacgagacaaagcgcttcgtgaaacgctacctcaaggcgacccactgcgatctcttcttcgcagacggcgtcatcttcgtcgagggacaggcggagcgcatcctggtgcctcacttcatccgccatcattttccagagctgtcgcggcgctacgttacgttgctcgaactcggcggaagtcacgtgcacagcttccgcaatttagtcgacgcgctcggcatcgcgacgctgatcattggcgatctggatgccacaacggcggttaagattatcgacaaaaatatgcgagaaacaactcgttggaagtcggctcgccccgagcagggcaaagctcagcaaaccgcaaactcagttctcaaagattggcaccccgggaaaaagcttattgatgaactcgtcgcgctaccgcccgatggacacatttcaacggctggcggcgactatgagctgtatgtcgcctatcaaaagccagtcaacgtgaagggtgcttccgaagacagcgacctcatcattccgcgaacctttgaggacgccttgatcctggagaatttggcagtcgctggaaagatcgaaggttcgatcacctcggccaaggttcgcggcattgtcgctcaggatctgtccggagatgagcttgaggatgagctgtttgagctgttgaagacggccgagaaagcggcgttcgcgctcgactgtctcatgttggaggaccccaaggcgctcaagcctccaggctatattgcggccggtctcaagtggtttgaaggggcggtaggtaaggacatcgcccagagcgaaatccagggagcagaggattag

SEQ ID NO: 74463 - DNA, 1911 bp, Pseudomonas aeruginosa BWH049
atgatcattgaaacggccgcgccagacttcgatgagagcgccgacgcacagatacgggcctgtctgaatcccgccgcgccgcaaagcttttttctctacgccggggcaggatccggtaagacgcgctctctgaaaagggcgctcgacacctttcgcgaagatcatggcgcgacctttaggcggactggtaagaagatcgcggtcattacatatacgaacgtcgcggccgacgaaatcgccgaacgtgtcggagaggatccgctgtttcctatatcgacgatccacagcttctgctggcgccatatcgaggcctaccatcgtgatatccaggcgtggctcctcaacagacttccggttgagcttgccgacctacgcgagaagcaagcgaaggggcgctctggcaccaaggccgcgcaagaccgcgagagggccatcgcttccacgatgcaacggattgagtggctcagtgttcctcggcggtttacctacagccccaacggcgataattttggtcaggactcgctatcccacgcagaggtgctgaaaatcaccgctgcgttcattgaaaccaaaccatcgatgcaggcgatcttggttaacagatttcccttcttgctcatcgacgagagtcaggatacgaatagagggctgatagaagccttctttgccctagctgccgcacacaagggcaagttcgcgattggcctattcggcgataccatgcaacgcattttcttggatggtcatcccaagctggagcgtctggttcccgcagactgggcgcgtccggctaagcgccttaaccatcgttccccccaacgcgtgattgccctcggcaatgtgctaagagagcctgttgatggccaataccaggtagcccgcgaagacagcgaaatcggtattgtccgtctctttgtgtctcccagcgatgtccttgataagcctgcacttgagcggcgcgcgcgcgatcgaatggccgacttgtgtaacgatctccagtggcgtgaggaggctgcggtcaaagcgctgacgctcgaacatcacatggcggcatcacgccgtggtttcttggagatgttccaggcgctcaaccaggattcacgcctatcgacaggtctgcgcacaggggacctagccgggctcagattattcaccgatagagtcgccccgctgattgccgccgcgcgtatgaaggatgacttcgcagtgatggcgcagctgcgcgcgacctcgccgcttctccagcgtgcagctatcgctcggctcgcgcacacggatgatccgttattaccgattcgcgccgctgtagaagcactgcttaccctggatactgacggccaggaaaccactttcctcgccgtgttggaatgcgtcgcaaaacatcgtttattcgagattcctgatgcgctacgcccatttgttgcgaatggagctgaagaaaacgatgtcgagctggccggcgatgagagcgcaccgggcgaagaggacgcgccggaagagaggtctcctgcgagcttggaggcctggcgagcattcctggaaacaccgtacaggcagtcgatcccattcgcggaatacgtcagtgataaagggcccctcggtacacatcagggtgtgaaaggcctggagtttgaacgtgtcctggtgatcctcgacgatagcgatgcacgcggctttctgttttcttacgacaaattattcgaagcgacaccagcgacaggagctagtcgtaaaactcctgctgacacggctgaagaggacaccgtgcgcacgcgtcgcctgttatatgtgacctgcactcgtgcccagaaaagcttggcgctggtggcctacacgaaggatcccgaagcgctcattgcggcggcgctgcgcaacaactggttcagggcggaagaaatcgagcgactatga

SEQ ID NO: 74464 - DNA, 2139 bp, Pseudomonas sp. RIT288
atgaaagtagtaaggatcgaagttaataattttcgcttattgaagaggttctctcttgatcttgagagcaatctttctctggtgttgggtaaaaataatagcggaaagacttcgctgctctctgcgttagagaaatttataaattcttctgagaagcataaaatagtttttgacgatttcaatgtcgatttaaaagccgccttaatcaaattggtgagcggcgctgatccgataggtccggagaatgcctatatccccttgggtataacgttgaaattatatgttgagtacgatgacgtcgataatttgtcgccagtaagccagttaataatgagcttggatcctgatgataatcatattgtgcttgggtttgagtatctggttagttattctcagttgacggcgatgcggaatgattacaatgctgtaaaagaaaaatatgacaacgattcgagtttgtttcttaaggaaaatcagcatatttactttgatcaagtcaggaaaaaaagcttttcctatagtgatccggatgtgttcacagacttgactaaagaaaacattagtttggctgatgttatttcattcaggtctatcggtgcgaagcggagtgttacgaataaagacaatgataaaaccctctcttctcagactgcaatcatatacaaaaagacatctgagaaccaagagcagcaggaggctgtcgagggctttaagaaacaattgcgctcgacggataaagagctgagcgaaatatatcaggatatgttttctgggttgttgggaaaagttgcaaagtttggcgggtctagattgtccgagacgcatattaaaattgcatccaccctgcagcatcgagagctgttggatggaaatacaactgtgatgtatacccatgacacccatgatcttcccgagcactttaatgggcttggctatatgaatctaatcagcatgatttttgaaatagaaatgttgatgagttcttttcggagatctagtaaagagaatcctgctgcgattaatttactttttattgaggagccggaagcgcatacacatcctcagatgcaatatacttttataaaaaatattaagtccctattaaaagaaagtcgggtgagagaggatggggtggagattcatcttcaaacgattatcagcactcactcatctcatatagtggcagagtgtgatttcgacgatatcaagtacttgaggaagtctcctcttgctaatagtgttgatgcaaaaaatcttaaggcgctcaagtcggagtattcgtccgatgatgtggatgacaatgcccaggctgaactttactacaaattccttaaacaatatcttacgttgaatcgcgccgagctattttttgccgataaagcaatacttattgagggtgatactgagaagattcttctaccagcaatgatgagaaaatttgaccaagaggttcctgatgttggcgctatacctctgctttcacagaatatttcaattgtggaggtaggagcacatgctcaaatttttgaaaagtttatccatttcattggtattaaagctttaattttgaccgatatcgatagcgggattaaagaactgctttttgaaaaggatggagttactccccagttatacaaaaaaggcactcagaaaatagagactataaaatgtcgtcctgatgacccggcggcagaccatacagcaaatggatcgttaatattttatcacggcaaggttagagaagatttggactactttacctcacttagtgttgaaggtaaggctttatccaaagtcggaggcgaatggaaggtcgatgtcgatggctgtatttttctagcatatcagactaaagacgacggctatcatggaagaagcttcgaagatgcatttttttcgctaaacaaagcactacttggaactgactctgaaaagtttccatctctaacgcctaagtggttcaataaatatataaatggcgagtgcgatgcatttgagtttgcagagaaagcagttggcaaaaaaccttcgttagcgattgaagttctgcttaatagtatacctgatgaaaaatcagacttctccaattggaagactcctcattatatccaagagggcttggaatggctgcgcaaatga

SEQ ID NO: 74465 - DNA, 1926 bp, Pseudomonas sp. RIT288
atggctgcgcaaatgaagagcatagaggaggttagtgaagagacgaaaaaaattctagatactatcagtgagggtaagagttttttactgagtggcggtgctgggagtgggaaaacttattctttggtagaggttataacgaaattggttaccctcaagcccttggcacgcgtagcgtgtattacctacaccaacgcggcggtgcgggagattgagggcagagccagtcatccaaatctgcacgtttctacgatccatgattttctgtggggagtaatcaaacactttcaagtggaactaaaggaggttttgttaacgctgattaatgatgacgaaatatcagggtttaaagttttagatagcaatggagagtcggaaaaattagatacaattgagggggacgtaaggtataaggagtacgtaaagtttagggagggggtaatttcacatgatgaggttattgtccttgctaacgaaatgtttaagcgatacgacaagctgtgccggattttgaaagattgttatccatatattatggtggatgagtatcaagatactcaggtggaagttgtagatatacttcttacgcagttggctagagttggtgatccaaatgttgttggcttttttggcgatgcaatgcaagcaatttatgacgaaggtattggtgatttagattcttacaaaggggagggggttgggcaggtaagagaaataaagaaagaagaaaatagaagaaatccacaaaatgtaatcgatttggcaaacaagcttaggaatgatgggctttttcaagttccctctaaagatttaaatgctccaaatatgactggtgaaggtggtgtaaaaagtggtcatatacaatttatatactcttcgaatgatgatattaatgttgtaaaagaatatctgggttgggagttttccgagccatcaggcgctaaggaactcaatctcactcataatctcatcgctgccaaagcagggtttagtgagctgatgaggatttatgatggcgacaaaattttagagtatgtccgtagggtcaaaaattatattaagaaaaatgagcctgcttttaactctgagggaaaaacgttcggagaagtattggccgagttgaagtataagaaaactggtaaagccttaaaagaggttgatcccacagacggcatggcgatatatattgcagaacaccaagccatatatgactctgcgctgggttttccatatggcgaactggcttctttatatattgacaaagaccagcttatagatgatcagaaatctgatcgaagtgagttggggcgtggtgggggtaatagggatgacctgataaaacatttatttaaaatacaaaaaaatgtccagctttacttagatggaatttttaatgagtttcttcgcgtaactgaacatgccgtcaaatctaagaatgataaagttagactgaaggagagggttataaatttatctaaagtcgatgataaaacagtacagcaagtcatcgatgaggcaaatgaaagcggccttgttagaattgacgatcgccttcaatcatttatggagtcgaaacgttatatttatagccaagtggccgcgcttccattttctcaatttcagaaactatttgaatatcttgaagggtttacgccgttctctactcaacataaaaccaaaggtcgagagtttcctgatgttctagttgttctgaacaacggtcggtggaattcctataactttgattatttgttcactgatcgtgtggataaagagagtgtggtgaatcggacgcgaaaaattctctatgtatgctgtacccgtgcaaaatcaaatttggctttattttatcactcgccgtctgaagcagttattgaaaaagcgagggcctggtttggccatgaaaacgtaaaaaatttagattaa

SEQ ID NO: 74466 - DNA, 1257 bp, Acinetobacter sp. Ver3
atgggatcaattgattcaactgagttaagcaaagtatcaatagatttagaagctgcaaatactaaaattattgaacaaccatcaattcaagagttgaataaatcattaggtgaaaaaatcttaggtctttcagggaaagggcatgatttaaaaacatcactgcgcttttctaatgctgatccattaagattatttcgtgccattggtatgtatattgatgaaggaaaacgcagtattacagaagcaagtttagggtcggcgaatgtgatgctgatggctttaaaactagaggaattctcatggcgtaaagctaaaaatgaaagaaattattctctcttatgtatagaggaaccagaagctcacctacacccacaattgcaacgcactgtttttaaaaatatttttaaagaaaaggatgattcgcaagcactgattatcactagtcattcaccaacattggcatctattgtacctctacgttctattattagtttaaggtatgtgaaaaccagtacaaaagcattttcattagcagacttgccaattgaggaagatgaaaaagatgatatagaaagatatttaatagcaactcgttctgagatactgtttgccaaaggagttattttcgttgaaggagatgccgaagaaactctaattccgagttttgctgaaatattagattatgacttagatggattaggtattactgtatgtaatgtttcaggtaataactttaatccatatatcaaactagctgaaggcttaggtatacctattgtagttatcactgattgggatccattagatggaacaaaacctgcactaggaagagcaagatgtgtagggatttgggactctcgttgtgaagttaatactgaattaaacatactaactgaaaaaaatagagaatgggccgagactgctgattttgatgagtttagtagctcatttagtaaagttgggatatttttgaataatgaaacatttgaagttgcgatagcacaaacacctaatttaagttcagtattattagagattttagatgaacaaggttttggatcaacacgtacaaagcgtattaatgaatggaaaactgattccagtaaaatagatagtacacagttacttgctatggtaaaggatattggtaaagggcgcttaagtggaaaattaaaaaagaaaatatctggtgggaaacttatacaagttcctaaatatattcaggatgcaattgagtatatggtgaagaatgtctaa

SEQ ID NO: 74467 - DNA, 1776 bp, Acinetobacter sp. Ver3
atgtctaattacactttacaaaaggcattagcagaattagaaaaaaacaaagagcaatttgaggcagtgcattgtaagactcattgtgttgttttagctggtcctggtagtgggaaaacaaaaactctcacaacagctattgctcgtactcttaaagaagaagttattgctccaagagcaattgcatgtataacttataataatgaatgtgcgattgaacttgaaactcgattatcaaaacttggtattgaaactactggtgcaaattttattggtacagtacatagctttgcattaacacaaataataatgccttattctcggtgtgtagaatgcaatatccctcaagagtttaaagtagcaggttcaaaagaatgccgtatagcgatagaagatgcttataaaaaaatataccaagattctggagacccccataaacaatgggagtttgctaaagaaaagcgaaatcgtgaactagatcggacacaccaaagctggaaaggtcataataaagaactagctgaatttattgaggaatatgaacaggaactaagaaaaaaagaacttattgattttgacgatatgcctcttatagcattcagaatgatcaaagagaatccatggattcgtaaagctttagaagctcgttttccgattttatttgtagacgaatatcaagatttaggtcatgggcttcacgaattagttcagctactttgttttactggaaatgttcggttatttgctgttggagatgcagatcaatctatctatggatttactggtgcaaatcccgaattactccaaagtttaactgtaagacaagatgtccaaacgtttcaattaagatttaattaccgttcaggaacaaaaattgttaaagcatcttcagcagcacttaatgaaaatagatactatgaaagtcctgaagatgcccctgaaggagaaataatatttaattctgtaaatggtgggatagaaggacaggcatatttcattgtaaataaactattatcacagctaaatacgcagggttttaaaaatgaaaatattgcaattttatatagggctgcttggctaggagacaaacttgtagaagctttggaagctaatcaattaccatatcatagaactgatggtaattctttaatcaaaagaagttcaaagttttcccgttttattgaagattgcgcaaaatgggtaactggaggatggaaagatgctgaaccaccatttagggagttatacaacaaagctctaattatagtctatggtcatcactacactcaaaatgaagaacaacaattaggacttcaacttattaattttcttcaaaatagtaagtctataacagaaactgcaaatgaatggttattacgctttaaccaagaactagtaaaaccttggaaaacaatttgccgtaataacttacaagaatgggaaatatgttcagaattattagaaaaaacctcgcctgcatctaataaagatatgtctcttgatctattttctggaaaaactgaagggactggcagattaacacttactacttttcatagctctaaaggccgtgaatttgatgcagttatattatttggacttaacgacgatgtaatacctaactggagagataaaaaatcaccaaaacaattaaaagaggctagaaggcttttttatgtggcggttactcgtcccaaaaaaatactacacttggtctttcaagaaagtaatcattctgagttcttagttgatttctatcgaagaagtacagagtaa

SEQ ID NO: 74468 - DNA, 2091 bp, Peptoclostridium difficile; identical to SEQ ID NO: 73596

SEQ ID NO: 74469 - DNA, 1908 bp, Peptoclostridium difficile; identical to SEQ ID NO: 73597

SEQ ID NO: 74470 - DNA, 1797 bp, Sphingobium lucknowense F2; identical to SEQ ID NO: 73510

SEQ ID NO: 74471 - DNA, 1827 bp, Sphingobium lucknowense F2; identical to SEQ ID NO: 73511

SEQ ID NO: 74472 - DNA, 1926 bp, Salmonella enterica subsp. enterica serovar Typhimurium; identical to SEQ ID NO: 72180

SEQ ID NO: 74473 - DNA, 1662 bp, Salmonella enterica subsp. enterica serovar Typhimurium; identical to SEQ ID NO: 72181

SEQ ID NO: 74474 - DNA, 1803 bp, Pseudomonas aeruginosa ID4365; identical to SEQ ID NO: 71790

SEQ ID NO: 74475 - DNA, 1722 bp, Pseudomonas aeruginosa ID4365
atgacggtcgaacaagactggacaccgcagaagagggactttctgcaaagcacggggcacgtgctcgccatgggtggtccaggctccggaaagacgcatgtcgccctggtcaaagccagggacgagattcgatcagcaaagctcctatcaggccagcgcatcctgtttctcagcttcgcgaggcccacagtggcacgggtccttgagaaagccaaggaactcatcaccgcggatgatctgagacttctagatgtcaacacctatcacggcttcgcatggagcgttctgcgaagtcatggctatctgctcagcaacggaaagccgctccagctcctaccacctcccgagggctccgcgcgcttggctcactttgccaaggagcagcatcaccaggagaagttgcgccttttccatgaagaggggctgctccacttcgacctcttcgcccagttgacggctgaactgctgcgccgcagccggcggctggcaggtatctacacagcgacctacccgatactcgtcgtggacgagttccaggacacgaacgccgacgaatgggcgatggtccgcgagcttggacgcggctgcaggatcattgccttggccgaccccgaccagcgtatttacgaattccgcggcgccgatcctcagcggctcaaggaattcgtggaccagttcgaccccttgccagtcgagtttgaaggggagaatcatcgcagtgccggaaccgacatcgcaacgtacggttcagacttgctcaccgggaaaaacaagggcgccgtctatgccaatgtgtcggtggtcgagtacggcgtgtactacggaaggggtccgcatttccatgcgaaggcccagctcatccaggcaatcaagcgacttcgcaaggagccggcctggtccatcgcagtgctcgtcccatccaaggccttcatgcttcaagtgtccgactacctctccgcggagtccgatggcatgcccaaccttcgccacgaggtggcgatggacgcggaatccccggcgcttgcggcaaacgtcatcgccacgctaatggaaggaggcccttcggagcttctggctgcgcggctactctccgccttacatacccacatccggggccgcagtggcaccaaacgccctgcgcaggcggaactcgacatggccgacgccatcgaccaatacttggtctccggaaagatccgcggcaagaatcgccaagcgttgatcagcgagtgcgcgcgcctagcagcgcttcgccaggacgtcgtattcaccggccatcctgaagaagactggttgactgcgcgggggcttctcgcgacgtctgccgttggccaactgtcgcgcgttgccgctgatgccaagtatctccgcctgcttcacaagggctcaaacctgcgggcgtctttgtcagagctttggagatcccaaggacagtatgtcggcgctatcgaagctgtccggggcgctttgctgcaggagcatttcacagcagccgccaaggaatggcgtggagttcatctcatgaccattcacaaagcaaagggtaaggagtttgacgaggtactgatttacgaagggcgatatgctggacgaattgtgcctgcgaatgcagatacttctcgtcaaagccaagcccttttggcactgcgggtcgcagtcacaagagctatgaagagagcaacaatcctgacgccatcgggagaccgcagcatttttttgtaa

SEQ ID NO: 74476 - DNA, 1926 bp, Salmonella enterica; identical to SEQ ID NO: 72180
  subsp. enterica serovar Typhimurium str. 95799

SEQ ID NO: 74477 - DNA, 1662 bp, Salmonella enterica; identical to SEQ ID NO: 72181
  subsp. enterica serovar Typhimurium str. 95799

SEQ ID NO: 74478 - DNA, 1926 bp, Salmonella enterica; identical to SEQ ID NO: 72180
  subsp. enterica serovar Typhimurium str. 98346

SEQ ID NO: 74479 - DNA, 1662 bp, Salmonella enterica; identical to SEQ ID NO: 72181
  subsp. enterica serovar Typhimurium str. 98346

SEQ ID NO: 74480 - DNA, 1926 bp, Salmonella enterica; identical to SEQ ID NO: 72180
  subsp. enterica serovar Typhimurium str. 116045

SEQ ID NO: 74481 - DNA, 1662 bp, Salmonella enterica; identical to SEQ ID NO: 72181
  subsp. enterica serovar Typhimurium str. 116045

SEQ ID NO: 74482 - DNA, 1926 bp, Salmonella enterica; identical to SEQ ID NO: 72180
  subsp. enterica serovar Typhimurium str. 104772

SEQ ID NO: 74483 - DNA, 1662 bp, Salmonella enterica; identical to SEQ ID NO: 72181
  subsp. enterica serovar Typhimurium str. 104772

SEQ ID NO: 74484 - DNA, 1926 bp, Salmonella enterica; identical to SEQ ID NO: 72180
  subsp. enterica serovar Typhimurium str. 108402

SEQ ID NO: 74485 - DNA, 1662 bp, Salmonella enterica; identical to SEQ ID NO: 72181
  subsp. enterica serovar Typhimurium str. 108402

SEQ ID NO: 74486 - DNA, 1086 bp, Pseudomonas syringae pv. actinidiae ICMP 18884; identical to SEQ ID NO: 73486

SEQ ID NO: 74487 - DNA, 1683 bp, Pseudomonas syringae pv. actinidiae ICMP 18884; identical to SEQ ID NO: 73487

SEQ ID NO: 74488 - DNA, 1905 bp, Pseudomonas syringae pv. actinidiae ICMP 18884; identical to SEQ ID NO: 73484

SEQ ID NO: 74489 - DNA, 1803 bp, Pseudomonas syringae pv. actinidiae ICMP 18884; identical to SEQ ID NO: 73485

SEQ ID NO: 74490 - DNA, 2007 bp, Bordetella hinzii OH87 BAL007II
atgcgcgcctgggctcagaaagccgaacacgccagcaagtcctttctcctcctcagtcgtgaactcgtcgcatccaagccaggactccagggaaacaagaccgctgcaggtaactgcgctataaccgcgatagcgaataatcgatgcggggacggaggatatatgcgcgtcaggcgtttgaagattgaaaacttccgatgcgtctctcaagggagtgttgattttgctgggcacacacttctggtcggaggcaacaacattgggaagtcaacggtgtgcgaggctcttgatctcgtcctcggtcctgagcgcatattccgcaggcctgtcgttgacgagcatgactttcattgtggccgctatctgaatgcggaaggcgcgccggttgaaattcgcattgaggcgatcctggtcgatctttccgaagaggcgcagcggcgctttggtggccatctccgcaggtgggacgacttggcgggtgcgttcatagacgaggagcaggatggtcttggaaaggccgatggtccggcagtgatctgggctctaccacttctgtttgtcggtcggtacgacccggaagaggacgatttcgtcggcaacacattcttcgaccatccaaccaaagaggtcgatgctctcgacgaagaaaccgaggtcaagctcggtcagggccgtgttccgttcacgcgtgtgcacaagcgcctttgcggctttgtgtttttgcggacgttgcggaccggttcacgcgctctcagcctgcagcgcggttcgttgctcgattccgtattgaagctgggcggcgccggtgccgtcgagatgtggcgggacactctggccagactacaagcgcttgacccggcaatcggcgagatcgagcaactgaagcatatccgctcagagttacgatcccggatgggacgcttcgtcaacttggcgcctggtgacgatgcgacggccttctttgcttcggacctgacgcgcgagcatctccgggaagtcgtgcggctgtttatcgcagctcaacctggtcagcatctcgtaccgttcggtcggctgggtactggttcaatcaacctgctggtcttcgctctcctgaccttcattgccgaattgaaggacaagcaatcggtgatcttcgcgatggaggagccggaaattgcgctcccgccacacacgcagcgccgggtgacgcggttcgtgctcgcggaaatggggcaatcgattgtcacttcgcattcaccctacgtgatcgaacagttcgatcatgagcagattgtcatcctgaaccgcaacgagaccggcgctctgacaggccagccgatcgatggccaggcgattaagtccaagacgttccgcgtcgaacggcgtcaattcgccgaggcaattctgagccgggcggtgctggtcgtggagggatcgacggaggcagccctatttccggtagcttcgtcgatcatggaggcgtccctcaatccggaggactacacccacctcgatctggctggcgtcagcattttcaatgccggcggggatggctcggtaccgcgtcatggtccggtgttttcggcgctcggaaagctcgccttcggtttctacgacaaacccaacgccccgctgaaccaggatgcgatggacaagctgaagagctatacgcaggtttgggagtcccccgagaagggcattgaggagctgctcgtaaaggagacgcccatcgcagttgtgaggcggtttctcaatgaggtgaaggatcgacccgactatcccagtgtcggcgtctatgatccggcggcgggcgatggtgaggtaactgcattggcgacgaaggttttgaaggcgcgcaagggcgacgcttacggctatgccgccatgatgatcagccagtgccagcacgccgaccagctaccggcgacgatccgagaaatccttgaaaccatccacaaggcgctgagcgccgtttccgaagatgtcgcagcaccgccgccggacgacttggaggatctcttctaa

SEQ ID NO: 74491 - DNA, 1707 bp, Bordetella hinzii OH87 BAL007II
atgaagctggagctgtgcgaaaaacgcaaggcggtcatcgcacaaggcggacaccttttggtcctcggcgggcccggctccggcaagaccacgatcgccctgctgaaggcccagcgccagtctgcgacgctcaagccaggacagggaatcctctttctcagcttctcgcgcgctgccatccgccaggttctcctgcgctgcaaggagatcctgacgccagccgaacggcgggccgtcaccgtccagacctatcacgccttttgcatggagattctggaagcccacggccgcctcctgcacggccggccgatccgctttctctaccccggggaggaacgtcttcagaaatcggcgttcgatggggattggatggtcgagcgacgacgtctggcatcggagcaagggctctactgcttcgatctcttcgcagcgggcgcggcagacctactggagggatgcgcggcgctgcgcgacctcattgccgatcggtttccgatgatcatcgtcgacgagttccaggacaccgacgacaaccagtggcggatcgttcgcgctctggctgaagtcacggacgtgttctgccttgccgatccagaacagcggatctttgattaccgggatgatatcgatccgcgccggctggatattctccgagaggatatccaggtcaccgagttcgatctgggcggggaaaaccacagaagcccaaacgcgggaatccttcagttcgccgacgcagtactgcacaaccacagtccgctgccggccaccccagacatcaaacaggtttcgtactggcagaacacgtttgccgcaacggtccatgcagcggtgatatggaccttcagcgcgttgcggaagaagggggtcgagcatccgagcgtggcggtgctgtcgagaagcaattcgctcatcgccgacctttcggtgatcctgtcggagacgcacacttacaacaagcagaccctacccatcatcgaacatgatgtcgtttgggatgctgagctttccgcggcggcggcggtggtcgtggcgtcaatcctagaatggccgaccggcccggccgaagagacccttgcgcggacgctccgggtcattgctggatattacaagctgaagaacgcggaggagccgaccaacgccgcggcggagcacgcacgtaagtatgacgaggcggcagccaaggtggcgacgggcgaaggaccgcgcatcaatgccgcgaaagccctcgtcgcggtctacaaggctggcatcgatctggtcggagaacctgtcgcggactggaaagcggcgcgctgggtgcttcacgatattccagcgctgaatgagctgttccgcgaggcccggctagtgcggctgttcagggcgaccgacgctctggcctccggactcggcgagcgttggctcgccttgagcagctatgcaggtgcgagcgaactagtcaaacgtatcctcgagcaggagcggctcgtggcagccgagcgcgacccccaaggctgcatcctgatgaatatgcacaaggccaagggaaaggagttcgatggagtcgttctcgtggaaggcgctttcaagtcgagcttcttcgatgagaggaatgagcagccgccgtttgaacgtagccgccggctgctgcgggtcggcctgacgcgggctaggacgctagtgacgatcgtgcgaccgcagaatgcccggccgctggtcgattga

SEQ ID NO: 74492 - DNA, 1863 bp, Bordetella hinzii 5132
atgcggggacggaggatatatgcgcgtcagcgtttgaagattgaaaacttccgatgcgtctctcaagggagtgttgattttgctgggcacacacttctggtcggaggcaacaacattgggaagtcaacggtgtgcgaggctcttgatctcgtcctcggtcctgagcgcatattccgcaggcctgtcgttgacgagcatgactttcattgtggccgctatctgaatgcggaaggcgcgccggttgaaattcgcattgaggcgatcctggtcgatctttccgaagaggcgcagcggcgctttggtggccatctccgcaggtgggacgacttggcgggtacgttcatagacgaggagcaggatggtcttggaaaggccgatggtccggcagtgatctgggctctaccacttctgtttgtcggtcggtacgacccggaagaggacgatttcgtcggcaacacattcttcgaccatccaaccaaagaggtcgatgctctcgacgaagaaaccgaggtcaagctcggtcagggccgtgttccgttcacgcgtgtgcacaagcgcctttgcggctttgtgtttttgcggacgttgcggaccggttcacgcgctctcagcctgcagcgcggttcgttgctcgattccgtattgaagctgggcggcgccggtgccgtcgagatgtggcgggacactctggccagactacaagcgcttgacccggcaatcggcgagatcgagcaactgaagcatatccgctcagagttacgatcccggatgggacgcttcgtcaacttggcgcctggtgacgatgcgacggccttctttgcttcggacctgacgcgcgagcatctccgggaagtcgtgcggctgtttatcgcagctcaacctggtcagcatctcgtaccgttcggtcggctgggtactggttcaatcaacctgctggtcttcgctctcctgaccttcattgccgaattgaaggacaagcaatcggtgatcttcgcgatggaggagccggaaattgcgctcccgccacacacgcagcgccgggtgacgcggttcgtgctcgcggaaatggggcaatcgattgtcacttcgcattcaccctacgtgatcgaacagttcgatcatgagcagattgtcatcctgaaccgcaacgagaccggcgctctgacaggccagccgatcgatggccaggcgattaagtccaagacgttccgcgtcgaacggcgtcaattcgccgaggcaattctgagccgggcggtgctggtcgtggagggatcgacggaggcagccctatttccggtagcttcgtcgatcatggaggcgtccctcaatccggaggactacacccacctcgatctggctggcgtcagcattttcaatgccggcggggatggctcggtaccgcgtcatggtccggtgttttcggcgctcggaaagctcgccttcggtttctacgacaaacccaacgccccgctgaaccaggatgcgatggacaagctgaagagctatacgcaggtttgggagtcccccgagaagggcattgaggagctgctcgtaaaggagacgcccatcgcagttgtgaggcggtttctcaatgaggtgaaggatcgacccgactatcccagtgtcggcgtctatgatccggcggcgggcgatggtgaggtaactgcattggcgacgaaggttttgaaggcgcgcaagggcgacgcttacggctatgccgccatgatgatcagccagtgccagcacgccgaccagctaccggcgacgatccgagaaatccttgaaaccatccacaaggcgctgagcgccgtttccgaagatgtcgcagcaccgccgccggacgacttggaggatctcttctaa

SEQ ID NO: 74493 - DNA, 1707 bp, Bordetella hinzii 5132
atgaagctggagctgtgcgaaaaacgcaaggcggtcatcgcacaaggcggacaccttttggtcctcggcgggcccggctccggcaagaccacgatcgccctgctgaaggcccagcgccagtctgcgacgctcaagccaggacagggaatcctctttctcagcttctcgcgcgctgccatccgccaggttctcctgcgctgcaaggagatcctgacgccagccgaacggcgggccgtcaccgtccagacctatcacgccttttgcatggagattctggaagcccacggccgcctcctgcacggccggccgatccgctttctctaccccggggaggaacgtcttcagaaatcggcgttcgatggggattggatggtcgagcgacgacgtctggcatcggagcaagggctctactgcttcgatctcttcgcagcgggcgcggcagacctactggagggatgcgcggcgctgcgcgacctcattgccgatcggtttccgatgatcatcgtcgacgagttccaggacaccgacgacaaccagtggcggatcgttcgcgctctggctgaagtcacggacgtgttctgccttgccgatccagaacagcggatctttgattaccgggatgatatcgatccgcgccggctggatattctccgagaggatatccaggtcaccgagttcgatctgggcggggaaaaccacagaagcccaaacgcgggaatccttcagttcgccgacgcagtactgcacaaccacagtccgctgccggccaccccagacatcaaacaggtttcgtactggcagaacacgtttgccgcaacggtccatgcagcggtgatatggaccttcagcgcgttgcggaagaagggggtcgagcatccgagcgtggcggtgctgtcgagaagcaattcgctcatcgccgacctttcggtgatcctgtcggagacgcacacttacaacaagcagaccctacccgtcatcgaacatgatgtcgtttgggatgctgagctttccgcggcggcggcggtggtcgtggcgtcaatcctagaatggccgaccggcccggccgaagagacccttgcgcggacgctccgggtcattgctggatattacaagctgaagaacgcggaggagccgaccaacgccgcggcggagcacgcacgtaagtatgacgaggcggcagccaaggtggcgacgggcgaaggaccgcgcatcaatgccgcgaaagccctcgtcgcggtctacaaggctggcatcgatctggtcggagaacctgtcgcggactggaaagcggcgcgctgggtgcttcacgatattccagcgctgaatgagctgttccgcgaggcccggctagtgcggctgttcagggcgaccgacgctctggcctccggactcggcgagcgttggctcgccttgagcagctatgcaggtgcgagcgaactagtcaaacgtatcctcgagcaggagcggctcgtggcagccgagcgcgacccccaaggctgcatcctgatgaatatgcacaaggccaagggaaaggagttcgatggggtcgttctcgtggaaggcgctttcaagtcgagcttcttcgatgagaggaatgagcagccgccgtttgaacgtagccgccggctgctgcgggtcggcctgacgcgggctaggacgctagtgacgatcgtgcgaccgcagaatgcccggccgctggtcgattga

SEQ ID NO: 74494 - DNA, 2007 bp, Bordetella hinzii CA90 BAL1384
atgcgcgcctgggctcagaaagccgaacacgccagcaagtcctttctcctcctcagtcgtgaactcgttgcatccaagccaggactccagggaaacaagaccgttgcaggtaactgcgctataaccgcgatagcgaataatcgatgcggggacggaggatatatgcgcgtcaggcgtttgaagattgaaaacttccgatgcgtctctcaagggagtgttgattttgctgggcacacacttctggtcggaggcaacaacattgggaagtcaacggtgtgcgaggctcttgatctcgtcctcggtcctgagcgcatattccgcaggcctgtcgttgacgagcatgactttcattgtggccgctatctgaatgcggaaggtgcgccggttgaaattcgcattgaggcgatcctggtcgatctttccgaagaggcgcagcggcgctttggtggccatctccgcaggtgggacgacttggcgggtacgttcatagacgaggagcaggatggtcttggaaaggccgatggtccggcagtgatctgggctctaccacttctgtttgtcggtcggtacgacccggaagaggacgatttcgtcggcaacacattcttcgaccatccaaccaaagaggtcgatgctctcgacgaagaaaccgaggtcaagctcggtcagggccgtgttccgttcacgcgtgtgcacaagcgcctttgcggctttgtgtttttgcggacgttgcggaccggttcacgcgctctcagcctgcagcgcggttcgttgctcgattccgtattgaagctgggcggcgccggtgccgtcgagatgtggcgggacactctggccagactacaagcgcttgacccggcaatcggcgagatcgagcaactgaagcatatccgctcagagttacgatcccggatgggacgcttcgtcaacttggcgcctggtgacgatgcgacggccttctttgcttcggacctgacgcgcgagcatctccgggaagtcgtgcggctgtttatcgcagctcaaccaggtcagcatctcgtaccgttcggtcggctgggtactggttcaatcaacctgctggtcttcgctctcctgaccttcattgccgaattgaaggacaagcaatcggtgatcttcgcgatggaggagccggaaattgcgctcccgccacacacgcagcgccgggtgacgcggttcgtgctcgcggaaatggggcaatcgattgtcacttcgcattcaccctacgtgatcgaacagttcgatcatgagcagattgtcatcctgaaccgcaacgagaccggcgctctgacaggccagccgatcgatggccaggctgttaagtccaagacgttccgcgtcgaacggcgtcaattcgccgaggcaattctgagccgggcggtgctggtcgtggagggatcgacggaggcagccctatttccggtagcttcgtcgattatggaggcgtccctcaatccggaggactacacccacctcgatctggctggtgtcagcattttcaatgccggcggggatggctcggtaccgcgtcatggtccggtgttttcggcgctcggaaagctcgccttcggtttctacgacaaacccaacgccccgctgaaccaggatgcgatggacaagctgaagagctatacgcaggtttgggagtcccccgagaagggcattgaggagctgctcgtaaaggagacgcccatcgcagttgtgaggcggtttctcaatgaggtgaaggatcgacccgactatcccagtgtcggcgtctatgatccggcggcgggcgatggtgaggtaactgcattggcgacgaaggttctgaaggcgcgcaagggcgacgcttacggctatgccgccatgatgatcagccagtgccagcacgccgaccagctaccggcgacgatccgagaaatccttgaaaccatccacaaggcgctgagcgccgtttccgaagatgtcgcagcaccgccgccggacgatttggaggatctcttctaa

SEQ ID NO: 74495 - DNA, 1707 bp, Bordetella hinzii CA90 BAL1384
atgaagctggaactgtgcgaaaaacgcaaggcggtcatcgcacaaggcggacaccttttggtcctcggcgggcccggctccggcaagaccacgatcgccctgctgaaggcccagcgccagtctgcgacgctcaagccaggacagggaatcctctttctcagcttctcgcgcgctgccatccgtcaggttctcctgcgctgcaaggagatcctgacgccagccgaacggcgggccgtcaccgtccagacctatcacgccttttgcatggagattctggaagcccacggccgcctcctgcacggccggccgatccgctttctctaccccggggaggaacgtcttcagaaatcggcgttcgatggggattggatggtcgagcgacgacgtctggcatcggagcaagggctctactgcttcgatctcttcgcagcgggcgcggcagacctactggagggatgcgcggcgctgcgcgagctcattgccgatcggtttccgatgatcatcgtcgacgagttccaggacaccgacgacaaccagtggcggatcgttcgcgctctggctgaggtcacggacgtgttctgccttgccgatccagaacagcggatctttgattaccgggatgatatcgatccgcgccggctggatattctccgagaggatatccaggtcaccgagttcgatctgggcggggaaaaccacagaagcccaaacgcgggaatccttcagttcgccgacgcagtactgcacaaccacagtccgctgccggccaccccagacatcaaacaggtttcgtactggcagaacacgtttgccgcaacggtccatgcagcggtgatatggaccttcagcgcgttgcggaagaagggggtcgagcatccgagcgtggcggtgctgtcgagaagcaattcgctcatcgccgacctttcggtgatcctgtcggagacgcacacttacaacaagcagaccctacccgtcatcgaacatgatgtcgtttgggatgctgagctttccgcggcggcggcggtggtcgtggcgtcaatcctagaatggccgaccggcccggccgaagagacccttgcgcggacgctccgggtcattgctggatattacaaactgaagaacgcggaggagccgaccaacgccgcggcggagcacgcacgtaagtatgacgaggcggcagccaaggtggcgacgggcgaaggaccgcgcatcaatgccgcgaaagccctcgtcgcggtctacaaggctggcatcgatctggtcggagaacctgtcgcggactggaaagcggcgcgctgggtgcttcacgatattccagcgctgaatgagctgttccgcgaggcccggctagtgcggctgttcagggcgaccgactctctggcctccggactcggcgagcgttggctcgccttgagcagctatgcaggtgcgagcgaactagtcaaacgtaccctcgagcaggagcggctcgtggcagccgagcgcgacccccaaggctgcatcctgatgaatatgcacaaggccaagggaaaggagttcgatggggtcgttctcgtggaaggcgctttcaagtcgagcttcttcgatgagaggaatgagcagccgccgtttgaacgtagccgccggctgctgcgggtcggcctgacgcgggctaggacgctagtggcgatcgtgcgaccgcagaatgcccggccgctggtcgattga

SEQ ID NO: 74496 - DNA, 2043 bp, Mycobacterium tuberculosis TKK-01-0051
atgcacgttgagagcatcaagctcaccaacttccaatgcttcggcgctgagccgacgaaaatcgatctcaaccagcagttgacgacttttgtcggcgcgaacgggtccggaaagacagcggtgtgcaccgccctcatgcgactgttcggcatctcccaggagcagcgatccgtccaggccgacgactttcacgtgcctcccgaggaaaaccaacctgccaccacacgaactctcagtatcgaagtcgtcctggcctttccggaactaaacgacgccgtatcgaacagcccacgcgatgagacgaccgccgacgccgagaccgcatctcccgacgacggcgatcccactgctggcgccgacgattcaccgacggtgccccaaccccagaccagcgctcgcgccgagcacgacgccattcccgagttcttccatcagatggctgcaaccgtcgacggcgagctcaaatgccgcatcgtgctcgaggcgacctggactgacgacggatctatcgacggcctcatcgaagaccaacgccgagtcgtctacacattcgacgacgactacggcgaccggtgggtgccgctgcgtggcggcgaccgcaatcgcatccaggtgatctacgtcccggcttcccgcgacggcgcccgctatgtcactacattcctgcgcggcaggctatggcgtgccagcacctggtcgcaggaactggaattgcatgttgcggaagcttcagaccaactcacgagactgttccgcgcggagcaagcggtctccaccgtcgagcagaccctcacccaacgctggcgtgaacttcatcaggccgacaccgacgccgaaccgtcactcgagccagccaaccgcacggccaaagaactggcagccagggccgagttgatgttccagcccagccatacgggccgtcaacgtcaggccgccgccctcagcgatgggcagcgctcgctgctgcagctcgcgctgaccgcggccaccctcgacatcgagaagcggctgtcggaaggacccgttgacgggttcgaattgcccggagccgcgctgccacgtctgacactgctcgtggtcgaagaacccgagaacaacctctcgccgttcttcctatcccgcgtcgtccaccagatgaacagcatggcccaaggtctccgcagtcaagcgatactgtccagccactcggctggcgccctgtcccgaatcgcaccggatcgcgtacgccattttcgcctcgatcatccgacagcccgcgctgtagtcagcaacgtcttactgcccgatgatcagaccgaggctggcaagtatattcgggaagcggtccgcgcttatcccgagctctacttcgcacggtatgttgttctggccgaaggagattccgaggaaatcgtgctaccgacgatcgccaaagctcgaggtgtccctatcgatcgatcgttcgtcgcggtcgtaccgctgggtgggcggcacaccaatcacttctggcggctgctcgaagaccttcgcatcccatacttgacgttgctcgatctggactacggccgttacggcggcggcagcgggcgaatcaaggacgcgtgcgagcggctgatcgcagtcggcgtcgaccccttcgccgacatcgagggctacaattcgatcgacgatgtcagggaactcaccaccccccaaatcagcgcatggatcgcgcacttgcggacgtggaacatctacttctgcacccctttggacctcgacatggctctgctgtctcaccacttcgcggcctacaccacacttgaagccggcgcgctgggccccaagaagcacgacgaccccacaacaacggtgctcggagaacaccgcccgcagacgccatactgggaaagcgaatccagcgttgagcggttgcgctggtaccgctacctgttcctcaccaagtccaagcccagcactcacctgcgggtgatgtccgcgatgacccgcacccagctggcgaacgcccctgcggtgatcgtcgagctcctcgaccagatcaagaacgacctacagctcacatga

SEQ ID NO: 74497 - DNA, 1899 bp, Mycobacterium tuberculosis TKK-01-0051
atgaccgcatcaacaccgccaacgtggcagccccaggggatcgatgatctcgaacccgcggcatgggatgcactgcgccacaacggaaacgcatgcgtgaccgccggtcccggcggcggcaagacagaattcctcgcccaacgcgcaagctatctactcgagactgggatctgccggtcgcctcgcaggattctgtcgatctcattcaaacgagactcggctgctaacctcgaacgacgcgtcgacagccgaacccccgagcacgccgaccgcttcgtgtccatgacattcgacgcgttcaccaagagcatcgtcgaccggttccgtgagctgctgcccccatactggaaactgcaaggctcctacagcatccgctatcccaccagtaaggaagtccgcaactttctcgacaccctctcggaatcggccgatgatgaacatcgttcagcgctctaccgcgtcccgcgaaacacatttctgtccacggtcgtcggctcctacaaccttccggccagcttcagtgaacccacctcggcgggtgaatacgcgatccaacaatggtggaaacagacctacctcggccgggaagacccggcaatcgacttcatcaccatcaaccgactggccgaactggcgattcgctcaaatcctggactacgcaccgccctgcggtggacctacccctatgtgttcatcgatgaatttcaggacacgactttcgcccaatattcgttcctgcgatcggtgttcgacgatgccgcgctagcgtgccagatcaccgtcgtcggcgacaacaagcagcggatcatgggctgggccggcgccctctccgatgccttcgccgaattcagcagtgacttcaccaccgcacgtttcgaattaacctggaacttccgctcatcggacgccctggtggcactgcagcaccgcgtggcccaaatacttgaccccagcgcacgattagcgatttcgaaggcgctcgcggacatcgatgaccaacccgcccaactctggtcttttcgcgaccaacgccacgaggcccaaaccatcgccgcatggatcgccgctgacatcgaggccagcggacgacaatcagcccagtacgcgctggtggcacgccagaccgttgctgaattcgaaaacgacctacgcagcgcgctggcgacgcacggcttgcagctgcgcaacgatgacgccgaagtcggagaactcaaacttcaaatcttgctgaaggatcgactcagtcgactcctacacggactgctcaaacttgccgctccacgaaccggccgagccgggctgcccaccgtctggcgggacgtttcctcgacaatcgcccggctacgcctcggcgaggtgtccgacgtgaccgcgaccgcggtcgacgacgaactgtcggcactgctgcgaccgctgcggacgtggttgcacgacaccccctgtggtcccgacgccgtagacgtgctcatcgagcagctcatcaagctgctcgatgaggtgaccctcggcaactacaccacgatctgcgaccgcaccgaagactcgagcatcagccaagccgcaatcgctcgccggctcaaggacgtcatcacacccggatatggctggtgggatgccgcccagcagtacgacgccccgaacgctgttccgctcctgacgattcatcgaagcaaaggactcgaataccacaccgtcttcttcctcggactcgaagaccaacaatggtgggcacactcgcaagatgtcgccgcctcgatttcgaccttcttcgtcggcttatcgcgcgcagcccaacgcgtcgtattcacccgctgcaacgcacgcggcgacaccgacaacatcacagagttctacgacatcctcgacgatgccggtatctcgatccagaccttctcctag

SEQ ID NO: 74498 - DNA, 1797 bp, Bordetella bronchiseptica 99-R-0433
atgaagattgtgcaggtcaggattacgaactttcgcggtatcgcggagggcacggtgcacttcgatggacacagcgtgctcgttggcgacaacaacgctggcaagtcgacgctgctcgaggcgattgacctcgtgttgggcccagagcgtctctctcgtcgcccagtcgtggacgagcatgacttctacgctggccaatatctcagtgccgacgagcggccgatcccgctgacagtcgaggtaatcgtcgcagacctcaatgatgagcagcttcggcacttccgcgagcatttggaatggtgggatacaaacgcgaaggctgtactggccggtcctccgccagagaacaccgacgccgccggggtcgggccagcactgcgtgtcttcttccgtggcgcctacgacgcggatgaggacgacttcctagggaacactttcttcgcgctgcccgcaccaattggcgccgctgagtaccagacgttccgcgcctccgacaagcgcaagtgcggcttcctatacctacgaacggtgcgcactggctcgcgagcactcagcttggagcgcggttcgttgctcgacgtgatcctgcgacttcaggactcgcgcctcaaaatgtgggaggagttgttgcgttcactgcgcatcctgccggtcgcagacaagcctgagctcggcgtcactgcgctgctgtccgcggtgcaggactcgattaaaagattcgtcccgtctgattgggtagaggatccgcacatgcgcgtctcggatctcacgcgcgaaaccctgcgccgaacattgacggtctttatgggtacaggcgcgaagcgcccggatggcagcacctacgcggctccgtatcagcaccagggcacaggcaccatcaatacgctggtgctcgctctgctgtctatcatcgccgagctcaagcagaacgtcatcttcgccatggaagagcccgagacggcgctacctccgcacacgcagaagcgcatcgtcaatagcgtgcgtgagaagtcggcgcaggccctcttcacgtcgcactccccgtacgtactcgaggagttcgagccagcgcagatcaaggtgctcaagcgcgcgaggggcgtgatgacctccgtttccgccagcctgccgccaacgatcaagcccaagtcctacaaggcggagtttcgggcgcgcttctgcgaggcactgctcgccaagtacgtcctcatcgtcgaggggcgcacggagttcgacgcgctgccggcggccgcgcgtacgctcagccagactgactcccagtactttaagtcgctcgaggcgcttggcgtggcggtcatcgatgcaaagacggactcccaagtggcgccacttggcaacttcttcaaggctctgggcaagacagtcttcgcggttttcgacaaacaggatgagacacagctcgccctcatccgtgctgccgtcgacttcccgtacgagtcgcacatgaagggattcgagtcgctggtgctgcagggcaccagcgaagacgcgattcggcgttatgcgctgggcgtggtggaggacggcgactggccccagcacctggttcacatgacgccgagtgcggagtccgatttggcggcgctgaaggatgcgctttctgagtacttcgcctggggcaaagggagcggccagacggccgacctgctggcgtgctgcacgggttggaaagagatgcctgaatatatcgccagttgcctacatggcatattccgtgtcatcgagcctccgcctccagagcctcctacactgtccgtcgaacctaccgccgcctga

SEQ ID NO: 74499 - DNA, 1704 bp, Bordetella bronchiseptica 99-R-0433
atgagtccgcagaagctcgcgttcctggcgtgccccggacacgcattggccctcgctggcccgggggccggtaagacccacgtggcgctcatcaaagcccagcagcagattgccagcggaacgttgaagccgggccagaaggttctattcctgagctttgcaaggccaacagtcgcgcgcatccttgagaaggcggcggagctcatctcgccggatgagcttaagcacctcgagatcaacacgtaccacggattcgcctggagcatcctgcggagccacggttacctgttgaacaccgctagggccatcacccttttgccgccaccggaggcagcggcccactttgctgacatagacgccagcgtccgcgagcaggaaatgcttcgtctgttcgaagaggaggggcggctgcatttcgacctattcgctcggctggtcgtacagctcttgcagcgcagtgaccggttggcgagaatctactgcgacgcatatccaaccgtgatcctcgacgagttccaggacaccaatgccgatgagtgggcgctcgtccacctgttgggtcgacatagtcgcctgatcgcgctcggggaccccgaccaacgcatatacgagttccggggtgccgatccacgtcgcttgggggacttcgtcgaggtgttccagccgtcgagcttcgatttctcgggtgagaaccaccgaagcagcgggacagacataaccatcttcggcaacgatttgctgactgatcggaaccgtggcagggagtacacgcacgtgaagatcgtgcgctatggcttccgcaggaatcagagcccgcacttccgggcgaaggcggaggtgctggccgcactcaggcgcctgcgcgaccagccgaccgcctcggtgtccgtacttgtgccgtcaaaagcgttcatgctgcagttctcgcagtacctttcttcggaccaggatggactgtccgcactccggcacgatgtggcgatggacgcggagtcgccgtcgctggctgccaacgtcatcgccgtgctgctgggaggaggctctacagcgcagctggcgtcgcgtctggtcgccacgctgcacactcacatccgtggccgtggtggcaataaggctcctgcgcaggcggagatgggcctcgctggcgcgatcggtacttatatgtcgacggggaagatccggggaaagaatagggagctcatcatcaaggaatgccagagaatcgcagccgtacgcgcggatttcaggctctcaggaaacccccaggaagactgggctgtgatgcaacaactgatcgccacgtccaccgctccccaagtggcgcgggtggccgaagacgcgcgttttcttcgcctgctgcacaggggctccgcgctgcgcactgcgctaagtgagatgtggcggacgcggggcgactatgcaggtgcagaggcggcgcttcgcgatgccttgctccaggagcatttcgccgccgcgcagaaggattggcgcgggctgcacttgatgacgatccacaaggccaaggggaaggagttcgacgaggttgtcatctacgaaggttcgttttccgggcgcatcttggctgctaatgctgactctaggcgcatcgcgcagtcgcggctggcgctgcgcgtcgcggttactcgggccatccgccgcacgacgatcgtgaccccccagcgggatggctgtccatttctctag

SEQ ID NO: 74500 - DNA, 1749 bp, Bordetella bronchiseptica 7E71
atgtatttagcacgattgacaatttcgaacttcagaaagctgcaaaaagcagaactggaattccaatctggcctaaacgtcttggttggcgcaaacaacgttgggaagaccgctatcgttgacgctctgcgtgctctgctagcggggcacgatgacccctatccccgcctcgacgctgacgacatccaccggcctcatggtgcgacacccacgggagacatcacgtttcagtacgtgtttcgtgatctggacgaagatgacgaagccgactttcttccggcactgaagatcgacgccgctggcaaggccgaggcgcacatctccattcggtacgcggaggccgacaaggtcggccggctacgcgctaaacgctggtgcggggatcatgaagatgtgggtctgaccgcggacatgatggaaaacttgcgcggggtgtacttgccgccactacgcgatgcctcccagagcctgaagcctagtcgcagcagccaactcgcccgactgtttcatctgctttcggacgacgccggacgcaatgacatcaacgaagcactgaagaagctcgacgaagaactgaaaaagcatgcgccgatcaccaatacccatactgcaattaaaggccggcacgacaccatgctcggaccgcaacttgcccagcttctggaattgggattgagcggaagcgactttcaacggttggcctcgcgcctgtcgctgatggttgatgccttcgaaatcgagcagaacggcctcggcttcaacaatctgattttcatggcggttgttctgagcgaactggcaaagaacccggagtcgagctatcgcggcctcatcgtcgaggagcccgaagcgcatttgcatccccaacttcaagccgtcctgctgagctacttggagacgctgaaggccaccgatggcgaaaagccggttcagctcttcgttacgagccattcgcccaatttcgccagcatcgcccatatcagcagcctgacctgcctgatcgacaccggtagcgcagtcgaaacgttcttcccccgcgacatcgcctttgggaaaggaaagcgagaaaagctggaacgttaccttgacgtaacacgcgcggagattttctttgcccgcagagtcatttttgtcgaaggcgctgccgaactgatgttggtcagcgtgctggccgagaagtccgggtacaaactgcgcgagcatggcgtcagcctgattagcgttgagggcctgaacttcgattccttccttccgctgttcggtgaacaggcattgaagatgcccgttgctgtcatcaccgatgcagaccccgtggatacgcccgctgacggaagcgagccgcaggcgctgtatccggccctcggcgccgttgtcaaggtatccgacaacacgaccaagatgaaggaaagcgaagatgccttcgtgaaggtgttccacggtgtgaagaccttggagtacgacctggcgctgcatgaagccaatcgctctgccatgctgaaggcgctcaaggagcttcacccaaagatcggggagaccgttgaggcttctgtcaatgcggcaagcgacgatgctgaaaaggcgcgcatcttgttcagcggcatgtttgaacgcaaacagaacaatgtccagaaaggacggttcggccaagccctggcgcaagtgttggccgacggcgagacatgtgtcgtacccgagtacatacaaaaagccatcaagcatgcttgccaaaagacacccgcgtgcccatga

SEQ ID NO: 74501 - DNA, 1740 bp, Bordetella bronchiseptica 7E71
atgaaaaagccttcccctgagcagttggcgatcatcagcgcaccactggctcccatgtcggttatcgcgtgcgctggaagcggaaagacacacacggccgtacgtcgactggcggagatgcgccggctgcttggtagccatcgtggccgagtggcgctgctgtccttctccaatgtcgctgtggacacgttccgacaaagctaccagtccttgacccttgaaatgtcggttggtcccagcggccaccgcgttgacatcgatacgttggacggtttcatcacgcgccatgtgcttcacccccatgctcaccggacaatgcaggcaacacaggcggccttccttgtcaccggcggtgagtcgttcctgagcggttttactttcaagccaggcaactaccccgtcagcatcacgtccatgcaggtcgggtggcgtgactcaggcatctacttctactacgcgaacaatgaccaagtcgtggaactgaaccacgggtacgcctctgcgatcgtccatcgcttggggaaggcgagtgcctatacacacaatcttggccgttattggtgttatcgaacactcagggaacagccggtgattctgcgcgccttggcacgccggtatccgcatatcctgattgacgaagctcaggacattggcacgctccatcaggccattcttgaacaactcatcaacgcgggcgtgcaggtatcgctcatcggcgatcccaaccaaggcatctacgagtttgcaggagccaatggaaggtttttgtcgcagtacgggtcgcgtactggcgtcactgggttgaaattgacgcgcaactatcggtccgtaccaccgattctcgaactggcgaataagctatcagcccgtagcgatgatccagaccgcatcgtcccagaaacggcacatggcgcgtacttcatcccctacaagacggctgaccgcgacaacttgatacacgcattcaaagccaccgtcatcgcggcggggctgaaggccgaacgttccgccgtgctctgtcgtggtcgcgaccttgccaacaagttggccggtaacgattcttccgcaggtcagggaaccgtgaaaggcttcgcccaggccgccatcgcccgtgacaagaagcaggactatgtcgaggccttcaaggtcgttgccatttgcattgctggccttctcatcgatttgcccaaggggtgggtggccaccgtcactcagcccgcgcgctattccgaagcccaaccgttgcgtcgtctcatttggcgcttcacgcgaaacccggacgcgggactaccttctgcttccttgcaggcggacaccgaatggcacctattgttgctcaccagggtaaaggcattgctagctacgttggagaaggaccacggcttgaagcctgtcgacaacataggtaggaaactcgccaagacgaaattgcccaatacgccgcttttcgctgccgcagacctggcggcacccaatgccgccagaatccgtgtggatacggttcatcaggcgaaaggcgagagcctggacgctgtcctctacatgaccaccaaagaacatgtcacggccatgctcgatggagtggcctcagaagtcggacgcataggatacgtggccgtgacgcgcgccagggatctcttatggctggctgttccagccaactcgctgtctgagctgcggactaaattggttgcgcacggttttcaagagattggcatgccagccgctcccactagctag

SEQ ID NO: 74502 - DNA, 1872 bp, Acinetobacter baumannii 25977_9; identical to SEQ ID NO: 73700

SEQ ID NO: 74503 - DNA, 1620 bp, Acinetobacter baumannii 25977_9; identical to SEQ ID NO: 74313

SEQ ID NO: 74504 - DNA, 1923 bp, Acinetobacter baumannii 1598530
atgaagttagatacattaagaattagtaattttcaatcatttgggaaagaaccaacagaaattttattagaagatattagctacttaatcggaccgaacggttcaggtaaaacgtctactcttcaagctatttctagactcttctgctttgatccaagcttaagaagaattcagaagactgattttcatattgatccaaatgaagaaatccctcctccacaaagagagctttggattgaagcaaatttttctttccctgagttattagaagatggagagcactcaactattccagaattttttaatcaaatgcgattagatcaggaagaagaaattcctagagtacgctatagattgatagcatccatgggcattgatggggatatagaagaaaatctttattacattttagatgtggatgaaaataatgagcctattagtaaaacaatagtgcctcgttctgatcgtaatcaaatacaagctcactatcttccagccagacgagatccttcaaatcatattagctttggaacaaatgctttactaggtagattattacgtgcaataaattggagcagtgaaagggctgatatcaactcattatcagaacaaataaactcttgtattaccggaaactcatcgatttcatctctttgtaaaaagttagatcaaagttggaaatatttacatacaggaaagttttttacaaaccctaaaatttcattcggaaactcagaggttgaagctttactaaaacacatgtctatttcattttcacctgggcatggtgaaacaaatgttgactattccagattaagtgatggtcaaaaatccatgctttatctttcattagttttatcttctataacactaaatcgagcggtaatttctggggaagaaattgcatttgatatagataaattaaatccccctgtattcagtttaattttaatcgaagaacccgaaaatagtttatcgccgcattatttaggaagaatcagcaatatactaaaaaaattattgggtaaagatacacaagctttaattgcgacccatgctccatcaatattaagacgagtagatccccaaaaaatccgatacttgagattagattcaacttcacgttatacaacgattaaaactattatccttcctaacaaatcagatgaagcacataaatttgtaagagaagcagttcaagcttttcctgaggtttatttcgctcgattagttgtattaggtgaaggagatagtgaagaaattgtcttacctaaattatttgaagcactcggtattcctgttgatgagtccgctatatgtattactccactaggtgggagacatgtaaatcatttttggcgtctattatcctcattagaaatcccatatatcaccttattagatttagatatagcaagacatggtggtggatggggtcgaatcaacactgtaaatgaacaattaaaaaaatttaatccatctttagttttaccagagtcatggccgacatttcctaagtggaatgacccgacctgcttaatacgaacacataattgcattgaaaacactagtatttttaaagtccttgaagaaagaaatatattcttttcagaaccactcgacttagatttttcaatgttgttagccttccctgatgcttataatgtaacaaaagaaactcctgatgaaaaaactatcaaatcagttttagggaaaagtcattttaatgcagatcaatattctatggatgaaaagcaattttttgatacctaccattctcactttaaagttggaagtaaaccagcagcacatattgatggattatcaaatattaaggatgaagacttattacttaacatgcctaaaacctatttaaatttagcaatcaaagtacaagaaatgttggagaatatttccgaatga

SEQ ID NO: 74505 - DNA, 1644 bp, Acinetobacter baumannii 1598530
atgattaaaccggatttatgggttccatcagataatctcactttggaacccaatgctctgctagcagctaaagaacaaacatgctcacttgcattaacagctggaccaggggctggaaaaacagaaatgctagctcaaaaggctgattttttattacgtactagcgcctgtccttatcctaaaagaatattggcaatatcatttaaaaaggatgctagtaaaaatttaaaagaaagggtccaacttagatgcggtgcaaacttatcccgacgctttgatagttttacttttcatgcttttgctaaacgaataattgataagtatagggttttacttactggtttagatgaattagaacccaattactcaatcggaacacaaagaattcataagactcaaattgactttgagtctcttgtacctctagcaatacaaattgtgaatagctctagtattgtacgtaactctatattacaaacttattcagatgtatttttagatgaatttcaagattgtacagaaaaacaatataagcttataaaagccattttccataattcaaatattagattaactgctgttggagatactaagcaaaaaattatgagttgggctggtgcccttgaaggcatatttttaagctttactgctgattttaatgcaaaacccttgaacatgtatcgaaactttcgttcgaaacccaagctattacgcctacaaaatgaaattattcgctatcttgatcctagctcggtaatgagagatgacctaatcattggtaatgatggatctctttcacacaaaacatttcctaatagtttagaagaagctgagtacttatcaaatttgattcagaaatggattatagaagaaaatattcccccctcagaaattgctatactagtatcaaaacaaattgagcattatgccgttgacttaatatctgcgctcagggctaaacaaattccatttagaaatgaacaacgtatgcaagatattgcatctgaaaaagttgcaaaattaattattaattatttactttgcttatatagtcagagaaatcctcatgcatggacgaaagttaatgaaatattattaccatttgaaactgatgaagaattaaaaagttcatttcttagagattttaataacttttttaaagagcaaaaacgattttttttaatatctaataagcaccctcctatcgaaacttggcagcaagctataagtaacttattaactaaactaggaattgctactcttgccacattatcccctgaatatgaatctgaaacttacctatatactgttatcgcagacttaattattaggatacaagagcaaattgatttaaatggcgatctattattatctcttaattcttttggacatgataatacagttaaaattttgaccattcacaaaagtaaagggctggaatttcattccgtcatattattaggtgttgaaaatgaagctttttggggaaatgatgcgagaagtgtattctttgttggagtttctcgagcaaaagataggctagtacttactgaaagcaaaaaacggccattagactccccaccatatagatggaaagaaaatacgactactcacgaagaattctttaattatagagttgattaa

SEQ ID NO: 74506 - DNA, 1872 bp, Acinetobacter baumannii 796380-1375; identical to SEQ ID NO: 73700

SEQ ID NO: 74507 - DNA, 1620 bp, Acinetobacter baumannii 796380-1375; identical to SEQ ID NO: 74313

SEQ ID NO: 74508 - DNA, 1785 bp, Escherichia coli 2-005-03_S3_C2; identical to SEQ ID NO: 73688

SEQ ID NO: 74509 - DNA, 1818 bp, Escherichia coli 2-005-03_S3_C2; identical to SEQ ID NO: 73689

SEQ ID NO: 74510 - DNA, 2316 bp, Klebsiella pneumoniae MGH 63; identical to SEQ ID NO: 73440

SEQ ID NO: 74511 - DNA, 1878 bp, Klebsiella pneumoniae MGH 63; identical to SEQ ID NO: 73441

SEQ ID NO: 74512 - DNA, 2316 bp, Klebsiella pneumoniae MGH 75; identical to SEQ ID NO: 73440

SEQ ID NO: 74513 - DNA, 1878 bp, Klebsiella pneumoniae MGH 75; identical to SEQ ID NO: 73441

SEQ ID NO: 74514 - DNA, 1926 bp, Salmonella enterica subsp. enterica serovar Aqua str. NVSL2001; identical to SEQ ID NO: 72180

SEQ ID NO: 74515 - DNA, 1662 bp, Salmonella enterica subsp. enterica serovar Aqua str. NVSL2001; identical to SEQ ID NO: 72181

SEQ ID NO: 74516 - DNA, 1950 bp, Mycobacterium triplex
atgtatatcgagcggctgcagcttagtaattttcgctgcttcggtcccgcgggtgcagcggtcaatttggatccgcgactgactgctctcattggcggaaatggcgcgggcaagaccgcggtatgcgaagcgcttcttcggatgttcggcactcaagagcagcgccgcgtgcaactcgatgattttcatgtatccagtgcagaaacggagccgccctcggcccgatcgcttcaggtggaagtgatactggcttttcccgagctggagaacgtcgacgaagacgacccggaatctctagctgcagccgatagcgtgccagagttctttcagcagatggcggcaacagaagatggccaccttaagtgccgatttgtgcttagggcgacctggatcgatgacgggtcagttgatggaaatatcggagaagagcgccgtgtcgtccacacgttcgacgaggactacggcgatcgttggtcatcgtttcgtgaggtcgaccgaaatcgcattcagatgctctaccttcccgcagcgcgcgacggcgctcgccagttggctgcgtttatgcgcggacgcctgtggcgagctagccgttggtcaagcgacctcagcgagcacctcgcaggtgccgccgatgacttacttgagaagtttcagtccgaaagtgtggtgaccgcgatttcacaagccctcagcaagcggtggcaacaattgcaccacgccgataccgaggctcggccatcgttcgagccgcttcagagaaacgtcggcgaactatttcgcaacgttgcgctgctatttgagccgtcaccgaccgggcggaagcgggctgccacagcattgagtgacggtcaacgttccctcctccacctcgcgctgtccgcggccacgctggatctcgagagcgactttgttgccgggaagctatcggaccagttcgagctctcgctatcgagcttgccggctttgacactcttggctctcgaagagcccgagaatcacctctcgccatttttcttgtcgcgggtagttgcccagctgaccgagcttgcggaacagacgccgactcaatcgattttggcgagccattcggcgagcgcgttggcgcgggtcgagccggaccaagtgcgtcacatctgtcatgaccgcgtgaccgcaacgagttccattaccccaattgagttgcctgccgacgtcactgaagccagcaagtacatccgcgaggcggtgcgcgcgcaccccgaactctacttctcgcgctatgttgtgttgtgcgagggtgactccgaggaactggttatcccgctccttgcgcaagccaggggcgtgccgattgaccgttcgttcgtcgcagtcgttccgctgggcggacgtcataccaactacttttggcagctcttgtccagcctcaacgtgccgtatgccacgctcctcgatctggactggggacgcgatggcggtggtgtcggaaggatcaagaccgtatgccaagagctcctcaagctaggcgaggatcctttcgctgacatacaaggctacgcacagatcgaagatcttgaagctgatctcgactacaacgaactcatcgcgtggacagagcacctgcgccgcttcaacgtcttcttctccgaaccgctcgacctggatatgtccctgcttgagacgtatttcgattattactcggcagatttggacgagggggcgaaggggccagacttcgattccgatcctacgcccgcggtgttaggacgtgccgatcccgttatcgactactggaaagcgccggagcgcaagcagtatctctcgtggtatcggtacctctttgccaacaagtctaagccagcaagtcatctcagagctctgaccacagttccaacggacaagcttgcccagccgcctaccgtactggccgaccttatcgacacaatcgaaaaggaagtagggctaggatga

SEQ ID NO: 74517 - DNA, 1893 bp, Mycobacterium triplex
atgagcttagtagcaccagatagctggcgccccagcgggattgatgatcttgagcccgcggcgtggcaagctctaagggacgacagatcaacatgcgtgacggctggaccaggcgccggcaaaagcgagttccttgctcagcgagcaagttacctgttactaaccggtctatgtccagcgccgcggcgcatactcgccatatcattcaaacgcgacgcagcctccaacctcgaacgtagagtaggacttagggcgcctgaacatgcccaccgctttacgtcgatgacgtttgacgcgtttacaaagcacatcgtggaccggttcggcaccctgctgcccggacgctggaaaatggctggtgactacaagatccagttcagtagcgataggcaagtcgaagatgtgttgacggaagcatcggccaacgctcccgcaggactgaaaacggcaatcgacgccattccgcgcggcaccttcatgacgtcgatcctgggcacatacgctctcccgattaagccggtcagcccgcccaaagcagtcgactacgccgtcgaagagtggtggcgcagaagctatctggagctgccaacccccgtcgtggagtttgtcatgttgaatcgattggcagagttgattatacggaccagcccacagctacaacgggcgattaacctcacatacccatatgtattcgtggacgaatttcaggacacaactttcgcgcaatacaccttcctaaggtcactatttcgccgaactgccaccgtcacggccgtgggtgaccgcaagcaacgcatcatgggttgggctggcgcgctgactgacgccttctcagagtttcagcgtgactttgcggccgctccctacgccttgcggtggaacttccgctcgacggaggcgctcgttaatcttcagcaccggttcgctcgactcctggattcaaacgcgactactgcagcagcgcaagcgatctcggacatagacggcgaagctgcaacgatgtggtcgttcggtactgcacggttagaggcccgcacgatagccgcttacattgccgccgatactgaatcgacgggccgatcacccgcagactacgcactcatcgcgcgtcaaagagtggctgatttcgagcccgagttccgtgacgctctaagcgagtacgacatcgtggtccgaaatgatgacgcctcagtcggaaagatgaagcttcaggacctactgaaggacaacttggctcagctactactcggagttctcaagctcgccgcgacttcgcgcggtgaagagggtagcccccaggcttgggccggagtctcctcctcgatagccaatctgcggagtggcgacgaccagagcgttttcggctcggtcaggaccgatgatgaacttgcagcacgcctccgcattgtgcgtcagtggatgcgcgaccatgcatgcaaccaagacgcagtggacgcggtagtcgacctggtaacagaaatgatttctgtcatcaccgacggtcggatttacaacctcgccgacacagcggacgattttcaggtccgacaagatgcttttcgcatgcggcttaagacagcatgtgccgacgctggttcctggcgtgctgctgtgaccgcttatgaagcacgagatgcagttccactcttaacaattcatcgaagcaaaggactcgaataccacactgtatttttcttgggtttagatgatgaccagtggtgggcgcaccaacgagatctcgaagcgtccatcgccacattcttcgtagggctatcgcgtgctgcgcaacgagtggtcttcactcagtgcgatacacgcggtggccgacgcaacatcgccgacctctacgaaatacttgatcaggcgggtgttccggtgaccagattcggctag

SEQ ID NO: 74518 - DNA, 2103 bp, Pseudomonas knackmussii B13
atgcgtattgagaaggtaagggtcgagggatttagactgcttcaagatgtcgagatcctgctggagtcaacctccacagtgattgtggggcggaacaatagcggcaagacatcgctcaccgaaatatttgatcgcttcacaggagagaatgggccccgtttccgattggaggacttctcggcgagtgcgcgaggtaagttttttgatgccaaagctttaagactaaaggaagcaagctcggaagcagtgctcgctgcacttccgaaaatcgccctgacgcttaccttcgcttatgacgctgccgcgccaaatctgggcccacttgctccattcgtcatcgacttagatgtgtcatcaactaaggccattgtgcgtgttgagtacgcaccaacgttagcaacgctccacaccttgctcgacgtgcaacctccgccaaaagatgctgatccgagtgcgcactttctccgttctttgcgcgaaacgctccctaaggcgtacgctgtccacgtctgcgccatagaccctacagacgacaccaatcgccgcgacttcgacggaacggccgctctcactgcactgatacagtgcaacttcgtacgcgcccaacgcactctcgaccatgcgaagcatggcgacacagatgttattgggaaattactaagtactctttttaagactgccactgctccgacagctgcagctgctgaccaagagcttgcatccaaactaaaagcatccgtcgaaggcattgaacggagcgttcaaggcgatttcgatgtaatgctgaaaaagctactacctgccatggaagtcatgggattcccgagcctcaatgacaccgagcttcgtccagaaactgcgctgaatgttgaagcgcttctatcggaccatacaagaatcgtctacaccggctcagatggggttcatttacctgaaggctataatggactaggaacccgcaacctgatttatatgcttttgcagcttgagagttaccacaaggcttatcgcgcaaaagtgacccgtcctgttacccaccttatttttatcgaagagccggaagctcacctgcatcctcagatgcaagaagtcttcataaatcaattaaacgcagcaattgggaagctgtcagcgagttatcccgacgagcctgcctggaaagtccaattcgtcatcacaacgcattcgccccatgtcgcgaacgccgcatcctttgaagcagtacgatacttcctgcatgaatctccaaataaaaccggaaaccggcagacaaaggtaaaggacttcaaaaaaggaatgaccagcatatcatctgacgaccaatatttcttgcatcaatacatgacactgaccaaatgcgacctctattttgctgacaaagcaattatggtagagggaaccacagagcgtctcctaatgcctcgattgtgcgagattgctgacaaatcactcgacgaaaaaaacaaacttgcaagacagtatgtaacttgtgtcgaggtaggtggggcccacgcacacatattctaccccctactcgatttccttgaactaaaaacactcatcattaccgacctagattcgacaaaagctgttgaaaggaagaacaagaaaggaacgatggtaaaaaaatgggagaaatgcccagtcgctgaaggtgagcgaatttcgaacgccgcaatcaaggaatggtttcgcccccatgacaagaaagataaagatagctggcagatcactccctccgaacttgcaagcaaaaacactaaagagaaactgagaggctgccgtcgtatagcctatcagatacctgagaatgccgactcggacgtttgtgcccgcagctacgaagacgcccttgttctcgccaacccagatcgttttgattggtcgaaagaactagatgaagcaactgaggcgtgggaaatcgcacagggcctagataaggcggatacagctttgcgatttgcgattcgtgagaaggactggacggtaccgcggtacatccgggaaggcttggtttggctctccgaaccgttttctgctcctacggcagaacattccgtagaaacaccgaaggaagcatcaactggcgaggaaatggcatga

SEQ ID NO: 74519 - DNA, 1737 bp, Pseudomonas knackmussii B13
atgactaaacctgtcgagaacccagccctagttgccgctaaggaagcccagaggaagattgatgaggcccttgatgccggccgtagtttccgtcttgaggcaggtgcaggtgcgggtaagacttactccctagttgctgcactaaagcgcctaatcacagagcgcggacaagcactggtgcaagcaggtcaaaaggtagcctgcataacctacacagaagttgctcgaaacgagattgctcaggagatcgaggatcacccagcaatacttgtcgataccatccatgctttctcatgggcgtttctgcgccaatttcagaaagcgctgcgtaactttattgagtcgatggacgatcggcgcgaaaaaattgagcaaggcggcggcgtaggctcaaagcccgtcgtttacgatcttggcttctttggcgttgatgctagccatatcacgcttggtcatgatgacattccagcaatcatggccaaattcatctctcaggaaaaatttcgccaactatttacaaagcaatttccaattattttcatcgatgagtatcaagatactgaccgccaattcatggaggcaatcaccgagaacttcctgaaagtcggcaatggaccactaatcggactttttggggaccattggcagactatatatcgcagtgagtatgaacttgccgactatccaatggaagagattggtaaaggctccaattttcgctcagcgccggccattgtcaatgtcctaaacaagcttcgcccggagctaacccaggctgtccgcgaccccaacgcttttggagaggcacgattctttcatgccaacgcatatacaggccctaggactgatgacatacattccaagcaagacctaccagccgaactcgcaaagtccacccgcgaagatctgataaatagactccaaaccgagggctgggacctaaataaaacaaaaattctaatgctcacacataacgttcttgctgctgagcaggggtacccaagcattgccaaaatattcagcggccggaccgaattatttgcaaaaaaggaagatccggcaataaagtttttcgctgagattgtcgagcccatgtgcgcagcttataacgcgtctcgctatggcgaaatgttcagaatatttggctcaggccctgcgatcatgaagcataccgataaaatcgcttggcgcgaagacatggacacgcttcagaaacttcgcattgaaggaacaattggtgaagttatcgaccacctaaagagcgcaggacgcccactactaccggaccgcctattacgtcgagatgaagaactcattgcactaaatggcgacccgataccagaggatgccacggcccttcagcgctacagcaagctacgaaatgttcattataaagaagtttctgaactagttaagttcattgaacgacaaactcccttcgccacgcagcacagtgtcaaaggcgctgagttcgagaacgttctcgtcgtactcggcggcggctggaatcactacaactggccccagctactagaacttatcaagagcaagtcactcaccaacaaaaacataaaaggttactatcgagctcgaaatcttttttatgtctcgatatcaagacccatgacacgactggctgttcttgcaacacaatcaatgtcagaaacagctctagagaccgcaaaatatctatttggaaatgattatgttgaagaacttgcaatttccaaccaataa

SEQ ID NO: 74520 - DNA, 1953 bp, Pseudomonas aeruginosa MH38
ttgatactcaagcaaatgcgcgtgtgtggtttccaatcgtttggcgccaagccagtcactatcgattttcgaaagctgactttcttgattgggcccaatggctccgggaaaaccgcaacgttgcaggcgctctgtcgacttttttcgatcgaccccaatcagcgacgtctgcgcaaatctgatttcttcgttgcgcatgatgaagaagaaaggccggatgagcgaacgctgtggatcgaggcagacttctactttcctgaaatcgccgatgagaccaaagagcatccgaccatcccatgtaattttggtcacatgcggttggacagcatcagaggtgtcccgcgtgtgcgatatcgcctggatgcgacgctaggactggacgatgagattgagcagagcctgcgctacgtctcggaagtcgatgaggatggaaatccgatagccacctctccagtgccgcgtgatgagcgtaatcaaatccaggtgcactatctgccagcacgtcgcgatccagcagagcacatcacctacgggactaatgcgctcttgggccgcctgttgcgagccgtgaactggactgagcagcgtgaaaaaatcagccagttgtctgcagatatttctgcaagcctcagtaccaatcaatcggtcatcaacctgggtgacggtattgctaatgcctggggcaagctgcacaaaggcaagtttttcaaagacccgagcttgacctttgttagccatgagatcgaagcattactgcgacacctctcggtttccttcacccctggtcatggcgaacagcaagtagatttttcgcggctcagtgacggtcagaagtcgatgctttacctgaccttggtgctcacctctcaggcgattggcagggctgtgctcaagggcgatgacgattctttcgacttggataagctaaagcctgcagtgttcaccctagtagccctagaagagccagagaatagtctgtctcctcattacctgggccggatcgtatcgtcgctcaaggcattggtgctgggcaaggatgcctatgatgcgcaggcgatgatcgccacgcatgcgccttcaatgttgcggcgcgttgagcctgagcagattcggtatcttaggcttgatgactcgcgctgcacggccgtaaccaagattacgatgcctccgaaggctggtgaggcctacaaatttgtcagggaagcagtgcaagcctttcccgagatatatttctccaggctggtagtgctgggtgagggcgatagcgaggaaattgtgttgccgcgattgcttgctgcagaaggactcatggtggatgaggctgcggtgtgcatcgcgccattgggtggtcgtcacgtaaatcatttctggcgtcttttgagcgggctgaaaatcccttacgttacgcttcttgatcttgacgtggctcggcacggtggcgggtgggggaggatcaactacgttgcaacgcagctcaatctccattgcccaaaccaagggtatatgcctgatgaccagcttgcgaaactcccaagctgggataaccccaaatataaaattctgaaggttgagaaaagtcgggagtggaggaactacatcgctgagcttgaaccgtttgacgttttcttttccagtccaatggacttggacttttccatgctctgcgccttcccacaagcctttggtgtcgaggccaaagaccttgtggcaccgaagatcggccagctcagatccgtgctgggtgatagcttctttgacgaaaaacagtacaccgtgactgagcgtaagcatttcgccgcgtaccacaggttgttcaaggtcgacagcaagcctaagtcgcacattgaggccctttcgaatctctctgacgatgatttgagggagggtatgccaccctcgctcaagcgactggtcaagcatgtgatcaaaatggccagggagcttcacgaatga

SEQ ID NO: 74521 - DNA, 1668 bp, Pseudomonas aeruginosa MH38
atgatcaaggtcgacgcttggaagccttccgccggcatcaagcttgagcctaatgcagagattgccgcgacggagcaacagcgcagtgtagcgctgactgctgggccaggctcgggtaaatcagagttgctggctcagcgcgctgacttcctactcactacgggtgtatgtcgttatcccaaacgcatcttggccatcgccttcaagatcgacgccagtaacaacctgaaggaacgcgtttggcggcgttgcggtgcggcctatgcaggccgcttcgacagctacactttccatggattggcgaagaggatcatcgagcgcttcaggccagtgctagctggcgccgatgcgttaaatccagatttcaaaattgtcgcgaagggcaaggctcaccctgtgcagacggagtttaaagagctcatcccccttgccatcaagatcctggatgcctatccggcggcagtaaatgctatacgccagacctacagcgatgtcttcctagacgaattccaggactgcacggacgagcaatacgagctggtgactaagctgttcaaaggatcaggtcgtcgcgtgacggcggtaggggatgttaagcagaagatcatgggttgggcaggggccctggaaggcgttttcgccagtttcgttgatgactttgaggctcaacatctcaacatctatcggaacttccggtcgcaaccgcatttgctcaggctccagaacgacatcatcaaagtactagatcctgactcggaaatgcctgctcacttgctcgccggtgagggtggagaggtgcatgtattgtcctacgccgattgccaggatgaagccaccgacttggctaagcgcatcgctagctggataaatgtagaaggtatcgctccggctaaaatcgctgtgctaccgcgtaatcaaccggaggcgtattgcattcgacttatggctgagctcgacaattggggcatcagctatcgtaacgaaaacaaggcgcaggacatttctaccgagcctatcgcccaggttatcgtggattacctgctgtgcatttacggcctgagagagcccaaagcctggactcgtctgacgcgtcgaatcatccaagtagaggatgatgcagagagcgaactaaagaccaattggagccgttacatcaaggaagcacggaagtctgctgcggctgatcttgcaactaaaacctttgaccagcgatggacgctactggaggagttcctcaagatggttgggcctgcgctgctggcagggctctcccatgattacgagtcctgggtgcacctgcgagagcagattgagagtgtcaagaaatatatcgatgaagccttggcaaaagaacctgaccttctgaaagcactggcccagctctccgatgatcaatcgattcggatcctcactgtgcacaagagcaagggccttgagttcgacacagtagtattgctgggcgtggagaatcaagcctatttcggcaaggatcaccacgaagtgcagtgcacattcttcgttggtgtatcgcgtgccgagagacggcttgtggtgacgacggcaagtcatcgtcagaatctcgctcagcttgaatactggagatccgcccgcaccgttcaggcggaattccttgcgtacgtgaatctctggaagacccactccaactga

SEQ ID NO: 74522 - DNA, 2442 bp, Bordetella bronchiseptica OSU095
ttgagctcggtttcctgtacctctacacataacaaccgccgtagcatcgacgataacaaatctagtgacatgaagacacatgaaatcccggctgcggcggaatccgctcgtatagcagtccctgtagctttcccagaagcgcctggaacagccacagcggctacaagcgcagcagggttcgcctcttcgcccgtccgcttagcttgcatagaagtctgtaactttcggcggctgtcgcgcactcgtcttgacctcgatgaagagaccaccatattggtgggggccaacaatagcgggaagacctcgctgcttacggtccttcggaactttctgagcgagacatcggctttccgcgcctacgacttgagcctgtcgaactgggccaagctgcgcgacctcagcaaggcctgggaggtgcttgctgatgacccgacaaccgagaccaaagatgaggaggcttgggcggcgcagcttcagaaacttctcgcatgcatgccgttcgtggacctttggttcgacgtgaaggagggcgcctacaactacgtagcgccgttcatcacatcgctgaagtgggcaggcggggctgtaggcgtccgagttcgtctggagccggtgtcgactaccaaggacctacgaaagctggccggcgcgtatcgcgctgcccgggcgcccgtgaaggctctgccgaagaacggccatgcttggcccgttgacatcatcgactactggctcggtaatcccgccgaccttcgccgtgtttctgcatatcgccttgacccggcaaaggggccgcttgcggtcaagaaggacgtgacccttcaggacttggcggcaggcgcgacgcaagtcgaaatcagccaccttcgcaagctcattcgtgttgacttcgttgcggcgcagcgaggcctcggtgccgaggaggacgaagcaaagtcggagacggcgaactctcgcccaggcttgttctcaagccagcttttgaagtttgcgcggcaacatctgaacgtctcgaccagcagctatgggaacggcgaggagctgattgctgcgattgcgaaagcgcaggcagagttggacaagtccgtctacaacgcactgcagccagcgatggaagacgtcgaggtgctcggatacccgggcctacacgacccacagcagttccacttccgcacccgaatcaagacgaccgacctacttgcccacagtactgctgtgcagtacagcgccgacaaaacggtcctagatgaggcccttccagagcactccatcggtctcggatatcagaacctgcagtcgctcagcttcatgctggtttccttccggacggctcgattgaatccacccgagggagcgccggctgcggttcacattgtgatggtggaggagcctgaagctcaccttcacgtgcaggtccagcgcaacttctcatccaacgcgttgggtctcattaaaccaaagggcgagccgcattcgagcctcaagagccaactgctcatcagcactcactcaagccatctggcccatggcgacagcttcacccgacttcgatatgtcaagcggattccaggtacagctactggagcaaagccgagcacggaggtggtgaaccttggcgatgcgttcggcgacgacatcgaaacccggacatttgcggagcgctatttccaggtacagcacaccgatctgctgttcgctgatgccgccatctttgtggaaggaacagcagagcgaatgcttgtgccgctgtttatcgaacgggacttccctaggcttgccaagaagtacctgtcgttcctggacatcggagggagccatgcgcacaggcttaaaccacttgtggaacgtctaggcatcccgacggccgtcgtcaccgacctcgacccggtcatccccaagatcaacaagaagggtcgcttggtccgggctgcagtccacatcgcgggccaagcggagctcgagtgcgggaacgacacgctgacgaagtggcatccgaacctgccgagcttcaacgactacggcaagccgactgcggcacatcttgagtgggtgtctcccacgggcctgaaggtgcgctttgcctggcaggctccggtgactgcagcgagtaaccagtggccgagttcgttcgaagactctctcatccttacgaacatcgactggttcaagaaactggacaacgagaaggatgtcgatgggaagaaggtgaagcacgtcgggacgctgggcaaggtcttggggctcgttctcgaccaccctgaccacgcggagcttctcgaggaactgcacgacatgcttcatggctcattcagcaagggggactttgccgcgacgctgtttgagcggctaaacgctggcacgaatctgaagtgcccggactatatcgctgacgcactgacttggttgagtgctcagctgaaggtcactgagggggagactccatga

SEQ ID NO: 74523 - DNA, 1956 bp, Bordetella bronchiseptica OSU095
atgagcgcggacgtggagcctagaggcaatgagcgcgatgcttatgtggttgaggacatctgcggctatgtcaccgccgcggcaccgcgcagctttttcctgttcgctggagctggctcaggaaagactcgcaccctggtggaagtactccgccgaatcacgggagtggttgagcatcaagccggcagcgagtttgctaagcgcctgcgtagccgaggtcaaacggtccgagttatcacgtacacgaagaacgccacggcagtggttggcggccggttgggggagaatcgcctgaccgtagtctccaccatccactcgttctgctgggaactcatccaaggcttcgatggggacatccaagatgctctgctcgcgttgaacgctaacgcccttgcggaagccaaggcggcagcagcggcgaagaagcgtggagagaccgagacggaccgcagaaagtatgccgagattgaagagaaggccgatgagatccgcggcatcaccaagttcctctatcaccctgacaagacaacccatggtatgggagcgttgtcgcacacgagcgtgctgagcgttgcggcgtggctcatcagcaaccgacctacgctgcgtcgaatccttgaggaccgccatcccctcgttctcatcgacgagtcgcaggacaccatgaagggcatactagatgcgttgctcggcgtggctaaggagcgaccggggagattccatctcggtctactgggagaccatcgacagcgcatttatcccgatggccatagggacctgccatcgcatgtgccggacacgtgggctgtgccagcgctgaagatgaaccatcggagccagaagcgaatcgtcgacctcatcaacgcaatctgggatgccgacgtggttgggcggacccagccgaagacaggcttcgctcagcacccgcggacggagaagaccggtggcatcgttcgaatcttcattggcaatgcgaacgaggtcacggagtcgaagatggagaaggaggcgggctgtgctcgtgtcatggctcaagttacaggacaaaacgcctggagtgatgctgagaagggatacaagacgctggcgctggaacacaagcttgcggccaagcgaggacggttcctcgacgcgtacagcgcgatgcagctcctggacaaggatgctgcgaaccccaagagcaatggtgagcgctcgggtccgaacatggtgcgaccgctacttggctcggtccttgacttggcggaatgcgtcgacatagccggtcagctcgacgagttctcctcgatggaggtacttagacaggccgcagcattagcaaaccttcccgatgatgtggtcgaaaagcgagcggccttggacaaactcagttcagcgatagcagagttcgcgacgctcactcgtaagccagggagtaccgttcgcgacgttatgcgtccgttgcttgaagcgggtgtctttgaagttgatgcccgctttgtgacggcgttcaatgatgagtctgagcctccgccggctccagttggccgaggcaaggaggacaaggaagtcagacggcgcaggggttggtgtgcactcttcgacactgaatgggaggagattgggcgctatcggcagtacttgcgtggtgaaaccgagttggccacccaccaggtggtcaaaggttcagagtttccgcacgtcatggtcgttatggatgaccttgaagcgaagggcagcggcttctcttacgaaagggtgttcggagtcgaggcgctgaacgattccgacttggagagcatcgaagagggcgatgagacatcagtcgaccggacccttcgattgctctacgtcacctgcagtcgagcggaggagagcctggctctagtcctctggtcgaagaaccctcaagcggcgcgcgaggccgttttgaaaactggctggtttgagggcgaagagatagggattttggcctga

SEQ ID NO: 74524 - DNA, 1989 bp, Pseudoalteromonas citrea
atgcatattagtaaaattcgaattcagaattttaggttactcaaagatacaacattagatttagaggatgaagaaaataatgatttatcgcttttgataggtaagaacaattctggaaaaacatctttcatagttttatttgaaaaatttcttaaatctaaaaagttctactttgctgattttccactttcactccgtcaagatatccttaaactaagccatcaaacagatgtgtactcgttagcgataagattatcattagatataacgtataatgaaaaagatagcttacataacctttcagattttattgtagatcttgatacggaatgtaatttggctcgaatctcgattgaagcgactattaataaatcaaaactcttaaaagatcttgaagcagttataaatacaagagaagagttcatcaaaaagaatcttttcgaatatattcaggttaattactatatttttgatgattatagtgattttgagtcaaagcatcgctctaaattaattcaaaaagaagctgcagatgtcaatagcttaatcaatttgaaaataattaaagcaaatagaaatgtaacgagttctgatgcaaaacctcatgaacggaaaatactctcacatttaacaactttgtattataacagtaaagtcaaaatgtctcatgatgaactcgccgctattaattcatcaattattgaagcagatagagagcttagtgataattataaaactttttttgagcctttccttaaaaatggtaagtcttttctgggcctcacagacttaaacgttgtttcggacttgcaatcaaaagaagtaatggcaagtcattccaagataacgtacggaaaggatgataccgagttgcctgagcatcaaaatggtttagggcacatgaatatactctatttacttcttaacatagaaattgaaaagcaagactttttagaggccaatcgagatatcaaccttttatttattgaagagccagaagctcatactcatcctcagctacaatatatatttattgataaaataaaagacactttaaatgagataaaaggtcttcaaactttcatttccacccattctgctcatatcgtcaaaaagtgcaattttaaggatattcgctactttcggactctcaaaaaagaactgaatacagaggttctgaacttctacttagagctacagaaaatgtatgtagatgagtccaatgatgaagaagataaaatagagaaggaaaactttaagtttcttaaacagtatttaacaattgagtcttcagagttattttttgcagagaagatcatctttatcgaaggcacttctgaaaaaatactcctgccatacttcatagaccaatttgataaagaaagagttggtgatgaaggagatattgcacttacttctcaaaatatttcgatacttgaagtcggagcgaatgctaaagcatttaagcacttccttaatttccttcaaataaagacacttatcatcacagacctagatactacaaggtggagtgaaagtagttataaagcatgtcccgttaaagaagggacacatacgagtaatgctactattaggcattactttaattcacccgagtttaaggaaaaagactttcctatatggatggataaattaaaaaaacatcaacacagagatccatcgtcactgatcaaggtagcatatcaagatactgaaaatagttaccaaggaagaagctttgaagagtcttttgtcagtgtaaatatgaaaataattggtcgcaatatcgatgacattagtgggctcaaaaacaaaaagaggtttgaagagtgcaagtctgatcctgacaaatttgtagatataattcttgatagtaagggaaagtctagttttgcttcatccatactcttccttgctctttcaaaagacaatttaaagtggaacactccctcgtatatcaaggagggattaaaatggatagccaaataa

SEQ ID NO: 74525 - DNA, 2028 bp, Pseudoalteromonas citrea
atggatagccaaataacaccacagcaacaaattcaaaaatgtatagctgaaagcatgagttttgttttacagggaggtgcggggtctgggaagactgaaacgctaaaacatactctgcagtttctatcacaagattactctaagaatagggttgcgtgtattacacacactaacttggcagttaatgaaattattgaccgtgttggagatggctataaagtgtccactatacactcatttcttgcggccttaattaagaatcatacaaaagcgattcagcaggttatacatgaaatttttatagtttctaacgtagaatttgaaactgaggaaaattcagacctagctggtaatgaactaaaaaaagctaaccatgataactacaagaggacttataaaaaatacgcaaagctaaaatatatagttaaaggcgaaacttctgccaaagaaataggtaaaagagaatatgataaagctcctactgagcataattatgaactgaatttaaaaatagctgaattgaatgctgaagtctgtaatgttatcaaagataaagatcatcgaaatatcaaatacaatgattcacgctttgataggtttaaagatctatcatttgggcatgacagtttactcaaagttgccgctctactctttaaacgtttcccaaaactaggaaggattttaagtgataagtatgactttgttttaattgatgaatatcaagacacgaatgaagaaattattgaagtgtttttaaagtaccttccaaaagaaagaaaaacgactgttggcttatttggtgattctatgcaaagtatttactctgatggtattggagatgttcgcgcatacattgattcagatcagattgtcgagatagcaaaagaagataatttcagatgttcagagcaggtaattgactttgttaactacttgagaatagatgctctcaaccaaaaactagcattcaaaattaaacaagatggcatcaaagaaatattaaaagataggcaaggacatgttagcttgctttatgctgtctgggataatgtcaagcctcactctaagagctcccctgaaacaaaacaggcatacctagatttcatcgataaattaatagattttgcagatggtgaagagcgatcccataaaaagttaatgcttacaaataagtcaatagcaggcaaagttggctttgctggtttgtacaaagtgttttctgatagatatacggatgtcaaagatgagatcgaaaaagtactttcaagcattcaagtgcttgatctcgcagagttatgtaatgcctatagtggttcggaaaaaaggtataactttatattatctgaacttaaaaagtcagggtttgtacttaaaaccctgagagaaaaagagaggatagtggccgcattcgaaaaaataactagaggaaaccttagtataaataaaactcttgaagtggcttttaaagaaaatattcttgctaagtcagaagctcatctggcttatgttgatcgtaaagaagcttttttatctgaattgaaaaatgatgaagagtatcaacagctcaaaatgattttcaatgcaggatctaatagcttaaccaaaatggtcaagcaagtacctgaattaactgaagaagctttcaatgagttccatagtaacttcaaacgagaaaggttttatcatgatctgttctctgaagagatcagttttagtgagataaacagatattacaaatatctaaatgaggagtgtgatttcattacaatgcataaaactaaaggctcaggtattgagaacgttttagttgtcttagatgagtacttttggaataagtacagttttaagttcagtgatgatagtacagaaacctccagtgtatttacaccccctaacatgaagttgttttatgtagcgtgttctcgaacgataaaaaaccttacagttgtaaaagtggtaacaaaggaagaaaaggagcatctattaaaagtatttcctgaatttgaagaggttccaataaatgaatga

SEQ ID NO: 74526 - DNA, 2442 bp, Bordetella bronchiseptica CA90 BB1334; identical to SEQ ID NO: 74522

SEQ ID NO: 74527 - DNA, 1956 bp, Bordetella bronchiseptica CA90 BB1334; identical to SEQ ID NO: 74523

SEQ ID NO: 74528 - DNA, 1956 bp, Pseudomonas putida
gtgaagctcaagtacattcgcgtctgtggtttccagtcgtttggcgtgaagccggtgacgattgatctggagagtcttacctttctcatcgggccaaacggttctggcaagaccgcaacgctgcaggcgctatgccgcctgttttcatttgaccccaatcaacggcgactccgtcgatccgacttcttcgtgccgcatgacgaggaagatgtgccggctgagcgagcgctctggattgaagcggacttccattttcccgagctgactgacggcggaaatgagcacccgaccatcccttgtcacttcggccacatgcgccttgacgaccttgatggagtgccacgagtcaggtatcgcctggacgcctctatcggccttgaggacgagattgagcagagtttgcgttatgtcctggatgtcgacgagagcggcatccctattgagacggtgcccgtcccgcgagatgagcggacgcagattcaggtgcattacctgccggcacgccgagatcccgctgagcacatcacctatggcgcgaatgcgttgttgggccgtttgctccgtgcggtgaactggacagaccagcgcgagaagatcagccagttgaccaccgatatctcgcagagcctgcgtgataatcgctcggtggtcagccttggtgccggcatcaccaacgcctggaaggcgttgcacaaagggaagtttttcaaagatccaagcttgaccttcgtcgcaaccgagatcgagtcgttgctccggcatttgtcggtgtctttcacgcccgggcacggtgagcagcaggtcgatttttcgaggttgagtgacggccagaaatcgatgctgtacctaacactggtgctgtcctcccaagctatcgggcgctctgtacttggcggcgatgacgagtcgtttgacattgaaaagctgagacctgccgtctttacgatcattgccctggaagagcctgaaaacagtctctcaccgcactacctcggacgcatcgtgtcttcgctgaagacgctggtgggtgaccctcatgcgttcgacgcgcaagcgttgatcgccacgcatgcaccttcaatgctgcgacgtgttgagccgaccgatattcgttatctgaggctcgatgacgcgcggtgcaccgtggtctcaaccattacgatgccgccagacaccaagggcgagtcatacaagttcgtgagggaggccgtgcaggcattccctgagctgtatttctctcgtctggtgatcctgggagagggtgacagtgaggagatcgtgctcccgcgcctgctggccgccaaaaggctgatggttgatgaggcagcggtgactatcgctccactcggtgggcgacacgtcaaccacttctggcgcctgttgagcgggctgaacattccttatgtgacgctgttggatcttgatgtcggtcggcatgggggcggatggggacgtatcaaatacgtcgcgaccgaactgatgaagcaccgccccactgtggcgtacctaacggaagatcaagtctccaaattacccaaatgggacaaccctacataccctctgctggatgtggaaaagaacccgcagtacaagaattacgtgcaggatctagaaccgttgggcgtgtttttctcatcaccgatggatctggatttctcaatgctagtggcctttcccaaggcgttcggcctctcaccaacggacttggcattgccgaaggtcaaccaggtgaaatcggtgctcggggagagctgcttcaagccaacccaatacacgccattgcaacgcaagcatttcattgcgtatcacaagctgttcaagttggacagtaagcccaagtcccatttggaagcgctttcaaagctcacggacgaggagcttctcaaagcgatgccggcctccctgtcgcgcttggttgaccatgtgatcatgcgagtcgaggcgcttcacgaatga

SEQ ID NO: 74529 - DNA, 1698 bp, Pseudomonas putida
atgataaagcctgaggagtggcggtcgtctgagggcatcgtgctggagcccaatgctgaaatgaccgtgcgggagtttcaaaggtgtgtggcgttgacggcaggcccaggttccgggaaatctgagttgctggcacagcgggcggactttctgttgacgacaggtgcctgccgctatcccaagcgaatcttggctatcgccttcaaggtagatgcgagtaacaacctgcgtgaacgggtgttcagccgatgtggggcggattacgcaggtcgcttcgatagctatacctttcatgcgttcgccaagcggattgttgatcgatttcgacccgtgctgacaggtgaggatgcgctgaatgtcggctacaaattggtcgtgaaagggaaggcgcaccccgagcagacggaattctcggcactgattcctttggcgatcaagatccttgatgcctatccgttggcggtcacggccatccggcaaacctacagtgatgtgttcctcgatgagtttcaggactgcacggatgagcagtacgcactgctgcaccgactgtttgccggatcaggacgccgtgtgacggctgtaggggatgaaaagcagaaaatcatgggatgggcaggggccttggacggagtgttcggacgttttgagcacgacttctcggccttgcacctcaacatctatcgcaacttcaggtctcaaccgcagcttctccggcttcagagcgagatcgtaaaagtccttgaccctggctcagagatgccaccggatatgctcaccggggacggtggggaagtccacgtacaggcttaccagagctgcgaggatgaggcgttaagtttggctgggcaaatagtcacttggatcaatgccgatggcatagcgccggccagcatcgcaatcctggtgcgtaatcaaccggaagcgtacacggtgagactggcggcagccttggacagttgggggatcggttaccggaacgaaagccagcttcaagacatcgcgacagagccgatggcattggtcgtggttgattacctgctgtgcgtgtatggcgtacgagagcccatggcctggactcgcttgatgcgacgtctgattccttcggaagatgatgcggatggagcgctacgtacgaattggggtcgattcatcaaagaggctcgcaagttagcggcatcagatctcgcctcgaagtgctatgaccagcgctgggcgttgttgaaagagtttctgtcgatggtcggcgtcagtctgctgactggactttcgcatgattatgaatcgagggagcgactcaaagaggtgattcgcgatgtgaaaaagtacatcgacgaggccctggccagagagcctgacctgctcaaagcgttggcgcagctgtccgatgatcaatcgatccggatacttacggtacacaagagcaaggggttggagtttgacaccgtggtgctattaggcgtggaagatcaagcgtactggggcagggatcagcgagaggtgcgttgcacgttcttcgttggcgtttccagggcagtgagacgtttggtggtgaccacgacagagcatcgcgccaacctgcttaacctgagcacctggcgggagcagcgaaccgggcatcgagaatttctcgactatgtctgccgctggcagaattgcccgaaaacacctggagagctgtgcggccctgagcattga

SEQ ID NO: 74530 - DNA, 1827 bp, Bdellovibrio bacteriovorus
atgtatttgcaaaaagtagaagtaaaaaactttagaaatcttaaatctttctctgtgaattttagcaaaggactcaatgtaataattggagaaaacaatgtaggtaagaccaatctctttgacgcgattaaattagctcttggatatcagtcaacttcagatcctctgaaggtatctaaagacgatttttcacaggctctagatggaacatcttcagatgaacccattacggttaacttggagtttgctgaactttcacccgatgaacaggctgaattcttggagatcttaaattttaatccagtagatcgaacgcaaacgacagcgagcattcactggcagtgcagttggagcaaaattaatgatagagccgagacgaaacgttggggtggtgcaaaagaaagtaccgaaggcggtgtccctgatgacctgcttcagtccattcaagccacctttttgattgccctacgtgatgcggtctcaagtttagccccgggtagagggagtcgtctcggcaagttacttgcagcacgagcgacatctgacgataaggatctgataaaggaaatttttaaaaaggctaacgaggaaattgccgacaaggatctaatcacagcggtcgaagatcaattaaactcagcgctgaaaggagcgactggggagcacatgagccaaaatgttgcaattagggcatctgatccggagttcgagcagatcgttcgtagtcttagaatcgtgcttaaaacagcgggcgttgggggagatttttctagagaattacgatcaaacggattgggatataacaacttactttttatagcgacggttttggccgaacttgagggacttaaatcggcatctcttccacttttcttggtagaagaaccagaagctcatttacatccgcaactgcaggtcgtactaaccaaatttctgcaagaagggctgtttgaaaccagcaagaacagaagagttcagacttttctcagtacacattcaccgacgattgcctcatgcatccccctcaatacgttaattgttatgcatagaggggcggatggttttgttaaatcatttgcactgaaggatgctggattagctgatgttgagcaaagaaaaattcgtcgaatgttggatgttacaaaatcttctttattattttctcgtggtaccatttttgtcgaaggagtttgtgaaggtcttcttgtaccggtattggctaggcgcctgaatattaatttggaggatcgacacatatcggtggtccctatatgcggtgtagattttgagtcgctcactaaactatttggtcctgataaattagacttaaaggtttccgttgtaacggacggagacccaaaaattatcgccggagctgatgggcaatggaggcaagacattcctgcaggatttgctgagcagaatatcgtggcatgtgatcgcgccgttgccttgagaaccgcgcttgctgacagtactgtagtaaagcctttcatctcacaagtaacgctagagtatgacctggcagaagcgaatatcgtcaactcggtagtaatgaaaacggcgtgggaaagtttattttctagtggtagcagtgatgtcatgcgagatgaggattttgttgatgtaacggaaaaaagaattttggcgttagcgatttggcgcggtatttgccgctcaagtacatccaagtctaaagcggattttgccgacgttttggcggaaaagcttttaaaaaagaatgatcaaggtctgttggaagtaccggatggtaacttcgctgtacctctgtatattaaagaggctattgagcatgtcatttcctaa

SEQ ID NO: 74531 - DNA, 1743 bp, Bdellovibrio bacteriovorus
atgtcatttcctaatgaagagcaagcggcaattttggcttcagacagtcgaattacattagttcaggcatctccgggtagcggaaaaacaaaagtgttttcggagtttatccggaccaaaattaatgattttgtagataaaaagggcggactggcagctctttcctttaccaattctgcgagtgaggaaatatcggagcgtttggggatcgacgtttcatcgccacattttgtcggaactcttgattccttcatgtataaatttgtattgaagccatttgcacattgtttcgggttacctaaggctggattgatgatcttgcctagtccgactgaaagaattttcggccgtgacgaagtgcaggttggtgttcaagccagagataagactaatttattcgctgttacgttcaacggcggaacagtccgaaatccaattctgaaatatcaggatgggtataacacttctgttgaagtacaccaatcaaaggttgcagaggtgctttcaaaaaaatgggataaatggaaatctcaaggcgttctcactcattcggattgtcaatatctcgcggcatacatgctgtctgatccaagtttaggtcccaaaattattgatattttatctttgaaatttccttggattcttgttgatgaatatcaggatacgggaaagttcttagctaccggattgttgaaaatattgggcaatgctaatataaaagctttagtggttggggatccggatcaatccgtatttgaattcagcggtgccagtccatcaaactttacagacattggcgccttaagcggcgcaaatatttatcccctgaacaccacccaacgttgtgcccgaaatattgcggctgcgagctcgatgttatcgagcacttccgtaaccgttcggccaagggaagattcggtcccgggaagtttatttatagtgccacatcgtcatactgatccgcgatttgatgaacgggttgtcgatgttatgcagagcttaggggatgatcttggaagtataatggtagtttcgcggaggaataaagacctgagagctttagatggaaactacgttgaaaacgcattcaaaggcactagtgcaatcggcaaaggtttaaattattcgatagagctcctcagaatgggagatgttaaaaaggcattcttggttgcgagtgttcatctgagcaaagttcttttcggtgcggaaatacttaagaaagctgatgctgaggctaaagatatttattggtcgaaatggcgatctgaagtcttaaacatgatttttagattagaaaagatagagcagggcgagtcgtggaatacttggctccagcgtgctaaggctgagtttgaaaatatcgcaactacttttggagcgacagttgacagacttggtaccaagtttagaacccataatgatggtcttcaatctagagagcttacgcagggtgcccaattcgttcatccgctcttgaagaatgccaagtataaaaatattcatgaggcaaaaggtcgtgaagccgataccgttgtgatctatattccgaaaacaaattcagctagatgtatttctaatgtatggtttccaacgcaagggcagtctcaagaagagcaaagagttggttttgtcgcgctttctagggcgaagaagaatgttatcctttgtattcatcaatcgaacttaacgaagttgcaggagcttcgcgcttcgttcgtggaccttttcgttgttcgctga

SEQ ID NO: 74532 - DNA, 2265 bp, Enterobacter cloacae MGH 54; identical to SEQ ID NO: 73134

SEQ ID NO: 74533 - DNA, 1839 bp, Enterobacter cloacae MGH 54; identical to SEQ ID NO: 71713

SEQ ID NO: 74534 - DNA, 1905 bp, Enterobacter cloacae MGH 54
atgaagcttgaagcaatacgtttatctggttttcagtcgtttgggtatgaagcaacagaactcagccttgaagatataacatatatcattggccctaatggttcaggtaaaaccgcagttcttcaggctttgtgtcgactttttgcattcgaccccgcgttaaggcggatccagcgttcagatttccacgtgccctatgatgaggagaacgttccgcttgagcgccagttgtggatagaggctgattttctatttcccgaactggaagaggacgaggacaacagtaccgtagcaccccacttcagccatatgcgactggacgagccagatggggttccgcacgtgcgttttcgcctaacggcaactatggggatagatggcgatattgaagaagctctggtatatgtcctggaagttgatgaagatgatgcacctctaaataccgctcaggttccacgctccgaacgtaatcatatccatgtacactatctgcctgccagacgtgatcccgctgaccatattgcgtacggtgcgaatgcattactcgggcgtttacttcgcgctgttcgttgggacgatgagcgtgaaacgattaaaaacctgaccgatcaaataagcgtcagccttgcggccaatccctcggtgaatgcttttagtgagagtttaaagacaacttggataaaactgcataggggtaaattttttgctgatcctaaaattacttttgtcgcgtcagaaattgaatcgctgttaaggcatctgtctgtttcatttaccccaagtcacgatggctcatttgtcgatttttcaaggctgagcgatggccaaaaatccatgctttacctttcacttgtgttatcgtctcaggctattggcagggccgtgcttgcagaagaagatatatcatttgatcccgataaattacgtcctccggtcttcacactggtagcccttgaagagccagaaaacagcctttccccacattatttgggtcgcattgttagctccctgagtgccatggtaggaaacctagatgcgcaagctctcattgcgacgcatgcgcccacaatgctgcgccgggtagcacctgagttaatacgttatcttcgactgaatgagtcacgagagacgcaggtcacttgtattaaattgcctgatgaaactgatgaggcacataagtttgttagggaagccgtccaggcgtttccggaaatctatttttcacggctggtggtgcttggagaaggtgacagcgaagagattgtgctgccacgcttgcttcaggccaagggtgcgcccgttgatgagtcagccatcactgtagcgcctttaggggggcggcatgtaaaccatttctggcgattactcacagcgttaaagattcccttttttacactgctcgatcttgatgtagcccgccatggggcaggatgggggcgaattaagtacgtaaatgaccaattttccaaacgtcaaaggcgtaacaaacttcctaaaccttacggaattccaaaatgggatgatgaaaaacataaaattcgagactacgaaaattatctcgacatgcttgaagagcgcggcgtgtttttctcctatccgatggatttagactttgcgatgttacttgcgtacccagaagcctataacgtttgggaagagaagcccgacgatgcaactataaaagctgttcttggaaaaagtcattacgattcatctcagtacagggatgatgaattagtgctttttaatacctatcaccaacgtttcaagctcggcagtaaacccgcagcccacattgaggcgttaactcagctaaatgatgctgatctacttaaaaacatgccagattcactggacaggctggctgatgcggttattgccaaactcacggaactgccagaatga

SEQ ID NO: 74535 - DNA, 1665 bp, Enterobacter cloacae MGH 54
atgattactgtcgaagaatggcagcccgcagatggattgacgctggaacctaatgcgaaacgtgcagcgaaagcgcgtaaacgttgcttggcactgacagctggaccgggggcgggtaagacggaaatgcttgcacagcgtgctgacttccttttgcgaacaggaacgtgtcgataccccaaaagaattctggcgatctcatttaaggttgatgccagcagaaatcttacagaacgcgttgaacgcaggtgtggaagatatctggcttctcgctttgacagttttaccttccacgcattcgctaagcgcatcatagatcgatttaggccggtacttacgggagaatatgccttagatgctggctacaccattgtagacaagaaaagcggggcgtctcgtcacgaaatagcattcggcgatctggttccttatgcaattaaaatattgcaaacgtcaaaaatagcccgaaatgcaatccggcaaacttatagtgatattttccttgatgaatttcaggactgcacaaatttacaatatgacttggtaaagcttgcttttaaggggacaaaaattcgactgactgctgtcggtgacacaaaacagaaaatcatggcttgggcaggtgctctggacggcattttccagtccttcacaaaggactttaatgcggtgccgctcaacatatatcgcaatttccgctcaaaaccaactttgctgcgtgttcagaacgaaattattcgtaagttagatcctgactctgtaatgcctgatgctcagttggaaggggacgaaggggaggtttttgcttgcaaatttgaagacagtcaaactgaagctatctatctggctgacctaatttatgaatggattaacacagagaagctacctccagctgaaattgcagtcctaatctctaagcaaccagatttatatgctgatgacctcttcagagagttagagcaacgcggaattccctaccgcaatgagcagcaaatgcaggacatcactgtcgaaccagtggctaggttaatcgttgattacctatcatgcctgtatggacatcgggaacctaaagcctggattcgtctgatgaatcagctggttccctttgctgatgaagaaattcaaaccaacgtacgaaaagatcttgatcacctgattaaaaagcatcgtatgggggtgtctgaagcaaaaaaaacggacaatcccttttcggaatggtggacatttagtcgctctttcttaaagcatataggtttacagatgcttgttgccttatcgcctgaatatgagtcccatgatcgtcttaaacaggttgtgcgcgatgtagaagcacgtattaaagatttactgaaaatcgaatctgatttacccctcgcattaaaacgatttagtgatgatcaagctgtacgcattttgaccattcacaaaagcaaaggattagagtttgattcggttgtaatcatggctatagaaaatgagattttttttggtgatgaagaagagaatcgctgtgcgttttttgtcggtgtttcacgagcaaagagacgccttattttaacgcatactaacaagcgtgatgaacctgctaatgccagatattggaaagtttttaggactgctcgagtagagtatttggattatgttcttccgtttgtgaggtaa

SEQ ID NO: 74536 - DNA, 1701 bp, Escherichia coli CHS 69
atgagaattgaaactgtttatattaaaggattcaggaattactgtgatgctgttattaattttaatgaaactaatttgattataggtgcaaatgatgttggaaagaccaacctattatatgccattcgattattacttgataaaagtttatctgaattagatttagaaccaaaaagcaatgactttcatgtaaattcgacaggtgaacaggttgaaaatatagaaatcactatcaagtttacagatgttagtgaagatgctgtaatatctaaattaggagggtatgttagcgatgaaggggaaacatacattaagtatcttgcttcatcattaactatggattacaagatattacttagtcatgaacataacaattttgatgaggttcctaatagattttacttaaagtgtttaagtctaaggtatataaattcgcaaagagatcttgaaaaatacattaaaattgaaaagaagcatcttttaagattggcgcaagaagttcgtagtgaaaaggatactgaaaatgatggggcggtttttactgaattaaataagctacttactgaagtaaatgaaaaagttaaaggaataagttatgttgcatcagcaacagaagagcttaacgaggaacttagaaagttatcctatactcatgatagattaactgttcaacttgatactggtgcaatagggattgaccagtttatagagaaattagaattaagtgcgaatacaaatgggaagaaactaatgcttggtggcgatgggtttaataaccaaatccttcttgcgttatggaaagcaaaaagtgttcgcgagcatgatgttgaaagtgaagtagtgatctattgtatagaggaaccggaagcacatctatttcctcaccagcaaagaaaattggcggcctatttaatcgataaacttccaggccaagcaatcgttacaagccactcaccccaaattgcagtgaattttaaacctgattcaatcataaaactatactatgatgatggagagactctagccgcaagtaatggatgttctgattgtattagctctgcatgggatggaatgggctaccggatgagtattattcctgctgaggcattttttgctaacgtggtttttttggtcgagggaccatctgaggtgattttttacactgaattagcaaaagcattaagtattgatcttgattattataacatcagcattctttctgttgatggtatccaatttgaagtttatagaaaaatattaacagctctaaatattaattggatcgtaagaacagacaatgatgcttcaaaagtacctcataagaatgaatggcaatatgctggtgtaaatagggcgttagcactgtgtggagagaataaagaaccaaactcaagtattcctatagatagtaaagctttgcatgctaagtggggaaccatttcaccaataataaatcctaacggcgtttatatatctttttttgatcttgaaggagatcttgctaatgacttttcgaagcatgttcttgattatgcaagtaaggataatctagatgatgccgctgattatttgagaggaaaaaaagctatacgtatgcgtgagttaattaaagagaaaaaagcttttttaactgaactgaagagcaaagatatagccagacctctaatacatgcactgaaaattgctagaggtgaattatga

SEQ ID NO: 74537 - DNA, 1623 bp, Escherichia coli CHS 69
atgaagctaactaaggaacagttagatgcaattgattacgaaggtaatctggttataactgcatgcccaggaagtggtaaaacaacaatactcgtccataagattgctgcctgtttatcccattccaaggattatcagggagttgttgcgttatcatatacgaataaatccagcgaggagctaaaagccagatgtagaaaattgggagcagagttaaattctagcttctttggtactattgataagtttttcattaacgaaataatattaccttttgtaaggcaagtatggggcagaaacgaaagcgctctcgaagtagtaaagtatatagatctttctcaagaattaaaagataagacaaataagtactttgaccgagtggatttttattctaatacctcatttgagggcatgggttctctgagggatatttatttaaaggggatgttgattttagacttccttcctcacttggctttttatatagttagaacatcatattcttgtcagcggtatttaatggcaaagtatattggtttttttgtcgatgagtatcaggataccggttattttactcatcaggttttcaagttcataccaacgctagggatgcctcttattatcgttggtgatttggatcaatcaatttatttgtattctcaccgcagttcggattcactaaaagatttcatgaatgatagtggtttctgtcataaggaaattacagtaaatcacagatgtcacccatctatagtaaattacgccaatagaattaaagattttgaatgtcaactagctccgtgtgatgagatttttgtttatagaaaatgtgttgatggcaatcaaattgatatagctaaatggattggtgaagttcttgataatgtaaaaaataaattttcaatatctgataataaggagattgctatattggtaagaagcaatgcttgcgcggagctagtttctgataatttagttgtttctaatagggcttatttggataatgatttaacaaaggctggtggtaaggtttctggtcttgttaatgatttattatgttacaggtataacttaaataaaactgctcagtctattttggagggggttttgggaagcagtgtcaaaaggagcgaggctactcgtatccgtaaggctattaagcaggttagaagtgttacagatgcctttcttattgacgtaataaataaaattgtagtaactcttttagggactgaaatcgagcagcatcataagtccgctctttcagagatattagttactccgaggatgcaaaataattatttggatgttagaagtgatgaagtacaaataatgacgttacataagtctaaaggtcttgagtttgactttgtttttcatttggatctgtatgattggattttgcctaaaagagttttcatagaaggaagctatgatgttgtattcgaaaatgaacagcaatgcataaatcttcattacgtaggaattacacgagcaagaaaaggcattatgctaatgcattctacgaaacggtataatggttcaggtgatcttaagaacggggctccatctcaatttcttttgaaacctgggttagatggcctttataaaaaaataaattaa

SEQ ID NO: 74538 - DNA, 2316 bp, Klebsiella pneumoniae MGH 65; identical to SEQ ID NO: 73440

SEQ ID NO: 74539 - DNA, 1878 bp, Klebsiella pneumoniae MGH 65; identical to SEQ ID NO: 73441

SEQ ID NO: 74540 - DNA, 1833 bp, Klebsiella pneumoniae MGH 72
atgggcgtattatcaaaatcaggtttgttgtataacatttgcaatgtctatcttatctctttgtgtttgaaaggagtcaatgtgtacattaatgaagttaaaattaaaaactatcgttgctttgagatattcatcacaaaattgaatccattcacattaataataggagagaataactcgggtaaaaccaattttcttaaagccctatctttaccacttactatgggaaacttagacttctcacaaaaaagacttgtaatagctgattttaatagtgtatctgtggaaaattgtctcaaacaggcttttaattattataggttgacagcagaagagcagatagaagaaaaaaacttgcaccccttaattgattcgattccaataatcgaggtggaagttaatttttgctgccctcaaaacagctatgaactagccctaatcaatagttttctaactgaaaaagaccaaaaaccagcattcaccattaagtacatatatgaacctaaagacttaaatattcttgaaagaataaaagaacttgttttatcaatagataagattgaggaactgaaatggcaactgtttcctatcgatagttatgaatatgatattgtaaccacatcaaatgataaatctgtatcctacgaaaaactaaaaaatctagtagctaatatcatcggagcagaacgagatgatttttcagactctccggccatgagatcaaacaatatcctaacgaaattattaatcaacgaattaagtaccaaagaaaaagaaatcattaacttggcatacaatgatttctttacgaaagttgaaagcgcaggaactttccaacgattattaaattctgatgcagcttttgataatataaaagaacatttaaaagatattggttgcattcctaacctaccaaatttaaaaaacatcctttcaaatattacattaagctatggaaatgaattcttatatcaaaaagggcttggggagagaaatcttgtatttatattcttattctttacttattttaagaaaaacaacagtgaattcaacctatgctgtgtcgaagaacctgaagctcatttaggcgtcaataaattgagattaacaattgatttcctagaaaaaagtgtaaatgaatcaaactctctattacaaacaattgtaacaactcacaatcctgcgattataaataaattaaaaattagtaatgtagttgctttttcaggaaataaggcagttagtttatcttcatttggtgatgaactgaacgactatcttcgcaaaagaccgaatttcgatattctaaggctgatatatgctgacaagctaatattagttgagggaccatccgaagaaatgctgatcagaacacatatacatttaaatcaagataacttatatgatgttgaagtaatcagtgtcaaccaaaaaggatataagtctttcctagatatttggttactagtaaatgcacataatcacaataaaaaaatagcagtcatccgagattttgacgatcaagaaaatgcacaaaaagaacatgaatcatatagaggaaagcatcctcatatcacagtggaaacgacaatttgctatacactagaagatgatttagtgcatcacggcaataacattcatatcattgctgaaagcttcaaaattgcattaggtgacgatgactctagtgacggagaaatcatttcgatgtttctcaaagatgataaaactggcggaatgttgacactttgtgacgcaatgctcagtaacgaaaaacctttggtcatcgagttgccgccacatattaacaatgtgctgggagccatgcaatga

SEQ ID NO: 74541 - DNA, 1434 bp, Klebsiella pneumoniae MGH 72
atgattactgtacaaattgccggagccggtgcagggaaaacgcatgggcttgcgtcacaaattgctgcgaagttagctgaagctgaaaccgataaaaagattcatgctttaacgtatacaaatactgcacgagataaaataaaatccgcattaaaaatgcatactgatggtgctcgagtcaatgtggataccgttcactctttccttcttaatgaaattatattcccatatgcatactacatattaggtgagaaatataagtccatttctttagaacaattaccagaaaacccaagatataagaacaatcgcattaccactttaaagagaagaggtattatccatgttgaaaatgtatatatcttagcaaaacaaatactagacaaaaccaacgctaagaataagagcaaaacttcaaaaggaaaagtagattttgtccatggtttactaaaaaatctaatctcatcaatatttatagatgaagtccaagacttagatgaggattgtttaagagtatttcacgtacttggcagcattggtatctatgtttatatgattggagatcctaaacaagctataaaacacccaaactccctcaataactatatagaagagtttaaaaaggaagatagtaatgttgtgtttgagaacataaacaatgtaactagacgcgtaccaaattcatcattaagaatatcaaattatttctgctatgcagatcaacaacaaactaacattactgactttgaaggaagtgttcattatatttataatgacaccatgaattttgaaaatgctattcaacagtgtatattgaatgacaagttggttataataaatcaaaaaaacaatttttattgcactaaccttgaaagagataacattattccctatgaattagcaacaattcttgaggatgggccaaaaaggaacaatagagatcctaaaatatatattaactctatcgttatagatttagtagaaagaattaaacaattcccagacactccaaataatcaagcagccaatcatattatcaagattcatgatttatccgctcttctacgtggctttaagaatgggtttgcacttttttatgcattttcagaaagtctcgcaaataaaggcacgacaaccaactacttagtgaaaagtatagaggctgttaaaggattagatagtgatattgtattctttatattatctaactcgtttactcaatacttatgtgatgaaaacatagacaaaaaaaaccgttttaataaagaatggaaaaaactttatgttgcattaacaagaagtaaggataagcttgttttcgttttagacaagaggttaatcaatgcggaaaatcttgaaaaatatgagactttctttaactctaaaaatatcaacatgattaacgacggatccgaatgccttaattggttgtag

SEQ ID NO: 74542 - DNA, 2031 bp, Klebsiella pneumoniae UCI 56
atgagactaaaaaaaattttcatctctggattcaaaagtatttctaaccaacatcctcaaactattgaacttgagaaagacttaacaacttttattggccataacggtactgggaaaagtaccgttatggaagctttaaataaattgttttcagtcgatcactcattaagatttttatcgataaatgattttaacagctcctatgattgtaaagatgaaaagaacaagaatttaattattgaggcttggtttagttttgataagccaaaagatagtgagctcgttattccgcctttgattgagcatttaactattgataaggaagatggtggtatattatttcgggtgcgattagagggaagtcttacatatgattctaatccaatgggggacattgatgaagacatttgggtagttaacacaagcgatatgatagttgaggatgacaacaaacagaagctacctgctgctataagaaattctattcaggtaaattacgtacctgctaatcgtgatccattattacaacttaaatattcttccaaggctgttttaggtcgattgcttaaggctatcgagtgggttgaagacagccaaaaggctatagaagaacaggcagcacatctgaatgttttgactaagagtaatccagcgttaaatgaaatagcctcagcaattaatgcaagttgggctagtatatatagaggacgatacttatctcaagcctccttgaatttcccacatgctaatattgatgagatacttaaactaatacaacttcaattcaatcctgatgaactcgggaatacaataagtgttgagcgtttgagtgatggccaaaaatcactagtttatttttctctggtcaaagctatgttcgatattgatcagaaaacaagagagttattatcctcagggaataagtcaaattttaacccagacaaaatgagattgcctatttttagtatgatttccctggaggagcctgagaatcacctttctccacactatttaggacgtattataaagttagtaaaagactatgcaaaaaatgaactctgccaggtaattatttcctcacattcatcatctatattaagtcgagtagaaccagagcatatacgccatttcagacttgatagtgattcaaaaagtaccatagtaaatgcgctatctttacctgataaaactgatgatctctctaagtttgtcaaagaagcagttaaggcttatcctgaaatttatttttctaaattagttatttttggtgagggggatagtgaggaaatagtcattcctaaagttcttgaactttattcgactgaggtagatagccattctatttctatagtccctctcggtggaaggcatgtaaatcatttttggcgccttttgaggacattacaaatcccttttattactttattagatttcgatattgatcgaagcggtggtggatttggaagaatcaagtatgcaattgagcaattagtttcatttggtgatagtggtagcaaatatattagcgacaaaattatatctaaaataccaagatggaatagcgagacggatcctacaacattctctattagatatactgatggtgctgaaaaaaatatcgttcgggaacttgaaaaatgcaatgtatatttttcatcccccttggatattgattatgcaatgatcgaggctttcccggatgttttttgtgaaaaagatgtggtctatggagaaagaggaccgtcggcaataaaatttgatgttgcagaagatttggatgagttaattaaagcggttttgaaaaaaggaaattcaggtgttcgttacgccttttcagaaaactatatgaagtattttttgtggtatcgttatcgatttctatcaaataaaagtaagccagcatcacatgttcgcatgtttacaaaaattgaagagttatattctcctgatgaaattcgtgacaagttaccacccgaattaattaaagtggctaagaaaactattaagctattgaaggaggtcatagaatga

SEQ ID NO: 74543 - DNA, 1674 bp, Klebsiella pneumoniae UCI 56
atgatgacggaatggcaaccttcagctggtattgaagcgacagatgaattgatggagattattctttgtgatgggcacatctctgttttggcgggtgctggtgcgggtaaaacggaactgttagcacagaaagcagattatttattgcaaactgggaaatgcatgtggcccaaaaaaatactctgtctttcatataaaaaagaggctcaagaaaatattaaagagcgcgtaatgagtcgatgtggctcaaaaggggaacgttttgactcatatacatttgacgccttttgtaaaagtattgtagaccgattcaaagatgttttacccgacagtaaaaggccttcaaatagttatgatttggtttttgacaataaagaaagtaatggcagggataaagtctcttttgatttgattagatatttggctttggttatttttaaagaaagagaagatatttctgatttgttttcaatgacatattcacatgtttttattgatgagtttcaagatacacgtactgatcagtatgagctaattaaattattatttaaaaataaaggaaattctttactaagtgttggtgatattaatcagagtattatgttatgggctggtgctaaaagaactgtttttgatgattatattaaagattttaatgccacaaaaaaattactggtgaaaaattttagagcaagcgatgagattcaagaggttcttagatgttttattcactatgttcaaaatgatacgaatttttcgccaatagcaaaagatataaataattgtacaatccatttttacaatgatgagatttcagaggctgaagatctatctgatataattaaaggattaattgggtctggaatttctgagaatgaaatttgtgtgttaactaaacagcaatcagagaagtatacagagcagcttaggcatagtcttacgaaaaaaaatattagaaatcttgagatgtcagaattacaagatcttttgaaagaacccttgggtgaactattctcggcatgttttaaattatacacatctcgatctttatctggttatacagatctttgtcagttgtatttgggtatgtacagaatttcttccggagacgcaaaagaggaattgttaatcaaaagtttgtcaaatgaaattgctaggcatcgtgcagaattaggtaatcagcctaatgctgattcactgttaacatgtataaaagaaacggttgagtttttttgcattgatcgaataaagggtcgatgggggcagtataagtcggctggttattgggtaaaggtctggaacggcttggagcaacatttgcgatacacaatatcttcaacagggtcactaaatgatgcggtgcaactcttcggggctgacaattctgttcaagttatgaatattcataaatgcaaggggctggaatataaagttgttattttgctcggattggaagaccaggccttttggacttatcattcccagaagtttgagaatgattgtgcattatatgtggctttgtccagagcaaaagaaaaagttataatatcaactgctaatttcagatctcataggattaattctaggtatgataataggacttcattatacaatatgcttaatccagtttatgagtttttaagaacacattgcaaatttaaggtggttacttga

SEQ ID NO: 74544 - DNA, 2133 bp, Klebsiella pneumoniae UCI 56
atgtttatcaagaccctctcggtaagaaattttagaaattttaaggcagcgtctctttccttcaaaaaagaatgcgtcaatacaattgtaggtgaaaattcatcggggaaaacaaatatctttgaggcgatgagacttatacttgacgataccttgccatattataagcgatatcttgtagaaaatgactttcatcgagggctagggacagcgtttggtcattgggttataattagtttggagtttgatgaaataggtggggatgaagagtcagagttactatgtcaattaaatactaccgttaatggtggtggaacagggcgaataacttatatttacagaccgcaactttacatcagagaacaacttttcaatttaaatgatattgaagatgttgatgcgcgtagaagcgcatataacatactgaaagaacaatattctattgataagaccacgtatgaatccttagtgttatgccaaggcacagcagattttagcgatgatggattatactctcatgtggttggtgattttaatgattatttattccctgatccaaagttagagcggattgatttaattggtaatagacaacgtgggtataatattcaggataatatcagttgtacttatgctcgtgctttgagagatgtggtaagtgaacttaagaataatcgattcaacccattccaaaagcttttagaatatgtttctaaaggaattgataatgatgacgcattgagcgaaaacatcaaaaacgtgaataacagaatatcatcgattgaagaggttaagaggctttctgagggcatattattatcaataaccaatgctgttggtaccacttactcgccagttttgaatgttacatctgaattgccctgtgagctaaaagagttggtaaaggttcttcaactcaaggctggcgactctctttgtgaaggatatgtatcagagctatcagagatgagtctcgggggtgctaatttaatatatttagctttaaaattgtatgagtacgaagaaggtatcagtaaaaacctcttagctaattttttaataattgaagaacctgaggctcatattcatacgcacatacaaaaatctttatttagcaatctgaaaaataataaaacgcaagtttttatatctactcattcaactcatatatcatcagtatcaaatatatccactacaaatgtgcttgtaaaaaatggtcttgaaacaatttcttgctctccatctaacggattggaaaaagagagaattaatcgcattgagagattccttgatgccataagaacagatattctctttgccaagaatgttatcctaattgaaggtgatgctgaagaaatattaatacctcatctcgttaaaaatagtttcggtattacacttgatgaacttggcatatccttgatatctgtgcggggtactgggtttgaattactatcatctttatttcactcagaccgaattaaaaagaaatgtgcaattttgaccgatgatgacataaatttgtatggagataataagcctgattatttatctcaagatgattataataaagctgtaaactcagcagagtctggtgtcgctcgtaaagtaattctggatgaaatagttagaaataacgcttttattcgtgcctatttttctaagtatactttcgaaattgatttagtgctatcaggcgccgtaagatactttgatgcgatagccgctgaatcatttgagaaaagagcatattacacaccataccaagaagcattccaatcctctgatagacaaaaaataggctgctacgctttaaagttagctaataagcataaaaaaggttggtttgcaatgatgcttgttgacaagcttgatgcagattttcctatctctaaggcactctgtcagtcgttagggttcactggtgattttaataaattcactctagcaaagatggttcgatatcgtagtgaggttattaagaatagagatgggtctgatttattaaataatatattgggacaggatgatttatcatttattatagataacatagatgctgctttggacatatttaaaacacattaccctaacgatcctttaacttctttgcttgaggttcatcatggataa

SEQ ID NO: 74545 - DNA, 1677 bp, Klebsiella pneumoniae UCI 56
atggataatcaaaagagacaattaattaatattaaagacaatctattggtcagcgcctgccctggggctggtaaaacaaaactattgattggtatgttagaggacaatttatatcgaaacgaaggttttcgttggcatattgtgttaactcacactaacgcagcagctgatgagatctctagcaggatagataatctaagtatagaggtagatagagtttggtgcgggactattcattctttccttttagagtgggttgttaaaaagtatgctggagctatatcaagattaaaagatggattttctttactttcagaatataaacaaaggaaaataatccagagcatagaaagtgataaaaaactaggagtaagaatacgttataattgtgatgagcaaggtaacgcatttgtggaaccttattgccattcgttagatgataagcacaaagagttacttgtaattcaggagtataataccttcaagcaaaataatagactgattgattttgatgatattattaagcttggcgtagaatttcttgaaaacaatcaaaacatatgtgagcatctttccaagttaattggtaatatttatttagatgaatcacaagatacaagtctgattcagcttaaagcattgtcatatataaccagatataatcgcacctcagtatttattgttggtgacaatgaccaagccatttatcaagatcttggcgtttctataaaggataaatatataattaaatctgtactgcaattatctgaactaaagcatgaaactttgtctggatgctatcgatcttctgaattactggtgaaatattacaagaaatattcttcttcgcgaaatgatgttacttctctgcgtgaatttgaggggaagcctccaataatcaaagatatttctcaagatgaattgccacaaagagtgtttaatttaataaatcaataccaaacaaaatataatagcgtttccggtattgctattatagggcctgataagtactatcttatggcgctaataaatgctttatatgacctttcagaaaacttcgtttatgattttcaatcaacaacccccctatattgtgctaggaatactgtattttacgagttgataagtttggttcttttggatgtaaatgttattaactaccaaagaagaagttctcttgcaaggaaaattgttgattctgttcctgaattgagtcatttgacgccattacaacttaagcgtgatttaaaggagtttcagtcagtaaaaaataattttatattgtggttgagggagttatatgattttttagaaatgaagtatcaaaaatccattaaacttgagacagattacaaaatatgtaatgcagcggcttctgtggcaaaaatcagggctggcatgggcgcaattagtaagatgattaataaagacaaaaatgttgtctctgtatctactatacatggttcgaagggtgaggaatatgattatgtaatctctattgggtatcatgagcaggtggtgcctcatcaatcatcttttgaaaaaggaaatgaatatgctcgcgatattgctaatagattaatgtacgtggctttttctagagctaaggattatatgaatatatttatagatgatcgaagaaaagttagtcctttctttattagagaacctgactaa

SEQ ID NO: 74546 - DNA, 465 bp, Vibrio sp. JCM 18904
atgagccttgacgaggttctggaactagaatcagataaaaaagttaagggtcatgtgagggcggcttaccaatgcggtattcaggttaattggaaagtaggtgaagagtatattcaaaaagaagcgatcccttatacttttgaggatgccatatctttgacaaacttagatttgtttaaaggcttttcaaagtctgtaggtatggtgaaaaaaatgagtcaagctgccaacaaagaatccctagaggaatgttgtcaagaaatgtttgatgccttaaaaggtgaaaaggccaaaatggcgttggatttactctttgaagttgaccctgaaaagttattggttcctgagtatattaaagaaggactcgattggttagaaaaacaactagatgctgttaatcaagagtttcactggcagccagaactggcaactcaattgcctgatggagagtccgtagatgcatga

SEQ ID NO: 74547 - DNA, 1863 bp, Vibrio sp. JCM 18904
atgcatgagtcattaactttaactggtgttgataaagaaatttacaattacttagacttgaacaaccccaagagttttcttttatttgcagggggggcaggttcaggaaaaactcggacactcgtaaatgtgttgcaagctgttcgcggtaataatattcaagagtttgtgagaaagggggggcagcgtgtcgctgtaatcacatatacaaatgcagcgtgtaatgaaatacaacatagattggcttatgacccaatttttgcagtatctactattcatagttttgtttgggagttgattcaaccatttacccaagatattaaggcgtggttaagagtagaactacaacgagaaattgatgatttagaatataagcttagtcgagctagagatctccaaggtaagaccgcattacaaaatgccagacgaaagaaatcaaaagagaaacgccttagtcaattagatgatattaaacaattcacctatagcccgataacgcatagggtggatttgggatctctcactcattcagaagtcattaaaatagctacgtatttcttaatgagtagcactctttttagaagcgtattagtcaataagttcccaatattattgatcgatgaaagccaagatacagagaaagcattgttagaggcattcatttttactcagagtcttaatgacaaggttttttctttaggtctttttggtgacctaatgcaacgaatctatagcggaggaaaagaagaccttgggcaacctttacctgagggttggatggctcctataaaggagagcaactttcgtagtcctaagagaatagtgagtctgataaacactattcgaaaagatggagatggtcatcagcaggttcctgatgacaatgcggaagaaggttttattaggttatttatagttgaatcatcatgctctaagaagcccgaaatagaagcatctgtccgaaaccgaatgaaagagttaactaatgatgctgcgtggactcaaagagatggtgttaaggttttgacattagagcacgctatggctgctagcagaggtcaatttgatgctttttttacgccattatctaaggtcgattcattacgagaccctttattaaatggcactagtggagtctttacgtttcttagcgaccaactactggccttaagtgatgcagtgttagctgagaataattttgctgtaatggctatcttaaaaagacactcgaaacttgtatctgccagttacaatatagagttctcgaatgatcctttgttggttctaaagcaaactaatgatgctgtagataggctcaaatctctgttaatggaagaagagccaaatataagggatgttttgaagtttgttcatgacaattccctcttagtactaccagagatcttgagtgctcttcttgtcgaaggtaaagatgatgatgaagaagaaaaagcaccacaaattgcagcttgggaactcgctattctagcaccaataaatcagttaaagagctattcactctatatcaacgagaaacttggttacggaacgcatcagggcgttaaagggctagagtttgatagagttatggcaatcattgatgatgaagacgcgaatggtttcttgtttagttatgaaaaactgtttggagcgaaaccattatctagtacagatagtcgtaatgaatcaacaggaacagaatcagtgttgtcacgcacgagaagacttctgtatgtaatttgtagtcgtgcagagaagagtttggccgttgtggcatatacacaaaacccatcaatggtaaaaaaaacaagtattgatgctggatggtttagagaagatgaaatcgaggagtttctagagtag

SEQ ID NO: 74548 - DNA, 2133 bp, Streptomyces albulus
gtgagcgcaagccgaccagagccttccgagcagtcacagaccgagccgagggtgcgcccgcccagggtcacgaaggcggacgtcaagaacttccgtcttctgcgggacgtcagcatcgccttcgacaaggacgtcacggtctgtgtgggccgcaacaacaccggcaagacgtcactggcggaggtactgagcaggttcctccgccctggtgacatcaggctccgtgtggaggacttctccactgaggcctactcggagttctcccaggcgtacaaggcgttcaccaccggtgacgaggaagcagcacggaagctgctcccggagatctcgctgaccgtcttcatcagctacgacaaggagactaccgagtacggctctctcggctcactcatcgtcgacctcgacccggactgcaccgaagcggtggtgactgtccgttacgccctgaagcctggcgccatgaaggatttattccgtgacggaccggacgaattggtggagggttggggtgattcactcctcctctcccttatagggcctcgaatccctcacctcttcgatcggtccgctatagccgtggacccagccgatccgacgaacttccgcaatgtttcgatgagcgaggtcgccagagcgatcaaggtcgatttcgtcagagcgcaacgaggtctcgacgacgagacggagcggcccaaagagccgatcggcagggtcttcgaatcacttttcatcggcgcctccaaggcggacgagaactccccgctcagaaacttcgccgatgatgcggaaaccgccctgggggagatcttttcaagcctggacggaaagatccaggaaatgtacgataggatggcacccacagtttccggttttggataccccggcctgggaggccgagacttctccacccggaccaccctggatgcgaaacgtcttctatcgaacttcaccagcatcaggtaccccggatcagctggaatcgaactgcccgagtcatacagtggtctggggtcccggaatctcctcctcatcctgctcacactcttcagctactatcgggattacgcgacccaacgcaaccagccctgcatccacttagtcttcatcgaggaacccgaagcccacttgcacccccagatgcaggaggtcttcattcaccagctcggggtcttcaagaagaactttcccgctgcggaccaggggctggattcctggaacgcgcaatttctcgtgaccacccactccgctcatatcgccaacagggtgggtttccctgcggttcgatacttccggctggacacacatggcgaactggatggcgccacgagctcgcaggtcctgaatctcgccgatgccccaggagtgagcaaggagttcctccacaagtatttgaccttgacgagggccgacctattcttcgccgataaggccatcctgatcgaaggaacgagcgaacgcctcttcatccccgccgcaatcgcaagattggaccagactggcggggaagtgagggagagcttggcaagccagtacgtcaccgtcatggaggtcggcggggcttacgcccacctcttctatccgttcctggatttcttggggctcccgacgctcgtcatcaccgaccttgacgcagtaaagcctgactccgccaagaagctcaaaggctgctgcgcgaccgaggggaccacaacctccaacgaggggatcaaaaagtggttcaacaacgacggaatcactctcgctgaactggcgaagtctgctgctgacgagatgcccgtgatcgagcgacgcgggcttgcctaccaggtgccggagataccgggcggtgcatgcgggcgaacgttcgaggacgcattcatcctggccaaccccgaaatcttcgagctgcaagatttcggaagcaagagcgttgcggagcaggagcagcaggcgcgagagctggcgaaaggtcagaagaagagcaacttcgccctccgcctcgcagtcgtggaggagaattggatgaccccgcgctacatcaggcgcggtctcgaatggctgcttcgccagacaccgatgccggccgaggcgaacatgccggagcccaacgccgaacccggtgagtcgcccgaaggccaggtggcagtgagatga

SEQ ID NO: 74549 - DNA, 1785 bp, Streptomyces albulus
atgaaggtctcgactttccaagatggcgccactgcggaccaggaaagccggcatgcgctgcgcgagatcctcgcttccctggacagtcgccgcaacttcaaattggaggccggcgccggcgcgggcaagacccactcactcatcgacacgcttcggcacatcctggaaaaccgtccggaatacttgccccgagaaggccagcaggtggcatgtgtcacctataccaacgtcgcccgcgatgagatcgtaagccgcaccgacgccagtacctatatcttcgccggaacgattcacggtttcctttgggagattatttccggctttcagaaaacactttcgcaagagatcggcgcgcttcccggctggaagcagttgctggccgaagaaggctccatcgatggcttttctgtcagctatgatctgggatttcgccgaatcagagacggcgtcgcctggctccatcacgacgatgtcccggcactcgccatcaggctcttcgagcggaagaaattccggtcacttgccgccgacaggttccccatcatcttcgtagatgaataccaggacacaccctccggcttggcggaagccatgattggcaatactgcatctccgcccaccgggtcgacttacggattcttcggggatcattggcagcagatctacgatcgaacctgcggaaagatagaccaccttccggtcaccgcgatcgacaaacgggcaaactggcgttccagcccggcagtggtgagcttcctcaaccacatgcggcctgagcttcctcaagctccggttcccggccgcgagaccggctccgtcgtggtctaccaaacgaattcctggaccggaccccggggggcgcgctccaagaagggtcagatccctgatctggccctgaaggaaactcttcgccacgtcgcagcggatgcccggaagcgaaatccgatctcccagggcgaaccgctgaagaccctcatgctcacccattcgtcgatcgccagcgagctaggcttcggccagataaacgaggttttcaggtacaacgacgactacgtccgcaagcaggatgatgtcatggcgttcctgctggagaccctggagccggcttgcgaattcttccacacgaagcgattcggactgatgctggaaactctgaaacgctctcgcccccgcatgagaaatcgcagcgataaaaccggctgggttgatctcttccaccgaatcgacgagacccgcggcatcggtacggtcggagatgtcctggacatcgtactggagcagaaatacttctcgccttctcgtgccattcacgaccgtcagcggaagtggacggaagcgctgagttctctccgacccggggaggtactgtccgagccacggcagatcgtcgaatacggcaagctgagagacgtcccgtactcccagatcatagccctccgtgattacgtggacgaaagaacaccattctccactcagcatggcgtcaagggcgaggaatacccatccgtactggccgtattcggtggctggacccggtacaacttcccgaagatgctcgctgacttccctcgtagccagtccctcagtgatgaggatcgaaagaggttcgaacggtcacggaaccttttctacgtcgcttgctcgcgcgctcaagagaacctcgcgatgctcttcaccaccgagctctccgaggaagccttgaagaccctggaggaatgggtcggcccatcgaacatcattgcggtcgactactcccctgacggcactcctcggatcaccgtctga

SEQ ID NO: 74550 - DNA, 2280 bp, Snodgrassella alvi
atgtatctacaaagcttcaccatcaaaaatttccgcaagttcggagaaaatgacaatgaagtcatgtttgtaaattctaaagaaatatgccataacaattcaggacaagatagcccaccactggtgtcaccctcaagtacgctgattattggcaaaaacaataccggcaaaacaacaattactcatgctttaacgatgcttactaacaataaattgtcgattaaatccagtgattttaatttgagttatctgaataatttaatagatacttatatagcagcctatcaaaatgaagacgaaagccctcaacccgatttaaaaacgcctttagaaacgccgaaattggaatttgagttaaaaataaaattagataatccagccgatgaatatatccataatttatctcaatttatgctgattgggaatgattatgggaaagcaatcattattaaagctatttacgagttgaaagaagaggctaatttttttgctgcggttaaaaccttggttcagcaaaagcggcaggaaccatctgacaagaattctgaaacgcctaatgatgaaaaagtagataaaagaacgctgctggaagaaatccttaaattgctggatgataaaaatcaaacggaatttaagttaagctataaaaataaaatagatcaggaagtaaaaaatttttctttagataaactgttggaaatcaattgtattaaggctaatcgccatctgaataaaaatgttttaaccggtgtattcaagcgcattgttatctctttattcagcaatgaagaaagtgatggtttgtttaatcaggagctgaaagatattaatgacattatcacggaaaaagtagagcaaaaaaataaatcgattagtgagatactgagagaaattgaacaaataaatcacattgatatgaaactaagtggtaatgttactaaagacgatattttagataatctgattaagtacagctttagtgatggcgatagctatataccggaagatcagtttggtctgggctatatcaatttggttaatattattggtgaaatcattgactatattaattcctatgaagagaacagccatcgcagccgcataaatctgctactgattgaagagcccgaagcttttatgcatccacaaatgcaagaattttttattaaacgcattgacttagcggtgaataaagcaatacaacagaagagcacagacggaactccggcaattccggcaactcagtcactcaaatgccagattgtgattactacccattcttcacatattgtcaacagtaaaatccatagcagtaattcattcgataatatcaattatttaacaacagaaaaccgatgtagcaaggtgataccgttatatgataaattattaacagaaagctctcagccatccaactcaaaatcttctaaaaaatcagatgctaaatcagactcaaacaatagttcattagattataaattagattctaatgatctgctgtttctgaaaaaacacattaaatacaaagtatcggaattgtttttttctgatgcaatcattttagtggaaggtagaactgaggaaatgttattaaattattttcttgaaaatgataaagatttaaagaaatattatatttccatattcggaattggtggtgcatatggcaaagtttattttcgtttaatacaacaattaaagataccttgtttgataattactgatattgatatcgaacgttttaattgtgaaaaaaacaaacgatgtaaaaaatcatgcccaaaatgtaaaggagaaacatccaaatctaaaaatattaaacaaattacttctttacttgatagaaaaactactaatgacacgctgaaatatttacacaaaagctatgatctgcatgaaaatatgcaatacacagaaagagataatgtatattttgtatttcaaaaagaccaaattgaagggcaatatgccaccagtctggaagaggcaattattttaaccaactatgataataagataattctcaagttattaacaaaattttttccaaaaaaatctaaaaattttattattgataataaaattaaatgtgaatcttcttatgaaattcagcaacaaattagcaaaaattgcggcaaaactgagtttgccagtatgctactctataacatgataatttcagatgcagaatcactatgtattcggttacctagttatattgatgatgggttgaagtggttaaaaaaccaactggctaattattatggagaaaaaaaatga

SEQ ID NO: 74551 - DNA, 2232 bp, Snodgrassella alvi
atgagtctgcaagagaatatacgcaatgaagagcgacaactaaaggatatattcacagctattgatggaggcaaaagctttattgttcacgctggagcaggtgcaggtaaaacctacacactgattgaatcaattaaatatattttaaaccataaattaaatactttacgcaaacacaatcaaaaaatcatctgtattacttataccaatgtagccgttgatgaaatccggcatcggctgggcgaaagccagtttgtgcaggtgtcaaccattcatgagatgctatggcaacaaattaatttgtatcaacaacatgaattggttgaactacataaaaacaaacttgaaaaggaaatagaaaatactaagttggaaataacagagctggctaaagattctgctaatcttgcagatatcaatactgaggaaaataaagaattattcaggcagtttgtacaggaaaacaaagacgagttttttaaactggaaaagagaggagctaaagcaaataaatttagagaaaaaatgataggactggctcaagaggatttgaaaagtgctctaaccaaagctctaaaaaatatcagcgattttaaaaatttttttaggcttattaaccggctgcgtagctatacgcatgcgctagaagatataaatcaaacggataaaaataaaaaaccatcgatagaatatgacagcaattctaattctgatcgtctggcctcacttaaattcagccacgatacattgctcgaatacagtctaaaattagttaaggaatatgatgtgtttaaaaaactgctcactgaccaatatccttatatttttattgatgaatatcaggacactaatgaatctgttatcaggttgatggcttatttacagcaatacgcccatccggaacaatggctggtagggtatttcggtgataataaacaaaatatttatgatagtggtgtgggtaatcatattgagaatatttatcgggaaatatcggccgagggtaagaaagaaattaaactgaaaaaaattgttaaagattttaaccggcgctcgcagatacaaattattaatctgattaataaaatcagaaatgatgacttggcgcaaaaaccaattgatccagataggacaaatggaaaagttgaattttactgccttaaagcaggagctgctgaaagagataaggatgaaacgataattaatcagtttattaaacagcttgctccatcgccacccaataatgagctgcaaatcaattgtttgctattgcttaatcgttctgtggccagtatgtgtggatttgcacaactttataacgcaattgaaaaagcaaaatttatcaagtgggataaccttaattccatgctgctttcacgcatacttaataaattgcatcccgcagtcctgcgcctgtatcaattggtcacagcctataatagtttaaataatccgcacactactctgtatgatttattcggcaatactcagcgtagtgttacttttgctgaggcaggtgaactggtgaaaatccttaaacaacagcaaccacctactactttaaatgaatttattcagaatatttcaaccggcttaaatcaattagctaagaacaaaaataaaagtgaaagtgacgcgattcaattctggctgaaaaactgctttggcattaattaccctaaggatataaagcaaaataatgcaggtttagcagacttatcttttgctgattattatattgattttcttctgtatgaagatatgtatggaagcattaatcatgcagaaaccgaagttgaagaaacagatgatgtggttgctactaatcagcaacatatcagcgacattctggatattgatttaagccaatggctaagctgggtagcttttattgatgatcatgctaaagagcaacaagtgatataccatacctatcacggcaccaaaggcgaagaatatgacaatgtagtaataataatggaaaatgattttggtaggaaacaaataaataaatttaaaaattacttttccagcctgtctgctgatgcgaacattcaggttaaagatgaggaggacaaagagctggaaaatacacgcaatctattctatacagcctgttcgcgggcacgtaaaaatttatggattctttatctggatgatattactgaaatcaaagataagattgaattgctgtttggtactgttaaaacatttgaacctgccatagaataa

SEQ ID NO: 74552 - DNA, 2271 bp, Snodgrassella alvi
atgtatctacaaagcttcacaattaaaaattttcgcaagttcggggaacatgacaatgaagtcatgtttgtgaattctaaagaaatatgccataacaattcaggacaagataccccaccactggtgtcaccctcaagtacgctgattattggcaaaaacaataccggcaaaactacgattactcatgctttaacgatgcttactaacaataaattgtcgattaaatccagtgattttaatttgagttatctgaataatttaatagatacttatatagcagcctatcaaaataaagacgaaagccctcaacccgatttagaaacgccgaaattggaatttgagttaaaaataaaattagataatccagacgatgaatatatccataatttatctcaatttatgctgattgggaataattatgaggaagcaattattattaaagctatttacgaggtgaaagaagaggctaatttttttgcagcggttaaaaccttggttcagcaaaagcggcaggaatcatctggcaagaattctgaaacgcctaatgatgaaaaagtagataaaagaacgctgcaggaagaaatctttaaattgctggatgataaaaatcaaacggaatttaagttaagctataaaaataaaatggatcaggaagtaaaaaatttttctttagataaactgttggaaatcaattgtattaaggctaatcgccatctgaataaaaatgttttaaccggtgtattcaagcgcattgttatctctttattcaacgatgaagaaagtggtggtttgtttaatcaggagctgaaagatattaatgacattatcacggaaaaagtagagcaaaaaaataaatcgattagtgagatactgagagaaattgaacaaataaatcacattgatatgaaactaagtggtaatgttactaaagacgatattttagataatctgattaagtacagctttagtgaaggcgatagctatataccggaagatcagtttggtctgggctatatcaatttggttaatattattggtgaaatcattgactatattaattcctatgaagagaacagtcatcgcagccgcataaatctgctactgattgaagagcccgaagcttttatgcatccacaaatgcaagaattttttattaaacgcattgacttagcggtgaataaagcaatacaacagaagagcacagacggaactccggcaattccggcaactcagtcactcaaatgccagattgtgattactacccattcttcacatattgtcaacagtaaaattcatagcagtaattcattcgataatatcaattatttaacaacagaaaaccgatgcagcaaggtgataccgttatatgataaattattaacagaaagctctcagccatccaactcaaaatcttctaaaaaatcagatgctaaatcagactcaaacaatagttcattagattataaattagactctaatgatctgctgtttctgaaaaaacacattaaatacaaagtatcggaattgtttttttcagatgcaatcattttagtggaaggtcgaactgaggaaatcttattaaattattttcttgagaatgataaagatttaaagaaatattatattaccatattcggaattgatggtgcatatggcaaagtttattttcgtttaatacaacaattaaagataccttgtttgataattactgatatagatattaagcggtatgactgcgagaaaaataaaaaatgtaaaaattcaaaatgcccaacatgccaaggtcaatcatctgaacttcagggatttaaacaaattacgtgtttaaataacagagaaactactaatgaaaccctaaaatgtttatttgaaaataatattctaaaaaataatatgcaatataaagaacaaaagaatatatatattgtatttcaaaaagaccaaattgaggggcaatatgccaccagtctggaagaggcaattattttaaccaaccatgataatgacataattatcaagttattatcaaaattttttccaagaaaatctaaaaattttattattgataataaaattaaatgtgaatcttcttatgaaattcagcaacagattagccagaattgcggcaaaacagagtttgccagcacactactctataacatgataatttcagatgcaaaatcaccatgtattcagttacctagttatattgatgatgggttgaagtggttaaaaaaccaactggctaatcatcatggagaaaaaaaatga

SEQ ID NO: 74553 - DNA, 2235 bp, Snodgrassella alvi
atgagtctgcaagagaatatacacaatgaagagcgacaactaaaggaaatattcacagctattgatgatggcaaaagctttattgttcacgccggagcaggtgcaggtaaaacctacacactgattgaatcgattaactatattttaaaccataaattaaatactttacgcaaacacaatcaaaaaatcatctgtattacttataccaatgtagccgttgatgaaatccggcaccggctgggcgaaagccagtttgtgcaggtgtcaaccattcatgagatgctatggcaacaaattaaattgtatcaacaatatgaactagttgaactacataaaaacaaacttgaaaaggaaatagaaaatactaagttagaaataacaaagctggctagagattttgctaatctggcagatatcaatactgaggaaaataaagaattattcaagcagtttgtacaggaaaacaaaaacgagttttttaaactggaaaatgaaaaagctcaggcagataaatttagaacaagaatgttagaattagttcaaccggatgacttgaaaaacgctctagagaacgctctaagaaatattaataattttaaaaaaatttttaagcttactagccggctgaatagctatacacaagccttagcaaaaataaatcatccagaagagcataagagaatatcggttgaatatgacagtaattctaattctgatcgtctggcctcactgaaattcagccacgatacattgctcgaatacagtctggaattagttaaacaatatgatgtgtttaaaaaactgctcactgaccaatatccttatatttttattgatgaatatcaggacactaatgaatctgttatcaggttgatggcttatttacagcaatacgcccatccagaacgatggctggtagggtattttggtgatagtaaacaaaatatttatgatagtggtgtgggtaatcatattgagaatatttatcaggaaatatcggccgagggtaagagggaaattaagctggaaaagattgttaaagaatttaaccggcgttcacagatacaaattattaatctgattaataaaatcagaaatgatgaattggcgcaaaaaccaattgatccagataggacaaatggaaaagttgaattttactgccttaaagcagaagctgctgaaggagataagaatgaagcgataattgatcagtttattgcacatcttgttccatcgctaccgagaaatgagcaaatcaattgtttgctattgcttaatcgttctgtggccagtatgagtggatttaaacaactttataacgcaattgaaaaagcaaaatttatccaatgggataaccttaattccatgctgctttcacgtatacttaataaattgcatcccgcagtcctgcgcctgtatcaattggtcacagcctataatagtttaaataatccgcacactactctgtatgatttattcggcaatactcaacgtagcgttacttttgctgaggcaggtaaactggtgcaaatccttaaacaacagcaaccacctgctactttaaatgaatttattcagaatatttcaaccagattaaatcaattagctgagaataaaaataaaagtgtaaatgacgcaattaaattctggctgaaaaactgctttggcattaattaccctaaggatataaagcaaaataatgcaggtttagtagacttatcttttgctgattattatattaattttctgctgtatgaagaaatgtatggaagcattgatcatgcagacaccgaagttgaagaaacagatgatgtggttgccactaatcaacaacatattcgcgacattctggatattaaattaagccaatggctaagctgggtagcttttattaatgatgaacatgataaagagcaacaagtgatataccatacctatcacggcaccaaaggtgaagaatatgacaatgtagtaataataatggaaaatgattttggcaaaaataaaaaaaataaatttaaaaattatttttccagcctgtctgctgatgagaacattcaggttagagatgaggaggacaaagagctggaaaatacacgtaatctattctatacagcctgttcgcgggcacgtaaaaatttatggattctttatctggatgatattaatgaaatcaaagatgagattgaattgctgtttggtactgttaatacatttgaacctgccatagaataa

SEQ ID NO: 74554 - DNA, 2298 bp, Serratia sp. FS14
atgcggataaaacacatagaaatcgctaactttcgcaagttgaaagcagttcatatagatttctcagaagaaacaaccattttcgtcggagcaaacaacagcgggaaaacatccgccatgattgcactccgtcgatttctggttgatcgctccggtttctccatcaatgatctcaccttatcttattggccacaaattgatgcagcagcaatgcagtgggaagctgcccctgatgctcaagaaccgattcaatgggagcgcttctcaccattcctggatgtatggctcgacgtcccacctaatgaacttcatcacgtacaaaagattttacccacgctggattgggatggggaaagcataggtgtgcgcctgcgttttgaacccaaagaccccgacgcactgcaacacgaatatctcacggcaaaacgcgcagcggccgaagttatggcacaagccaaagaattcggtgaacaagcgggctccacgactgcatttgcactttggccacgttcgatgatggagtttttagcccaaagaatgcgctctactttcgagatccgtgcttatttgcttgatccttcaaaactgaacatgccggaaaaaggtagagcctcccctcaaacactcccagaaaacagtgaccccatcgatggcggggatccgtttaatggtcttattcgtatcgacgagattagcgcacagcgtggatttgggcacagcgatcaaacagggtatacgcagggtaacgaatcacgagaggacataactgaacccagaatggggaaaaaactttccagccagctgcgcaactactatagccaacacttggatcctttcgatacgccggaacccaaagaccttcaggcgttgatggcattgcatgaagcacaaacggctttcggcacgcgtttagcagattgcttctcagatgccttgaccgaactggaaaatattggctatcccggcgttaccgaccccaagctgaccataaccaccaatatcaggcctatcgatgggcttaatcatccgtccgcagtgcaatacgaagtgccgacccatgttaccggctcttttggcgcacatcgccttcccgaagactcgaacggactcggttaccaaaatctcgtctccatcgtcttcgcactcatggcatttcgtgataactggatgaaggtcggaaaggctggaaaatcaaaaggggcggaagaaacgctcattccaccgcttcatcttgttttgattgaagaacctgaagcgcatttacatgcacaagttcagcaggtttttattaagcaagcctacggagttctgcgaaaacatgacaagctagaggactctccacaccttcaaactcaactgatcatcagtacccactccagccaccttacccatgaagctgagttttcgtctttgcgttactttcggcggctaccggcactcgcacaaagcggtgccgtacccttaacttccgttatcaatctttcggaagtcttcgatggcaaagacaaaaccgaacgtttcgtgaaacgatatttgaaagctactcactgcgatctattcttcgccgatggagcgatactcgtggaaggtccggctgagcgtattctcgttccccattttgttcgtgagcgtgaagcctatgcttacttaaagcgtagctatatcacatggcttgaaataggcgggagccatgcacaccgattgaagaatttgattgaacatctggggatcaataccttgatcatcacagacattgacgccaaagacggcaccaccaatactgcggttgttccgaaacgaggcatgggccaacgagcccgcaatgagacggtgaaaacgtggctacctaaggaagaatctttcgatgcactcctcgacatgaaaagtgagcgcaaagtgcttgccgaaccaagcggctatgctatccgagtggcgtatcaaacacctattttcatgccattcaagtctgcagaagtgcttgaagcagtggccaacactttcgaagatgccctcgtgtatgaaaatccggcgctattctccaacctggacggtcatggactcatcgcaaagtttcgtgaagcgctaaaggagtccgccgatctcagcgagttggcaacaaggatttttgaggcactgaaaaatgggacaaaggccgaattcgctctcgatgtcctttttagtgaggaaatcgatcggctgaaggtccctcagtacattgacgaagggttagtctggctagcagaacagctaaaacgtaaagagcatgatgttcttggaaaagcggaggtgggagaatga

SEQ ID NO: 74555 - DNA, 1875 bp, Serratia sp. FS14
atgagcaggctggaagtgataattcccgacgatgagatagacatgtcggctgatgcggaaatcagaaaatgtcttgacctcagctccccaaaaagtttctttctttttgccggcgccggttcaggaaagacaaggtcgttggtatccgctctccagtatgtgcgcgacaccttcggggatgaacttcggctgaaaggacaacgagtcgctgtcatcacttataccaatgcggcgagcgaagaaattcaacgccgcctggattttgatccaactatagacgtttcgactatacatagcttcgcctggtctctgatagaagggcttaaccgtgatatccgtgaatggcttcgcgcgaaaataaccaccgatatcacaaagcttgaagcagaagaagcaaaagggagaaaaggtacggaagcatcaagaacccgcttaaaaaaaatcgcctcgagaaccaaacgccttcaaagcctcgataacgttaaacgcttcgtttacagcccaaccggagaaaatctcggccgcgactcgctgaaccatgccgaagtgattcatctcaccgcctattttttaacaacaaaaccgaccatgcagaacatcttgatcggccgtaaccccattctgcttatcgatgagagtcaggataccaataaacttctgatagatgccttatttgccgttcaggctcaacataaagagacattcgttctcggcctgattggtgacatgatgcagcgtatttatagcgatggtaaagacggactggataacaatctgcctgccgactgggcaacccccggaaaacagatgaatcaccgttgcccaaaacgcatcgtaaaattaattaacgccgtacgtagcgcagtggacaaacaggtacaacggccacgaaccaacagccttgaaggcagcgtgaggcttttcgtccttcctagtcataccgttgataaacctgctgccgagcgaaaaattgcgatgcatatggccgaggttgccgatgatgaacaatggcggaatttggcactctgcaaatgcctcacattggagcaccacatggccgccagtcggttaggctttttagagctgtttgcccctttgtatagcgtgaaaagttggcgaaccaatcttctcgatggatctttgccctgcgttcgattctttactgatgagatgctgccattaattcaggcaaagtttgccgaagaccgttttgccatcgccagaattctaaaaaaacgatcgtcgctagtcagcccagatgccttgcaatacgcaacagatcaacgctcgcaactgaagttagcatcggcagcactggaacgccttatgacgctgttcgcacagggtgctgatccttcgcttggcgatgtccttcgtttcgtagcggatagcgcgctcttgcctattcctgaatctctgctgctcagcgtaacgagcgataatacgccatctaacgtaacaccgcatgtcgatgaaagtgatgccgaccaccagactgagcgtacagcggcgataggcgagtttttacttgcacccttctctcaggtcgagaaatttgcatcctacgtatctggaaaagcgcctttcgatacgcaccaaggcgtgaaagggctggaatttgagagagtgatggtcattatggacgatgaagaagcccggggttttatgttcaaatatgagaaccttttcggggcgaaaagcgtggccgatccctcggttgaagcggttcgccgactgttctacgttacctgcagcagggcgcagcaaagcttggctctcgtggcctatgcaacgtcaccggaacaagttcgccaattcgtgataaaccaagactggtttaatgctggtgaaattgtcatcggaataccagagtaa

SEQ ID NO: 74556 - DNA, 1893 bp, Pseudomonas sp. P482
atgtacttgaaacagctagagattgagggcttcaagagtttcggcaggcgtttcacggttgagttccacgcagggctgaacgtgttggtcggagaaaatggagccggaaaaaccggcgtgatcaatgcgttgcgtcagttgtttcaggattcggagtcgggtaaacgctcggtcgccgagcgcgactttcacaagtcgttcgagcttgatgccgtgccagcctccagtttcgccatcaaggcgatatttggcgacctcagcatctttgagaaagtcgcactcaattcctggtgtggcgagcaggacgaggcggtgcttaatttgaccgtgctcaaccgcgagatgcgcggtcgctacagtcaggacttgtggggcggagctatcaggacgggcgtctttaaccagcagacgctggaccttatccactgcatctatttgccgccgctgcgtgatgcggagcaaaagttacgggaagggcgacagtccagactatccaggctgatgaaggcgttatgcaaggatcagttgcaagtctgcgccaagaccggaacgttgcatccgcttgaagtaaaagtcgctgacttcaactcccagttggccgctgaacaggacattaaacgtgcgaacgctctgatctctagtagtctgcgtgcggctctcggggaaaggctgtcgcaaaacacgacgattcagttttccgaatccaacttcaccaggatcgtcgaaggtttgcgcttgctgtatttccccaatgcatcacccgccgaactatcgcaattccgttcgctggatgagaatagtctgggctacaacaatctgctctatattgcctctattctcgccgagttgattgtcgaagatggggagggtccaggagagcgcacactgcataagctgttgctgatagaggagcccgaagcgcacctgcatccgcaattgcaaatcaggcttttaaagcacttgcaggaggtggccctcaataagaatattcaggtagtgattactacccattcaacggtgatttcgtcagctgtttccatcgacaatatcatccatatcaacggcggcgtcgaaccattggccgttcctgcgcgcttttgcggtctgtcggagccgagtcgacgatttatcgaccgctggttggacgttaccaagtccaacctacttttctccaaaggcgtcatacttgtcgagggtgtggcggaggccattgcgttgccagagttggcgaaaatcgtgcttgcgacccgcggcaaagggttggataccctggatgactatggagtgtccgtcatcaatctcaatggcatctatttcgcccatttcatgcagctgttttgtgaggtcgaggggcagatgcgtagccgtaacctgcccattccctgcgcaggtctcactgataaggatccggtcaaaacccaaaaggtgcgggtacaggatcagttggtcgacgttatcgtcaaaccgcatgcagggaatttggcggacgggaccaatcctgcactgggcctgatccccaacattgcgatgtcccaatacgggcgcttgtttagtggcgagctgaaaacctttgagtatgacctcgcaatgacggcgagcaatctgcagttgatgctgcaggtggcgtataacaactggcccaccgatggcccgatcaaggcttcgttcaatgacatgcttgcggccgactttggggctatgtctgaagcgcagaaagccgaatatgcctacgagcttttggagcgcattgattccaacagtatggggaaggggctgtacgcccagctactggccgacaagcttgaacagggcgactgcgcgtttgccgtaccgtactacatccagcaggccatcttttgggcgtgcgctatcgctgaggaagcggttcaatga

SEQ ID NO: 74557 - DNA, 1758 bp, Pseudomonas sp. P482
atgacctttcccagcgaagagcagcggcggtacctcggctcctccattgacgacaatgtttacctggaagcctgtccagggagcggaaaaaccgaagtgattgccgccaaagtggcgcgcgaaatcgaagattggcaaggttatccgggggggatcgcgctgttgtcatttgccaacagcgccgccgatgagctgaggagccggctgatcgctcaccggcaacgggccccggtggcctacccgcactgggtgtcgacgattgacagcttcatcctcaattgtctcgtggggcccgttgcccatcgactcaccggctatgccggcaaggatggcgatttccggctgcggttagtcgatgcttcgtcaacggtttacgtcaaaactaaatacgccatagaacgcatccacgttcccgccaaccagtacgactttgatctggctacgggacggtttgtcttccgaacgggggagcccgggctggaccgcaagctgaacgccatggacttggccgattggcaattgcgtgacctcagagaggccaagacgcgtttcaaagcagcaggttttgccacctaccgagatgtcgaacatctcgctatccagatcctgaaggaaccaaagttgttagacttttgcgctcgattggccctgcgctatccatttttggtgatcgacgagtgtcaggatctctcggtggagcagttgaccgtcctggagggcttgctcggactgggtgtgaaaatgcatatcgtgggagatctcaaccagtctatttacgggtttcgccatgcggatcctttacgtgtcgtgcagttcatccgcgatcatggattcatccgtctgctactgcgtcagaactttcgcagttctcagtccattgtcaatctgtgttctgagctggtgccgggaaacaaaactcacggcaatccaacgattcagccggttatgccagtaattgtcgagtatgacgactgcccctcggaagcgatgcctctgttcatgcgcctcagtgacagctatgcaaaccgggtgatcgtctcacgtggtcattcgacactgaaccgatttttcagcggcgccaatgacctgaacaatactgaacgcttggcacttgcctgctctttgacgggcaatgattcggcgttcgccatccagaagtcactcgcgctatttggagagtggctgtccagcaagttggattattccgcaaaacctaactccttccattgccctgtagatgttgagtccgagctcgaatggcgattgtttctacatcaggcactagcattcatcacaagcgcgggcgcttctgtcgcgggccagaattggagccggtggtgccgggttgccaaggcccgtcttaatgagctaccaatgcaggcctttgtcatcgcggatatcgctgtggcaattgcaccattggcaacacttggattgcgctcccctgcgggactcggtgagcaactggtaactcagagactttcgttagtgacgttgcatcagcgccgcattcgactggcaacgattcatgaaattaagggtgaaactcacgaagcgacaatgctggtctcagcatcacgccgcggggatcagtctcattgggcggattggattagtgacaaaaacttagaagcggcaaggctcgcttatgtcgcgagttcaagaccaaaaaatctattggtctgggcagtcaagaaattaaaagccgccgagagaattacgcttcaacggattggatttgaaatagctaatcaataa

SEQ ID NO: 74558 - DNA, 2052 bp, Brevundimonas sp. EAKA
atgtacatcgaccaactcagggtctggaattttcggagtttcggggccgccgcgtccgaggcggcagatgcgctaggttcctcggccaccatcgtgagcctagacgagggagccagtgtcttcatcggccgcaacggagctggcaagagctcgttggtccaagcgcttcttcgtctcttcggcgagacccgcgaagagagaaccgtgcaacctgccgacttcttcgtgccgccgaccgagcggctggagagccattcgcagcggcgtctgtttatcgaggcgtcgatccggttccctgagctggagacggacgatacggccgcagagaagaccgtcccgccggccttccggcacatgattatcgagaaggctggcgaggtcccccaaatcaggatccgcctcgaggcgacgtggcaactggctggcactctggacggtattgtcgaagacggcctttattggattctgagcgacgacgccgcgccttttggagacgtcgatcctgctctaaaaaagaagctctccgccgccgaacgcggccacgtgctcgtccgctacatacccgcttcgcgcgatatcacggctttgactcagctcaccgtgaagagcttgggacggagcttgatgcggtcgatccggtgggagaaaaaagccgagatcgatgcgctcatcgccaaggcggccgagacgctggatgcggagggtgcgcttacacgcgtcaatgctgccatcaacgcctgttggtcgcagctgaacactgcagaaaccgggacgacggcgagtctgtcgatactcgcgccggaccttcagcaaatcgttcgaacggcaaccgttatgctgacgccttccgcgacgggtaggcttatgacgctggaagatctcagcgacgggcagcggtcgctgttccatttcgctttggttaaggcgttactcgatctgaaactggatctcgaaggggagatcgacgacgatccaccgtcgccattccagcccgagttcgcccgcgcgccggcgctgaccctcttcgccttcgaggagcccgaaaatcacctgtcaccattcttcctgtcgcgactgctaagcgagcttgagaagctgactaagactgcacgggtgcaagcagttctgaccagccatgcgcccgccatcgtcgggcgagtcgatccatcagcaatccgtcatgtcaggcgagtgcaggccacaggcgtgtcacatgtcgcagccctagccatgccgcaaggcgatgccgatgcgtccaagttcctccgggaggcggtgcgcgcccaccctgagatttatttcgcgcgccatgccattttcggcgaaggcccgtccgaagaaattgtcctgccgcggttggcagaggccttaggtgtgccgatcgaccgatctttcgttgccattgtccccattggcggacgccacatccagcacttctggcggctcgttgagcagctgggcatcccacatacgaccctgctcgacgtcgacatgggccgtagcacgggagactatcagcaattcagatcggccgcggctgcgttgatggactcaagaaggcctttgcaagggcccgcactgcaggacgtcgacacagcgcttaggatggtgcgaccagcccctgcaccgggcacgcccatagatgcggtaaccatttccaagtgggcccaggcgttcgaaagcgaagggatattcatgtctggtcccttggacctcgacatgttgatgctttccgccttccccagagcctacaaaacattgccaccgggagctacaggcccccagtcgcccgatgacccggcgcggaagctgagcgcagcgagacgcgtcttaggcgacgacggcttgggacccgccgcctatgtcggccttgcggaggccgatctgtttccttggtatgcctatctattcctcggcacccggggaaagcctgcggttcacctcgcggcgttgggcgagatcgatgacttggacattgagctatgttgtccgcccgtgttgtcgcgcctgatcggccatgtgaaggcgtctctagaagcgcctttggcatga

SEQ ID NO: 74559 - DNA, 1929 bp, Brevundimonas sp. EAKA
atgatcccggcggaggactgggcaccgatcggcgtcgcgggtttggagcctactgcgctcgcggcagttggggcaccgaccagtatgctggtcgtagcgggaccgggcacaggcaagaccgaactcttgggacagaaagccgcctttctcctgcagactggaggctgtcgccatccccgccgtatcctcgcaatcagcttcaagcgggatgcggcgacaaatctgcgtgagcgggtcgagcgccgttgtggctcgaccttggctcggcggctcgactccatgacgttcgacgccttcgcgaagcagttgcttgaccgcttctggcgcgccttgcccgaccatctcgcccttctcggcccctatgagatcgcgcccttcatcaagcggattgagttcgaagatctccgccgcagcgcgactttcgggctggatgaccccaatcattccgctcattgggccaagacaatgatagggaaaaacccgacaactgcgggcattcagggcgttggtctggacgccttcaccaaggcggcccaggggatgaacttgcatcctcttgcgattgccgaccatgctcagttcctgcaactggtccagcttcgggcggcgttgatccagcacacgccacgcttcggctttgccatgatcggcttgcttgcccgggcggtgatccacgccaatcccgcaatccgtcgggcaatctgcgcgacctacagccacgtctttctcgacgagtttcaggacaccacgtccgttcagtacggattgatcgccgaaatcttcaagggatccgccgcgcggctgaccgccgtaggcgacaacaagcagaggatcatggggtgggccggagcccgctcggatgtcttcgcagcctacgaggccgacttcctcacggattcgccggcgtcggggcgggtcagtctgacgcgcaactaccggagcaacgagcgcatcgtgcaagtgctcaacaccttgaaatccaacttggcaccatcagagccggacttcgtcgcggtgcgaccggccccggatcttccgaccatcgacatctgcgccatcctggttgccgcagatgaagacgccgaggccgtagcgatcgccgataaggttgcgactgcgctagcttccggctcctcgccgcgaagcatcggtctcctcgtcaggcagaaggccggcgattgggagacccgcttgaaaaatgccttcgcgtcgcgtgagatcgctttccgcaacgaggacagggatgtcgggggtgcctcgatccaggatctgatgaccgaaacctaccctcggatcatccttgatatgctggatctgctgacgcgcaggcacggcggcgtattgtggtcggcggcggtaggacatctcgcagccgtccgcggcgtggtcatcgacgacgaaccttcgatcgagactgaattggcgactgagctagacgcgtttcaccgagcgaaccgcttttcggccagagcatcgccatcgcccggcgacgtcgccgccaaggtggcggtgatcgaaggcttcctaggcgtggcagcccttcgggcagtcgcgccgcagtatgcggctggcgatctcttcgaccgagtccgcaaagccacggttgccttcctaattgaatctgccgaaggaagtgccgactggtccacggtcctcaatcggttctcgggcgtcggtcagacgccgctcctcaccataaccaagagcaagggtctggagtacgacctagtgatgctcctaggcctgaatgaccaggagtggtggagcttcgacaaggaccctaacgaaggccattcgaactttttcgttgcggcgtcgcgagcgcgggaaaggcttctcatgacccggtgcgggaccgaccgaagccacaagatcaaatcagtcttcgacctcctttcggccgccggcgttagcgagatcagtgtttga

SEQ ID NO: 74560 - DNA, 1905 bp, Pseudomonas sp. WCS374
atgtacctgcgtaggctagacgtcagcggttttaagtgtttcggtgagccgttcaccatcgaattcaacgacgggttaaacgtcctagttggcgaaaacggcgcagggaagacaggcgttatcagcgccgtaaggcagctgttcaacgactctgagtctggcaaacggatgatcagtgagcgtgacttccatcgcggctttgacgccggcgctgtcgcatcggagcaaatccacatccaggccacttttagcgatctggatgcgaatgatgcggtggctttcgaggattggtgtggacaccacgacgaagcgaagctgacattcgaagcccggaaccaggagtccagggggcgtttcaagcatcactcgtacggtggtcacgaatataccaacccactacaaaccgagacacttgacctcatacactgtatctacctgccaccgctgcgtgacgctgaaaccaagctgagagaggggcgacagtctaggctagctcgcctgctcaaagccctgtgtcgcaaggatctggacgctgcccgcaaatcgcaagaacttcaccccttggaaaagcgagtaggggagttcaaccgtgagcttgctgagagcgacgaatttgccatcaaacttgccaaccagcgcatcggagaaagcctgaaggctgccctgggcctgcacctgtcccagggaacggtaatacagttctcggaggtgagcttctcgcgaatcgtggaagggttgcgattgctctacttcccggatctcactcaggtggatcctgcacagttccgctcgcttgaggaaaacagcctcggctacaacaacctcctgtacatcgcatcgattctggcagagctgatccttgaagaggacgagaggcagggcgaaaagaccttcctgcggctgctactgatcgaggagccggaggcacatttgcatccgcagctccaactgcgcctgcttcgacatctcaaaaccgtcgcagagagacggggcatccaggtcatcatcaccacccattcgaccgtgctttcggccgccgtctccgtcaatcacatactccacatttccaacgagggcagacctcgggcagtgtcgctgcagggctgtggcctgcccgatcccagtcggcgctttgtcgatcggtggctggatgcaaccaagtcgaatctgctgttctccaaaggcgcgattctggttgagggcattgccgaggcgattgtcgtgccagagctcgcacgcttcgttctgcgccaatacggcgaaggcaaggactcactggacgattacggtgtctccgtgatcaacctcggcggcatctatttcaagcatttcatgcagctcttctgtgacgtcactggtgagcagcctggcgagaacgtgccaatcaggtgtgccggactgacagacaatgatcctcccaaatccattgtgtccatcgatgatggcaaaggtgggaaaaaggatgttccctaccagcctcatgccgatgattaccagctcggtgagaatcctgcgctagggctccaagccgtcatcaacgagtccgaattcggccgtctgtttgccggtaaatacaaaacgtttgagtacgacattgccctggagggcaacaacctccaatggatgatgcccgttgcagccaacctgtggccggttgcggacgggccagtggtcagggcgctcaacagtgacgccgaacttgatttcaattcaatgaagccagaaacgaaagcaccgtatgcgcacgcgctactgggtcggattgacacggacgaaatcggcaagggtgtctacgcgcaagcctttgccgacaagcttgaaaccctcgaaggcgagttcgtagtaccggattacattcgccaggctgttctctgggtttgcggcctgcaggaaagggtggagtaa

SEQ ID NO: 74561 - DNA, 1752 bp, Pseudomonas sp. WCS374
ttgaattttacgcgcgagcaactggattaccttgatgcccctctagatcgacacgcgtacctgaaggcgtgtcccggaagcggtaagaccgaggtggttgctgccatggtgtccaaggtcgtgagcgaatggtctcacttcccctcgggtatcgcggtgctgaccttttcgaacagtgcaacggacgagctcaaagctagggtacacaagcatctacgcgagcccattggctacccgcatatcatttccaccttcgatagcttcgtcttcacccggctcgtagggaagatcgcacgcgacctcactggctacaaagggaaggagggggattaccggatccgtattcttgaaaagtcagcgaagattatccctacgcgcaaccctatttgcggtcgacgaatccctgcgtgccggtacaactatgacctggattcagctcggtttgttttctcaaccggggagcgagcgctggatcagcagctcaatggcgtcaacatcgacgaacctacccgtaaagacctcatagctaccaagagaaggctatgggaggcaggcttcgcaacctacggtgatatcgacatgctcgccctgattgcgctgagggagggcaagtacgacgcctatttcacccgggtagcccgcaggttcccgttggtgatagtggatgaatgccaggatctctcagaggagcagctcaggatcgtcgaaaagctccacgatcgaggggtgaaatttcattttgtcggggatcttaatcagtcgatttatggctttcggagatcaaacccggaaagggtcgagaagctgatggccaggctcgactttaagccgtacgaacttacagcgaattggcgaagcgggcaggcgatcgttgacttatgcagcaacctacttgggatcggccgaatcaaaggcaaccctaagatagcctcaatacccccgcaaattctcgaataccagcaatgtccgtcggagctgctgcccaccattcgcgacctgacccggcagtaccagagagtcgtgctggttgcccgcgggcataacaccctccagcgtttacgcagtggcgatgccttcgaaggtatcgaggtacttgcagtctcgttcattagcgccagcaccggatcactcaaggacattaaggagagccttcggacgttcgccaaatggctgaccggaaaactggagatgcaggtaagccgggcagggccttattgccccgtcgcaatggagtccaagctggcgtggcggcagttcatctacgaaagcctcaagttcatggctgccaatggagcagccgatccggcaatgacatggtctgcctgggcacggaatgccaagcttgcgctgcgccagttacctgatcaggcattcgtgcccgcagagattcgcgaggatctggaaggcctacgtgagctgaatataagtgcccgggccggagaggggcaaaaccaggtctcagttcgccttatgagtcacgaacgccaggagtaccacccggacagcctacgttacgagaccatccaccaggtgaaaggcgaaactcacgatgtcacggtgctcgtttcatcacagcagccaggtgttcatctctcgcattggcgtgactggttacgcgatcgcagtacggaggccgcgcggttcgcctacgttgccagttcgcggccacaacacagattattctgggctgtgaaaaaactaaaacccaaggaacgggaagcgctgacacaaatggggtttgagctcccgtag

SEQ ID NO: 74562 - DNA, 1869 bp, Rhodococcus qingshengii
atgcacttgagcgaatgccacatcgagggattccgctcgtgctacgacgtgaccatcccgttcggcccctccgtcaccttgctggtcggagagaacaatgcaggaaaatcgaatgtcatcgaagctctacgcctcgcgacagttcctttgagtggtcgccggagccgatacttcgagactgatgacctggcgcgaaatcactccggtccgatcactgttactacgacgttcagcggactgagcagataccaaaaagctcagttcatcggtgcacttgatttgtcgaacggcacggcgacgtacacgacacggtttgagcccgatagcggaagcgctcatcgtggccggatcgaatatctcaccggtcacgtcccgggccccgatcctgagccggagaaacgcgaccagatcaatcacgtctacctcgctcctttgcgtgatgctcaacgggaactcgattccgcctcagggaaccgcctcgcgctgatcatgagtcacctcctcacatcggaagagcaggagagcttcgtcgaaaccgcaagggctggcctggacgaactgaggatccatcccgcgatcaccacaatccagaatcggattcagcaccatctgactccgctaacggatcccgcacgggagcaatcgatgggcatcggattcgatgcgcccgagcttcggaggctggctcgcagtctccggctcaaaatggccgatgtggacgtagatcttgcagatctggcagcgtcaggtctcggctacacaaaccttttgttccttgccaccgtcattttggaactgcagaacgcacaagaatctgagttgacattgttcctggtagaagaaccggaggcgcatcttcaccctcaactccaggccgtgttgttggacttcctgcgcgaccaagccgagcaatcagcttgtgacgacagcaaccgtccggctggccggatccaggtaatcgctacaactcactcacccaacttagccagcgccgtcgggacggaaaatgttgtcgtgctgcgatcgagcacaggcgagcgcgtcgatgactgtaggaccgtcgcggtcagtgcgacggtggcgctccccttgaggggactcgacctgactcctagcgaacgtaggaagatcgatcaatacctcgatgtgactcgaagcgagcttctctttgctcgccgtatagttctggtcgaggggatcgcggaagcagtgctcgttcccgccctcgcccaccactccgtgttcggtgatgactcagatcaggcgcggaaaagccgccggatgttccgcggagcatcgatcatcagcgtgggctccgtcgactttgctccctacatcaagctccttctgagcaaggtcggcaagcatcgtcttgcagatctgttgatcgtcatcaccgatggggacccaccagtgccgaggaagccttcgaaatcatcgtcgagcagtacctccaatgatgtaatcgaatcagatgcgagcgacgacgactcgggaccctcgtacaaccgggcattgactctggaggctttggggcggcagttggacgctgacgatgtattgcatgtggccgaggcgccgcacacgttggaggcagatctgctggtagcgggttccgacaaccatgaagtgcttggcaaggcctacatcgcacaacatccgaaatcggcacacaggtggacggaaatcgtcatgagtgccgatcccgcggccgagttccacaagcgcttgcaatggaacaagaagctcataagtaaagggcagttcgctcatgacctcgctcaatcgattgcagacggatcttcgtttacatgcccggactacttgagggcagcaatcacgatcacgacaggaatcgattcgcagtga

SEQ ID NO: 74563 - DNA, 1722 bp, Rhodococcus qingshengii
gtgagggaggccatcaccttcaccgacgctcaacgcgcgctcatcgaagcaacgtcctccacctacgtctctgcgtgtccaggggccggcaagacccaagcgattgtccagcggtttgtcgagcgccccgcgatcgttcctcgcctaggtatcgcattgctgtccttcgctaacgccgcagtcgacgaggctatctcccgatgcgcgggtaaaccggagctgttgcattcaccgaactttgtcggaaccatcgacgccttcatcaatcgattcattgtcggaccggtcttcctccagcgccggggaatcagaccacagttttctagttcctgggctcacgtcaccaatacgctggtctcggcgaagggtgtgcgcctgcaggctccactcgattggttcacattcacgatcgatggctccgccgtattggatcgggcaccgtgggacaaaaagacgatggtcgagaagctcaccccgccgcaccgggaaaagctcgaaaacagggcaggtcagcgttgggcgagctacaccaggctcggcatcttcgattccgctgccgctcgtttggtgatggccttctacctagacttgcctgaggttcaggccacacttgtcgatctactctcagctcggttctgcgaggtcatagtcgacgaagtccaagactgttcagcagaggatgtgaaactcctcaaattcctgctctcggccgatatccgattggtcatggtcggtgacagagaccaggcgatttacggatttcgaggttcatcccccgaagctctcaacgatctcgtggaaggtgtcgcggtaggacaacgcctgaatgggaacttccgaagttcccccgctatctgcagcgcagtcgatagcctacgtttcggaactgaccgtgacgtgccagttgggacgaacgcctccgatgtcagtccagtgcaattggtggcattcgacaagccagtagatcttcacgcgaagatcggcgacatcctcgacgcgacagggcatctgaaggaaaatgttgtttttctcgcccatgggacaagcacggctcggacgcatgctggagaatcgacactaacgaaaccaggtaatgggaaacttgcccggttcgccgcagctgtccacacagttcaggacgcgtcaagcacgaaccgcgcacgcgcagaaggtctccgccgcctcgaaatgattgtcttggagttcgccggattcagcgaagaccgtgacatcgacgattacttgcgtccccgagggttgacggcacgttcatttcgagaatcgtgcctacgcctagcaatgacccttgacgatccgtatcgaagcactcctgccacgttcaaagaagcactgaaacaacaaacgtcatcccgaaaactgttgagctggaacctcgatggcataccagcaaggtccgacgcgtggccaacacgatcaacagtcgcaaaaaccaccaactacgtgcactccacagttcacggatacaaaggcctccaggctccgggggtcgtgctggtgattccgaaaccgtcaccatcgatggcagacaacgagcatggcgtcacacaatggtcttgttccgagcagggcgaagcgcgacgggtgctctacgtcggagcgtccagggcagaacagttgctgatcatcgccgcgcacactgcagttcacgatgcagttgcaaagaatctgaccgacgacgacgttaacttcgtccaatcctaa

SEQ ID NO: 74564 - DNA, 1797 bp, Rhizobium etli bv. mimosae str. IE4771
gtgagaattgtccgcgttcatatagagaattttcgcggcataaagctcgctgacgtatacctggaaggaacgaccgttctgctcggcgacaacaacaccgggaaatcgacagtattcgaagcaatcgaactcgcaatcggagcggatcggttggcgcgaacacaagccatcgacgagcacgacttttatgggggcgattatcgcgccgtagagaatcagcctccgaaggccattgtcgttgaggtcgtcatcgctggcctggacgaacagcactgcacgaaatttcggaacaatctcgaattctggcgggtcgcagaccggtcgttgttgggggcgggtgccattggtggcgcgggacaagctggcaccgaaccggccgtgcgcgtccggtttgaaggcgcttacgatgccgagaatgacgagttcgtggcgaagacgtggttcgccgttccacgacaggatgatggcacgcccatcagcgaatgccgatccggcgacaaacgcgagtttggatttctccaccttcgggcacttcggaccgggaaccgggcgctgtcgatggaacgtggatctctcctcgatgtgatcctgaagactcacgaggtccgaacccgcatgtgggagggactgctcggtcggctgcgcggcctcgatgtggtgggcgaggaagatgccgagtttggtcggattttgacggcgatacgcgacgcgatgcgggagatcgttccgggcgaatgggccgacgcaccgcatttgcgggtgtcggagctgacgcgcgaggatctacggcgagttctgaagtcatttctggcgaccggtgtgccgggctacgcagctccctttcagcaccagggatcaggcaccatcaacgcattggtgctggccatgctcgggctgattgcccagcgccggaatggtcgggtcattttcgccatggaggaacccgagctttctcttccaccccacgttcagaagcgtgtggtggacaaggtgcgtgagctcgcggcccaagcgctgtttacgtcgcattcgccatacgtcatcgagcagttcacgcccgagcagatgacggtgttgacgcgcgataacgctgggatgttgaccgcgacgagcgtggttctgcccgacaatctcaagctcaagattttcagagatggcttccggactcgtttttgcgaggcgttgctggcgcgccgcgttatcgtcgtggagggtaagacagagctggtcgcctatagcgccgtggctcgtcgagcggctgaacttgcgccggcgcaatacaagcggctcgatgcgcttgggtgggtgcctttcgacgctggtggccagacagcggtggcgccgttcgccagcttttttcggggtctcggcaagacggtggcgacaatcttcgatcagcagcagccggacgctcgcgcagccatcgtggccgcgtgccatgcgccttttgagcagccctatgcaggcttcgagcacatgcttctggccgaggtttcgcctgcgatgcaggcatggttcgtccagtggtttgctgcagccggcgagtggccgccggcgctcgcccatgtcattccaccggtggggtcaccggaggcagcctatcgggcgccgttcctttcgcttttcacccacaagaagggcgacgactatctaaccgtcttccttgatcagtgccaagtcggacattttccccaaacgatgctcggaattctgacagcgctgaagaacatggtcgcgccgccggcgcctcccgcgcctccgccggccgcgcagcagccgcccggcgttttcgggtag

SEQ ID NO: 74565 - DNA, 1707 bp, Rhizobium etli bv. mimosae str. IE4771
atggcgttggtactttgcgatcagcggcgaaggctattggagaccgatgggagtattctcgttcgcgggggagcggggtcgggcaagacgacgatcgcgcttgcgaaggcctgcgcagacctggcggctgaccggctcggcaacgccgggaaagcattgttccttagctttgctcgcgccaccgtcgcgcgagtagccgaacaagcgactgcgtcgatcccgcacgaacagttggcgcgtattgaaatcaacacctatcacggctttgcgtggaccattctcaagagccacgcgtaccttctctgcgcgcgacccggcgtctccctcctgctcccggctcaagcgcgtggcagtcttgctgggcttgacggggaggcccgtgcgacgcggcaacgggagctgttcgatcaagaggggctgattgctttcgatctattccccacgcttttgaccgagctgttcgcgcgtgtcccgctcctggcccaagcttacgcgcgggcgtatccgctgatcatcgtcgacgaattccaggacacgaacacggccgagtggcagatggtcgctcagctcggtcagcatagtcggctgatcgccttgggcgacccgaagcaacgaatatatgacttcaagggtgccgatccgcgtcgcttcgacgagttcattgaagcgttcagaccaacacagttcgactttttgggcgaaaaccgtcgcagtccggagacgcaaatcacggatttcgccgacgacatgatcgacggcgtattcaatgcgaccgcctacgcgggtgtttcaatctcccgctacggcgggcagagtctcagaccgttgaagcaggagattcttcgcgccgtcggtcggttgcgccgcgcgaatgagtggtctcttgcggtgctcgtacctgcaaatgctcttgctgtgggcgtcttcgattacatggctcgtgccgatcatgggctacctcgttaccccgtggagatcctggtgtctgcggaaggtccgatgctcgcggccgccatggtcgcgttgctgctcgagccccgtgatcatgccgaccacctcggcgccttggtgctcgatggcctcgcagcctttgagttgggacgcaatgaagcggcctccgccggagtgattaccaaagccgcacgcctgcgtacgattgcccggtccttgcgtgcgcaaggtgatggcgggtttggcgcccgtggcatagggccagacgtgcgggctcttctagagaatgtcgccgcgcatcgtcttagtggcgatccgatgacggattggcgttcaatccgcgcgatatttggggctagccctcgcgccgaactgcaggcggtcgccaaagaagctcgacacatgcggctgctgcgccggggagcgcagatcgagagccgcttcgccgaggcgtggcgtagccacggtgcctatcgggatgcgcgtagtctgctgagcgccgccgtagttgaggatcagtttgcggcgacgacacgccctcatcacggggtgaccgtgatgacgattcataaggccaagggaaaagagttcgacgaggtaatcgtgttcgagggagcctaccaacgttacttgcagccgcgaggggcggatgccgagcgatcggcgcggttcaacctccatgtggctgttacgcgagcgcggcgcgcggtgacgatcatgacaccgcaagcgaacccatgcccgcttcttccatag

SEQ ID NO: 74566 - DNA, 1068 bp, Vibrio sp. JCM 19052
atggcctatcaccatgcagattactcagtgcagttagatacaggtgccattgaagttaatgactttatcgacaaacttcagcttggagctatgacaaatggttcgcatgtaatgcttggtggagatggccgtaataaccagatcttgctagctttgtggaaagcgaaaagcattgttgaacaagatattgagcatgaggtcatcttctatgtggttgaagagcctgaagctcacctccacccacatcaacaacgtaagcttgctaaatacttggtgaatgaattacctggtcaaacaatactttcttcccactctccccaaatagcatcgaacttttcaccagagtcgattattcgcctgctgcctaaaggcaaatcgactatagcagctagtaacggatgctcccaatgtatcgtaaatggatgggaagaaatgagctatcgtatgagtattttacctgcggaagcgttcttctcaaatggagtgtttttagtcgagggaccttcagagatgctgttttataatgaattagcgagatatttaggtctcgacctcgactacctaaatctatcgattctatctgttgatggtatttcttttgctgtatacataagcattttggatgctctagaaatcccttgggtaatgcgaactgacaatgatatatcaaagataaaaggtaaagaagagtggcaatatgctgggattaatcgttgtctacgagcagcaggtctaactactttttctcactcaaatcaaaagttatttccgatagatgcttataacaatggtacttggaaaatgatctcagacaaagtcaacggcaaaggaatctacctatctaaagttgacttagaaactgatttggtgaaagaactacccgctcctattttaaaagcattgaataaagaatcagaagcaagcgcagttaaatacttacaaggcaaaaaagcccttcgtatgcgatctttattagctgagataaaagctgaactagtttctatatcatcaggtgatttggcagaaccattatataagttagctgaaaaagcgaaggcaaactcgtga

SEQ ID NO: 74567 - DNA, 675 bp, Vibrio sp. JCM 19052
gtgaacacgtttaaacccactcctcagcagctatctgctattgagtatacaaaaagtatgatcattactgcctgtcctggaagtggaaagacaacagtgatgaaagagaaagttaggaatacaactctctctctaccttcgcataaaggtgttattgcaataacgtttacaaaaaaagccagtgcagagcttaaaaaaaagtgtaccgctaatgcacatgacacaaaacagagcttttttggaactattgacagtttttgcctaaaggaaataattcttccttttatctccagggtttggggaaaacctgaagtggagttaaaaacaataaaaaaactacaaactccacatgtccactatcttcaacaaaagtacacttccccaacatgtgaggatattgctgctgattctggcttcaagaagctttatgatgaaggtgtgctgtggatgaactcttttgctgcgttagctctgtacgtactaaagcactccaagtcagcacagcgatacatttctgctaggtactcacatgtatttatagatgaatatcaggattcgtctctagctcaacatcaactgttttttagtctatttgagcaaggtttgattgccactgctgtaggagatgtttggcagtcgatctacgagtttagagggggaactccaagttactga

SEQ ID NO: 74568 - DNA, 1569 bp, Bacteroides fragilis str. 3725 D9 ii
atgggcgattttgataatgttatttttaaattcgatatagacgaattaaaatatggaggccgtataccacaccaattgtctataagtcgagaagtttcattcactttcataaaagcgttaagagatgttgtgtcagatttccaagacaataggaaaaatccattattaacacttcttaaaaataaaagtgaagacataaaagaagaagattttaaaccaatatcaacaaaagttgatgatctgaataaatccatagaagaattggatgatatacagatgattacaaataacatatctgaaactattaaggaggctgtaggcactacgtattctccatcttcattatctattaaatctaacttaccaagtgaagcagaaaaattacttcagtcattaaagctatttataggagaaccaggagaagactatgaaggcggtattcatgaattaagtttgggaggagcaaatcttatatttttaacattgaaactacttgaatacaaatatagaaaagaaaaagataaaatagcaaattttcttttaatagaagaaccagaggcccatattcatacacatatacagaaagcattatttgataaactaaattatactgatacacaaattatttattcgacacattctactcatatttctgaagtatcaaatatttccaacatgaatattttaggaaaatttcgtaattactctgaagtatatcagccatttatcgggctaaaagaagaagaaatagtgaaaacacaaaggtttctagatgctataagaagcaatttattgtttgccaaaagcgttatattagtagaaggagatgctgaagaaatacttattcctattatggtaaagcaaactttaggtgttagcttagacgaattaggaattagtattataaacataagaagcactggctttgaaaacttagcacagctttttcataatcaaagaatcaagaaaaagtgcgcaattataacagatttagacacatcaattacaggacaaaaaacagaagcttctaaaaggggaaaaacaagaaaagaaaaattggatgcattgaaaaaaagaaataaatggattggggtattttatgcaccatatacatttgaaattgattttttaaaagctaataataaagatgaagttttatccacaataaaagatgtatatgtggataagacagcaattcaaaaatcggaaaaagatataaattcaaaggatattaagaagtatggaaaaagaattctaactatggcaaattatatagggaagggttggtatgctatactccttagtaattatattactccaacgacttgtataccaaattatatattggatgctattttatttgtcaaaccagaatattcagaagaattgttattgcaaatatttagctatgtggtaagtagatatgaacagtctgataaaataaagagtttaaataaaaatatattaaaatgcaaaaagggagagttgccattaactgatttaataaaagagttgtatgaaaaattagagaaggaagaacctattttatatatattaaatcgactttaa

SEQ ID NO: 74569 - DNA, 1770 bp, Bacteroides fragilis str. 3725 D9 ii
atgtttgtgtggaaaaatggagaactaaatccagagcaagaaagtgccatatttaatgaaaatagtgttttattaatagcatgtcctggtagtggtaaaacgagaactctaacttataaaattgcttatgaattgtctaatttgaaatcaaacaagcaatatattatagctattacatataccaatcgtgctgcagatgaaataaaagaacgaatagaattattaggaatagatactaagcaattatggattggtactattcattcattttgtgctgaatggatactcaaaccttatcacatgtacattgaagaacttaaatatggatatactattattaatgcacacgacacagaatcctacctaacttcgttatgtattccatatgcatcagcaaaacctaaaattacatattgggactgccagtgtttttatttcacgtcacgtggattagttataaaatgtacaaattctcaaaaaacagagtcagtcatatctataattaaaagctattatcaaaatctaaaagaaaaaaaagaaattgattttgaactgattttatattattcataccttcttttaagagataataaaagcatttgtaagacattgtcacatatcttcccttttatattagttgatgaatatcaagatacgaaggaattacaatatatgattttaggtgcaattttagaaacagggaatagcagtaaggctttcattgtaggagaccctaatcaatctatatttagtaatttaggtggatttcctatgaccaaagttgatttagaaaaaaatacaggattacattttgatgaattatcgctaactaagaattatagatcatcatctcgtattatatcgtattttaactactttaaaacttataataatacgatagaagcggttggaaaagataaggattatcaaagcattattcgttacaacaaacgggtttctattaatgatttagaagatgaaataattcgtataattcaatttaatattgatgaatgtggtatttcgccaaatgaaatttgtattcttgcaccatggtggattcacttatctgggctaacaagaaatctaatggctcgtctacctcaatacagttttgatggtcctggtatggcaccttttgcaagagatatagataacttctggtataaattatcacgtattatattaacagatgcaacaccatctttatatataagacgactccgttgggctaatgaaataaaaacagatttttcatcaataggaattgatagaaatctatctgctaaaaaaatattatgtatctgtaatagtatattagttaatgaacaagatggtttagagtatttaaagaagtttttctttctgtttctccatgaactaaatatagatatacatcaatataattatttagaaatgcattataatgctttttttgaaagctctataaaaagaatagaaaggctaagaaaagaagggtctgaatttatttcgcacattgatacttttagaaaggtttttcgtcaaaaagaagggataactatttcaactaatcatggagtaaaaggagctgaatttgacacagtgatagctttcggacttttagaagattatgtcccacattttagtgatcctaataaagtagaaaatgcaaaacgaattctatatgttatagcttcgagggctagaaaaaatttatatttaatatccgaacaagatagagggaaaattccaacaatcatactaaataattataaatacaaatattag

SEQ ID NO: 74570 - DNA, 1911 bp, Bacteroides vulgatus str. 3775 SL(B) 10 (iv)
atgtacttaaaaacaatatatattaagaactttagaggtattaaggaacttaaggtttcgtttaatcaaaagataaatgttatcattggctctaatggtagctacaaaacaactcttattgatgccattcgtttattttatggttggggtgatacaaattccaatttggagataggtgttgaagattttcatcgagagttgattaaagatgataatgaagaaaactacgaatataccaataaccaaattacaatagaatacactttcgatgaaatgagcgatgctcaaaaaggagcttttagtgattatatttttatggatagtgataaaagtattttgggaagagttacaattgaatatcatttagatgagaaggaaagagtttcaagaaattactattcaggtatttacgaagctcaacaaaaggcagattatgagtcttttcagttattcaaatcttattatttaagtgctttacgagatagtactagagatttaatgaatgttaggaataatatacttggcagagtaattaagcgtaagatagaaaacaataatacaaccgaatccataaaaaatattattaaaatagctaatgatgaattattaaaacaaaaagaagtagttgaaacagaaaatggaataaataataacctacagaatattttttataaacaacctcagcaagttggacttcaaatatctcaatcaagattagagtatattataaatgtaataaaaccatatttaccaagaacaaaggggaatggggtgaattgtagtatttgggagaatagtctagggtataataacctaatttacatagctacagtactaagtgatatatcagattttcaagaagatgaaacaaattctatttgtgctctatttattgaggaaccagaagctcatcttcaccctcagattcagataaatctatataacttcttgaaaaatgcaggtttacatgtaaatacacaagtttttgttactacacattcaccaactcttacatctagagtaccattggagaatttaattttattgaatggtgacgcatacaatttagcaaattgttttgtagatagggaacaagagaatattgtgatagaagctaaaagtaagaaaaagataaaaaataatcaagtaatgtattacaagaatatgttgtctagatacattgatgtaacgcgctctcaacttttcttttcgaaaggagctttatttgttgaaggtatatctgaggggttgttaatgaatgcattttcaaatatcttaggaaaatcattaatcgaaaatgagatagaattggttaatgttgaaggtactgcttttggtcagtttattatgctatttaactcgaatgatagaatgaaacggctaccaataaaagctgcatttatcacagatggcgaccaatttacagattccaaaaaatcaaaatataatctggataaacttattgaaaataattattcgctattaaatgaattacggattaatatctacgcttcctcagaaacagctagggtggaaaacatgaaagctatgagcaataagcaaaaggatattactgtaaaaacaggggtgaaaacgcttgaatatcaaatagcattgtcaaatgtatttaatacaaagaaacaaacacaagaatcaattttttataaatatttaaggaatgatgatgttaatctgaccaatgtagaggactatattaatacaatagaaagtgagacattatcagttgaggagcaaagaaacatagctatacttttatggaaatgtatgccaggtaaatcagattttgcgcaacagtttgcatgttatctagattccttaccaaaaactgaaagagaaaaatttattgtaccagaatatattaaagaagcaataacattcctaattccataa

SEQ ID NO: 74571 - DNA, 1776 bp, Bacteroides vulgatus str. 3775 SL(B) 10 (iv)
atgaaatatgaaattacagaagagtgtgagaagtatataaatgctagaggaaatactatattaatggcatgtccaggaagtggaaaaacaacgagtatagtatataaacttagaataataactaaggaaattgagaaaaactatggctccggtcagggagtattatgcctctcttttacaaataaagcatgtgatgaaatcagaatgatgtataaacttatgcataatgaattattgcattatccgcatatagtttcaactattgatagctttataactcagcatattgttttaccattttggtatttatgtgaatattgtaaacaaaggcctatagtcgtaaatgatgagacattattacataatttgtattggaaaaagtcaaatagtggaagtgaatatattgttaatgaattaaaggatttttcacaaaaaggttataaatatctcccagaaaaaattcaaaaagagggttgcggatatagatatgataatacgctaatagataaagagcaccatactgatttactatcttattgtagggcaatattcgagtatcgtcttagtaatggagttataacaagtaatgatgctttgtggatagcatgtaacattcttaaaaacaatagttttgtagctacagcattgtcaaaccgtttcccttatatcattattgatgaagcacaagatacatctgaattacaatattatgtatttgaagccttacgaaaagcagctgtgaaaagtatggaatttataggtgatttaaatcaatctatatatgaatggagaaatgcgaaaccagagatgcttaatatatatactaaaaaaagtgattggaaattattgaacctcacttgtaatcgtcgctcagtccaacatattattgatttttattctcgattaaaacctaaaggactccctacttttgtttctcatggagtaaataataaaaatataaaaattcatatatatagatatgataatgaagtagaagagaaagtgcttgaacattttaatacagtttgtgaaaatcaccaacttaaggaacgattagtacttgttagggctaaagaagatattctagggaaaaagcaagaaacacctaaaatatggaaaaatcctttagctcaacaaataatagactcccaaatcctttactataaaaataaaattaaagatgcaattcatagttttaagtgggtattggcttgttgtatatatcctaatgactttttagctagaaagaaatactataatgatgagaaagataaaataggtaagcattctatgattattagtatgcttaaagagttaccgaagttgacaaatagtatagaagaatgggaaaaacaagttgttagatatataaaagataaattagaaatagagtcagaaataaatctaaataggaaatgtaaattagatggatataagatggcagaactaattaaacagccaatgaacaattattttggaattgatcaaaataattatattatatcccaaacgattcattctgtaaaaggtgcatctgttgatgccgtcttattatttttggatgataaaaaatcatctcaaggactatcaatacaagatattcctgctaataataatggtattgtaaacccaaaagaaaagcatcgtttgatatatgtagcttgttcaagggcaaaacaatttttatcccttgctgtaccatcttcagtttcagaagaacagataagtaggcaatttcaaggattggaaatcgatatagttcatataactaaataa

SEQ ID NO: 74572 - DNA, 1569 bp, Bacteroides ovatus str. 3725 D1 iv; identical to SEQ ID NO: 74568

SEQ ID NO: 74573 - DNA, 842 bp, Bacteroides ovatus str. 3725 D1 iv
atgtttgtgtggaaaaatggagaactaaatccagagcaagaaagtgccatatttaatgaaaatagtgttttattaatagcatgtcctggtagtggtaaaacgagaactctaacttataaaattgcttatgaattgtctaatttgaaatcaaacaagcaatatattatagctattacatataccaatcgtgctgcagatgaaataaaagaacgaatagaattattaggaatagatactaagcaattatggattggtactattcattcattttgtgctgaatggatactcaaaccttatcacatgtacattgaagaacttaaatatggatatactattattaatgcacacgacacagaatcctacctaacttcgttatgtattccatatgcatcagcaaaacctaaaattacatattgggactgccagtgtttttatttcacgtcacgtggattagttataaaatgtacaaattctcaaaaaacagagtcagtcatatctataattaaaagctattatcaaaatctaaaagaaaaaaaagaaattgattttgaactgattttatattattcataccttcttttaagagataataaaagcatttgtaagacattgtcacatatcttcccttttatattagttgatgaatatcaagatacgaaggaattacaatatatgattttaggtgcaattttagaaacagggaatagcagtaaggctttcattgtaggagaccctaatcaatctatatttagtaatttaggtggatttcctatgaccaaagttgatttagaaaaaaatacaggattacattttgatgaattatcgctaactaagaattatag

SEQ ID NO: 74574 - DNA, 1911 bp, Bacteroides vulgatus str. 3775 SR(B) 19; identical to SEQ ID NO: 74570

SEQ ID NO: 74575 - DNA, 1776 bp, Bacteroides vulgatus str. 3775 SR(B) 19; identical to SEQ ID NO: 74571

SEQ ID NO: 74576 - DNA, 1962 bp, Escherichia coli O78:H12 str. 00-3279; identical to SEQ ID NO: 72254

SEQ ID NO: 74577 - DNA, 1866 bp, Escherichia coli O78:H12 str. 00-3279; identical to SEQ ID NO: 72255

SEQ ID NO: 74578 - DNA, 1905 bp, Escherichia coli 2-222-05_S1_C1
atgaagcttgaaacgattcgtttatttggttttcagtcgtttggacatgaatcaaccgaactgagccttacagatataacatatatcattggtcccaatggttcaggtaaaaccgcagttctccaagctttgtgtcgactctttgcattcgaccccgcgttaaggcggatccagcgttcagatttccacgttccctttgatgaggaggaggttccgcttgagcgccagctgtggatagaggctgactttctttttcccgaactggaggatgacgaggacaacagtaccgtagctccccatttcagtcatatgcgactggatgagccggatggggttccgcgcgtgcgttttcgccttaatgcgactatagggctagatggagatattgaagacactttggtatatgtcctggacgttgatgaagatgacttgcctctgaatgtcgctcaggttccacgcgctgaacgtaatcatatccaagtacactatctacctgccagacgcgatcccgctgaccatattacttacggtgcgaatgcattactagggcgtctacttcgagctgttcgttgggaagctgagcgcgaaacgattcaagggttgaccgagcaaataagtgacagccttgcggcaaacccctcggtgaatgctttcagtgagagtttaaaggcaacatgggctacgctgcataaaggtaaattttttgctgaccctaaaattacatttgtcgcatcagaaattgaatccctgttaaggcatctgtctgtttcatttaccccaagtcacgatggctcatttgtcgatttttcacggcttagcgatggccaaaagtccatgctttacctttctcttgtcttatcgtcccaggctattggtagggctgttcttgcagaagaagatgtatcgtttgatcccgataaattacgtccaccagttttcactctggtagcccttgaggagccagaaaacagcctttcgccacattacttgggccgcattgttagctccctaaatgtcatgacaaaaaacctggatgcgcaagctctcattgcgacgcatgcgcccacaatgctgcgccgggtagcacctgagttaatacgttatcttcgactggatgagtcacgagagacgcaggtcacttgtattaaattgcctgatgaaactgatgaggcacataagtttgttagggaagccgtccaagcgtttccggaaatctatttttcacggctggtagtgcttggcgaaggtgacagcgaagagattgtgttgccacgcttgcttcaggtcaagggtgcgcccgttgatgagtcagccatcactgtagcgcctttaggggggcggcatgtaaaccatttctggcgactacttacagcgttaaagattcctttttttacactgctcgatcttgatgtagcccgccatggggcaggatgggggcgaattaagtacgtaaatgaccaattttccaaacgtcaaaggcgtaacaaacttcctgaacgttacggaattccaaaatgggatgatgaaaaacagaaaattcgggactacgaacattatctcgacatgcttgaaaagcgcggcgtgtttttctcctaccccatggatttagactttgcaatgttacttgcgtacccagaagcctataacgttgaggaagagaaacccgacgatgcaactataaaagctgttcttggaaaaagtcattacgattcatctcagtacagggatgatgaattagcgctttttaatacctatcaccaacgtttcaagctcggcagtaaacccgcagctcacattgaggcattaactcaactaaatgatgctgatctacttaaaaacatgccagattcactggataggctggctgatgcggttattgccaaactcacggaactgccagaatga

SEQ ID NO: 74579 - DNA, 1665 bp, Escherichia coli 2-222-05_S1_C1
atgattactgtcgaagaatggcagcccgcagatggattaacgctggaacctaatgcgaaacgtgcagcgaaagcgagtaaacgttgtttggcactgactgccggaccgggggcgggtaagactgaaatgcttgcacagcgtgctgacttccttttgcgaacaggaacgtgtcgatatcccaaaaggattttggcgatctcatttaaggttgatgccagcagaaatcttacagaacgcgttgaacgcaggtgtggaagatatctggcttctcgctttgacagttttaccttccacgcatttgccaagcgcatcatagatcgatttaggccggtactcacgggagaatatgccttagatgctggttacaccattgtagacaaaaaaagcggagcgtctcgtcacgaaatagcattcggtgatctggttccttatgcaattaaaatattgcaaacgtcaaaaatagcccgaaatgcaatccggcaaacttatagtgacattttccttgatgaatttcaggactgcacaaatttacaatatgacttggtaaagctcgcttttcagggaaccaaaattcgactgactgcagtcggtgacacaaaacagaaaattatggcttgggcaggtgctctggacggcattttccagtccttcacaaaggactttaatgcggtgccgctaaacatgtatcgtaatttccgctcaaaaccaacgttgctgcgtgttcagaacgaaattattcgtaagttagatcctgactctgtaatgcctgatgctcaactggaaggggacgacggggaggtttttgcttggaaatttgaagacagtcaaactgaagctatctatctggctgacctaatttatgaatggattaacacagagaagctacctccagctgaaattgcagtcttaatttctaagcaaccagacttatatgctgatcacctcttcaaagagttagagcaacgcggaattccctaccgcaatgagcagcaaatgcaggacatcactgtcgaaccagtggctaggttaatcgttgattacctatcatgcctgtacggacatcgggaacctaaagcctggattcgtctaatgaatcagctggttccctttgctgatgaagaaattcaaactagcgtacgaaaagatcttgatcacctaattaaaaagcatcgtaagggggtgtcagaagcaaaaaaaacggacgctcccttttcggaatggtggacatttagtcgcgctttcttaaagcatataggtttacagacgcttgttgccttatcccctgattatgagtcccatgatcgtcttaaacaggttatgcgcgatgctaaagcacgtattaaagatttactggaaatcgaatctgatttacccctcgctttaaaacgatttagtgatgatcaagctgtacgcattttgaccattcacaaaagcaaaggattagagtttgattcggttgtaatcatggctatagaaaatgagattttttttggtgatgaagaagagaaccgctgtgcgttttttgtcggtgtttcgcgagcaaagagacgccttattttaacacatactaacaagcgtgatgaacctgctaatgccaggcattggaaagtttttcggactgctcgagtagagtattttgattatgttcttccgtttgtgaggtaa

SEQ ID NO: 74580 - DNA, 1905 bp, Escherichia coli 2-222-05_S1_C2; identical to SEQ ID NO: 74578

SEQ ID NO: 74581 - DNA, 1665 bp, Escherichia coli 2-222-05_S1_C2; identical to SEQ ID NO: 74579

SEQ ID NO: 74582 - DNA, 1905 bp, Escherichia coli 2-222-05_S1_C3; identical to SEQ ID NO: 74578

SEQ ID NO: 74583 - DNA, 1665 bp, Escherichia coli 2-222-05_S1_C3; identical to SEQ ID NO: 74579

SEQ ID NO: 74584 - DNA, 1872 bp, Pseudomonas aeruginosa C2773C
gtgcatcttgtgcgtgttcgcgtccggaacttcagaggcatcgcctacggtgaggtccacctcaatggacacactgcttttatcggtgacaataacgccggcaagtccacattgctggaagcggtggacttggtacttggcccggagcgcctgagtcgtcgccctgtaattgatgagcacgatttctatgccggtacgtacgtagacccggccaagaacgaggtcgtcccgatccaggtcgaggttattgttgcgggactctctgatgagcaactgcggcatttccgggaccatatcgagtggtgggatacacagaccaagtcattgcttgtaggggcacctccggagggaacagatgcgccccatgtcggagcggcaatacgcgtcttcttcaacggttggtatgacgtagatgaggacgacttcgctggggatacctattacgccactcccgaaatgccggatggctcctacccccggttctctgcgcccgacaaacgaaaatgcggttttctttatctgcgcacgctgcggaccggagctcgcgcactcagcctggaacggggctctttgttggacgtgatccttcggctgaaggaaacacgactgactatgtgggaggatttgctcgaccagctgagggcactgccagttggagagaccgaggacatcggcgagttgcttgtcgcagtccaagatgcagtacggcactacgtaccatccgactgggcagagcaaccccacatgcgggtttcggacctcactcgcgacatgctccgtcgaaccctgactgtcttcatgggtactggagcgaaaaggccggacggctcagtctattccgccccatatcagcaccaaggcactggcacgattaacacgctggtattggctctgctttcgatcatcgccgaactcaagcaaagcgtgatcttcgcgatggaagagccagagatcgcgcttccgccgcacacccagaaacgaatcatcaattcgctgcgccagaagtcggcacaggccatcttcacctcccactcaccctacgtgctggaggagttcgagcctgcccaggtagtggttctcaagcgcacggccggtgttatgaccggggtgcctgctacatatccgccagcagtcaagcccaaggcctatcgcacagaattcaaagcacggttctgcgaagccctgctggcacgctacgtacttgtacttgagggccgtacggagttcgacgcattgcctgccgctgcccgccggctcgccgagctggatcccacgcgattcaaatcgctcgaaaacctaggtgtggctatcgtcgacgcccgcggcgagaccaatgtcgcgccactgggtgcattcttccgctcactcggcaaggtcgtgttcgccgtatttgacaagcaaacgccggaggcgctcgcaaccatcactgcctcggtcgatcatgcctatgagtctgcgactaagggctttgaaaaccttgtcttgtatggcgcgtctgaggtggcactccgcagctatgctgctgttgtggttgttggcggtgattggccgcagcatctcgcggcatacacaccaacacccgcaacaccgctggccaatctgcaggtagctctgtcgcactattttggctgggccaaaggcggtggcgacgccggcgacttgctcgcctcctgtccaaccgccaatgacatgcccgaatacgtgagaaccacgctggcagccatcaagaacgtcattgagccacctcagccgcctccattacctcaccagctagccggcgtgccccctctcccagaggctgcagccaagccaccgccattggcagcagcctatgggaagttccaaccgtccccgccccagcctctggcatga

SEQ ID NO: 74585 - DNA, 1713 bp, Pseudomonas aeruginosa C2773C
atgacggaagtgtggagcgatcagaagcgcggtttcctggcgtgcgctgggcacaccttggcgctaggtggtcctggtgcaggcaaaacacacgtcgcgctggtcaaagctcgtgatgagattcgctcaggggtactcaagccaggccagaagatcctcttcttgagcttcgccaggcctaccgtagcgcgcatcatcgaaaaggcttctgagctgatttctcgcgaggacctgaagcaacttgaggtcagcacgtaccacggttttgcttggagcattctccgaagccacgcctatctgttgaatggcaggccgagcttgcagcttctgccaccacccgaggcagcagcgcatttggcagatatcgataaggcccagcacgaaaatgagaagcgacgcctattcgagcacgagggccgcctgcatttcgacttgttcgcaagcttggtcagcgaacttctgagccgtagtgaccggctaagcgccatcttctccgacgcctatcccattatcatcctcgacgagtttcaggacacaaactgtgatgaatgggcgctgatccagcagcttggaaagcgtagtcgcctcattgctctggccgaccctgaacagcggatctatgagtttcgaggcgctgatcctaggcgggttggcgactttctggagatcttcggcgccgtccacttcgatttcgcaggtgaaaaccaccgcagcagcggtaccgatatcacgacctatgggaatgacctgctcactggcgcaaacaagggcaaggtctatcagcaggtaaaaatcacgcgttacggcttcatgtatggaaagagcctgcacttcaatgccaaggccgcagtgctctcggcgttggatcgcctcaaggcaataccggacaaatcgatcgcgatcctggtgccatccaagcggctgatgctcgagctttctgattacctttcttctgcagctgatggtctgccagagctacatcacgatgttgcaatggatgctgaaccgccggctctcgccgctggcgttatcgccacgttactggagggggggacggctggcgatttggcgagccgcatgcttggtgcacttcactcgcacattcgtggacgccgcggaggcaagcctaccccccagtccgagctggacctggcaggtgctcttagcggattcctctcctcgggaaagatccgcggtgccaaacgccagctgattgtcagcgaagttcagcgtatcgcagagttgcggcagcaactgcaattaacgggcgaccctgcggaggactggttgcagctgcgcggcctgttgcaatcgtccgctgcggtagccttgaagcaagtagcaacagatgctcgctaccttcgacttcttcatcgtggctcggtactgcgggctaacttgggtgcgctgtggcgtgcccagggagagtacaagggggctgaggaagcagtccgcagtgccttgatgcaggagcatttcgctgcagctcaaaaggactggcgcggcatccacctaatgacgatacataagtccaaagggaaggagttcgacgaggtcatcatctacgacggcctatttcagcgcattgccaaagccccgcaggatccaaaaatctgcgctcaggatcttttagtgctacgggtgggagtgactcgggcgatacgtcgaaccaccattctgactccgaagcgcgatacctgccctttcctgtga

SEQ ID NO: 74586 - DNA, 1655 bp, Pseudomonas aeruginosa
ctaacaacgtaggtaagacggccgtcgtcgacgcactccgtgcattgttggcaggccatgaggagtcctacccgcgctttagcgtggatgaccgccatcgacccaaggtggggcagcctgacggcgacatcaccttccactatgtattccgtgggcttgatgcgaatgacgaagcggacttcttggcagcactccagcccgggaacgatggcaagctggaggcacacgtctggattcgatattcagatgcggacaagggagggcgcttcaggatcaagcgttggtgcggggcccatgaggatgtcggcctaacgtcggacatgatggagaatctgcgcggggtctatctgcagcctctgcgcgacgcctctcagggactgaggccaagccggaacagccaactgtcccgactgttgcagctgctggctgatgaggctgggcgcgcgggcattaatgaagctctcaggcgcctggatgatgagctaaaggcgcatgcgcccatcgtgcgcacccaagacgcgatttcaacgcggcatagttccatgcttggtaagcagctggcacagcttctggaagtcggactgagtgcaagcgatttccaaaggctttcgtcacggttgtctctgacggtggactcgtttgagatcgagcagaatggtcttggtttcaacaacctgattttcatggctgtcgtcctcagcgagctggcaaagaatccggaagctacgtaccgagggttggtcgttgaggagcctgaggcgcacctgcatcctcagcttcaagccgtcttgttgcgctaccttgagagcattcaaatcattgacggagagaagcccgtccagctatttgtgaccagccactcgcccaattttgcaagtatcgccaatctggattgcctcacttgcctggtggagacaggtgagggagtcgagacgtttttcccgagaacgattaagttcggcaaggggaagcgcgagaagctggagcgctatctggatgtgacccgagcggaattgttctttgcccgacgggtgatatttgttgaaggcgcggctgagctgatgctgatagatgccctggcaacgaaggccggccacaaccttagggagcacggagtcagccttatcagtgttgaggggttgaacttcgattcgtttctgccgctgtttggcgaacaagcgttgaagattcctacagccctgattacggatgctgaccccgtggctgaagcggccgatggagaagagcccgaagcattgtatccgggagctgacgacgttgtgcaagtgtctgacaacacggcgaagatgaaggcgctcgaggataagttcgtgcaggtgcgccatggtgtgaagacgcttgagtacgatttggcgctgtacgcggacaacagggatgcaatgttgaaggcgcttgcagaaatgcacccgaagatcgctgtagcggtaaaggcagcggtggacgcggcaggtagcgatgcggagaaggctcgcgcccttttctccggcatgttcgagcgtcctcagaacaacgtgcagaaggggcgattcggtcaggaactcgcgcaagtgttgaaggacggcgcagcttgcgtcgtgcctgcttacatccgtgaagccatcgagcacgtctgccaagtccgggtggccccatga

SEQ ID NO: 74587 - DNA, 1737 bp, Pseudomonas aeruginosa
atgaacgagctttctccggaacagcgggcaattgttgatgcgcccatggcgccgctggcggttatcgcgtgcgcaggcagtgggaagacaggaactgccgtgcaccgagtcgttgaaatgcgcaggcggcttggggaaaggcgcggcagggtagcgttgctttcattctccaatgttgctgtcgagacgttcagaaaaggctatcagtcattggctcaggtgttgcccgctgacgctgggcgcagtcgcgtggacattgatacgctagacggtttcattaccgccaacgtcctacggccacatgcctatcgaacgatgggcgccacgcagtccgcatttctagttgtcggtagtgagccgtttctaaacgggtttacgtactggacaggccagtatccccttcccgtgacgaaggtgcaggtggcgtttcatggaggcgcaccgatcttctactacgacgtttttgggaaccctgaactgctgaatcaagccgtcgcccgtcagttggtcgatcggcttggccgtgtgggtgcctacacccacgaccttggccggtattgggtctatcgaacgctgcaagagcaacccgccatcctgcgagcactggcgcgtcgctatcctcatatcgtcgttgacgaatcgcaggacattggtacggcgcaccaggccatcctggatctgttggcagctgctggcgtgcaaatctcgctgataggagaccccaaccaggggatctacgagttcgctggagcggacggcacgttcctaagggagtatcacgctcgcgccggcgtcgctgagtatgcgctgacccacaactaccgctcgctcccctccattcttgatttagccaatagactgtcgggacgcgatgatacgccggagcgaaggccagaagagggagccggcggtgcctactttatcggttacgcaaaagccgagctgccacagttgatggacgcgttccacgctgaagtggccaacttgaggcttcgcccggagaaatctgcagtcctctgccgtggtagagcgcaggccgacgagttggcaggtgtggatgcccctgcgggccagggcgtggtaaagggatttgcttctgcagctgttttgcgcgacaagcagcgggactaccattcggcattcaagctggtagccagtagcgttgtcgcgctcatggataatcctccgaacgggctgttatcgaagctcgccaagcccgctcagttcccagaggtaaaaggccttcatcgattgatatgggcatttacgcgcaacgctggtactggcctgccatcctctgaactcgtcgccgcaaaagagtggcatgcagcgttgttggagcggattcggaatctgctggaccgggttcaagcggaattcggttttctgccggcggataaccttggcagaaagctggcaaagagagggctgcctgaaacgccgcttgccttagcggaagacttggcagcggaacgcggcgccaggattcgcgtagataccgttcaccaagccaaaggcgagagcatcgatgcggtcctgtacgtcgccaccaaagagcatgccttggccatgctcggcggtgttggtactgagcttggacgcattggctacgtcgccattacccgagcaaggaacctcttgtggataggtgtgccagccaatgcgctcaaagagctaaggccggcacttttggctgctggccttcaggaagcaggggcagttgccaagcctgagtag

SEQ ID NO: 74588 - DNA, 1905 bp, Mangrovibacter sp. MFB070
atgaagcttgctacagttcgtttatgtggttttcagtcgtttggtaaggaaccaattgaactgaaccttgaagatattacatatatcattggccctaatggttccggtaagaccgcagtacttcaggcgttatgccgactctttgcatttgaccccacgctaaggcgagttcagcgttcagatttccacatcccttttgacgaggaggaggtcccctctgaacgccatttgtggattgaggcagattttctatttcccgaactagcacaggatgaggacaacagtaccgtagcacctcattttagtcatatgcgtttagacgagccagaaggtgttccacgtattcgtttccgccttattgcaactatggggctggatggcgacattgatgaaggtctggtatatgtcctagatattgatgctgatggctctcctcttagtgtggctcaggtccccagagctgagcgtaatcatatacaggtacattatctgccagccagacgcgatcccgctgaccatataacttatggtgcgaacgcgttgctcgggcgtttacttcgcgctgtccgttgggatgctgagcgagttacgattaaaggactgaccgaccaaataagcgaaagccttgcatcaaatccttcagtcaatgctttcagtgagagtttaaaaacaacatgggcagcgctgcataaaggtaagttttttgctgatcctaaaattacttttgttgcatcagaaattgaatcgctgttgaggcatttatcggtttcatttactccggggcacgatggatcatttgtcgatttctcccggttgagcgatggccaaaagtcaatgctttacctttcacttgtattatcatctcaagcgataggcagagctgttcttgctgatgaagataaatcctttgaccccgataaattacgtccaccggtcttcacattggtagccctagaggagccagaaaacagtctttctccacattatctgggacgtattgtcaactctttgaataccatgacgaaaaatgtagatgcgcaagctctcattgcaacgcatgcacccacaatgctgcgccgggttgctcctgaattgatacgttatctgcgattgaatgagtcacgaaagacgcaggtcacttctatcaaattgccagataaaactgatgaggcgcacaaatttgtccgggaaggagtccaagcatttcctgaaatctatttttcacgcctggtagtgcttggcgaaggtgatagtgaagagattgtattgcctcgtttacttcaggccaaaggcgcgcccgttgatgagtcagccatcacaatagcgccgttggggggacgacatgttaatcatttctggcgtttacttgcagcattgaagatcccctattttacattgcttgatcttgatgtaggccgctatgcggcaggatggggacgaataaagtacgttaatgaccagtttgccattcatgaaccgcttaaaacgcttcccgatgatcacctcattccagactggaatgatgaaacacataagattcggaactttgcgaattatttggacgtactcgaagagcgtggcgtgtttttctcctacccgatggatttagatttttcaatgttacttgcttatcctgaagcttatgacgttgataaagaagaacctgatgaggcaatcattaaagccgttctcgggaaaagccatcatgattcatctcagtataataaagacgaactagcactctttggcacctatcaccaacgctttaagcttggaagtaaacccgcagcacacatagaggcgttaactcagctaacagatgctgaactacttgatgacatgccgcacgcattagacaagctggcagaggccgttattgccaaactcgcggagcagcccgaatga

SEQ ID NO: 74589 - DNA, 1665 bp, Mangrovibacter sp. MFB070
atgattactgttgaagagtggcaacccgctgatggattgacgctagaaccaaatgcaaaactagcagcaaaagcgcgtaagcgttgcctagcacttactgccggaccgggggcgggcaaaacggaaatgctagcgcaacgagctgacttccttttgcgcacaggaacatgccgatatcccaagagaattctggccatctcatttaaggtagatgccagcagaaacctaaagaaacgtgttgaacgcagatgtggaatggatttagcctcacgctttgacagctatacctttcatgcatttgccaaacggatcatcgatcgcttcagacctattctttcgggagaatatgccctagatgctggttacaccattgtagaggaaaaaaaagggccgtctcgcactgaaatagaattcagcgatcttgttccgctagccattcagatattgaaaagatcaaaaattgcccgcaatgcaattcgacaaacatatagtgatatttttcttgatgaatttcaggattgcacaaacttacaatatgacttagtgaaactagcttttcaagggacaacaattcgcctaactgctgttggtgatacaaagcagaaaattatggcctgggcaggtgctttggacggtatttttcagaactttgttcaagattttaatgccgtgccactaaatatgtatcgcaattttcgctctaaaccccaattgttgcgggttcaaaatgaaattattcgtaagttagaccctgcatcagtaatgcctgacgaacaattgaaaggaaatgaaggtgaggtgtatgcatggaggttcgacgacagccgaattgaagcctgctctctagctgatttgatcagtggctggataaataacgaggggattccgccagcagaaattgcagttctggtttctaaacagttagatttatacgctgaccacctgatggcagagttacaagcacgcggaatcccttaccggaacgaacagcaattgcaagatatctcggtcgagccagccgcttgtttagtggtcgattatttatcttgtctttatggccagagagaacctgaagcatggatacgactgatgaatcaattagtaccttttgctgatgaagaagcccaggcaagtgcacgtaaagaccttgatcagttgataagaaatcagcgtagaaaagtatcagaagccaaaaaaacggattctccattttccggtatgtgggtttttgttgggggtttcctgaagcatattggcatgcaaacgctggtagcgttatcacctgattatgaatctcaagaacgcctgaagcaagttatccgcgataccagagcaagaatcgagaatttaatgggaggcgaatcagacttatcgggcgcattaaaacggttttcgaatgaccagtctgtccgtattctgactatccataaaagtaaaggattggaatttgactcggttgtaatgatggcaatcgaaaatgagattttttttggtaacgaagctgagaatcgctgcgcatttttcgtcggtgtttctcgcgcaaagagacgtctggttttaactcatgccgataagcgagaacagcctgttgacgccaagcggtggaaagttgttaggacggcgcaatctgagtattttagttacgtcgtcccattcgtcacgtag

SEQ ID NO: 74590 - DNA, 2307 bp, Burkholderia cenocepacia
atggcagacgcatcccccgtctcatcggtatccggagacatcaaacttcgatttctcgagatttgccagtttcgtcgactcgggaaggtccaaatggacgtcgacacgaagacgacaatcttggtcggcgcgaacaatagcgggaaaacttcgattcttgcagcgctccggcacttccttgcggacggcgctcccttcggtgctttcgacatcagcctctcgcagtggccaaaactccgagcattgggtaaatcgtgggaggcattaaccgaagatccgtcaacggtagcggcaaccgacgatctgtgggaggaacaacgccagacgcttctggccgccatgccgacactagacctctggtttgatgcagaggcaggtatgtatcactatgttaagccattcctttctaaattcagctggaacggtggcgctgtcggcgtgcgcctgcgactggaacctgcaaccagtgtcgatgaactgaaaaacctggcttgggcgtattgcaccgcgcggtcgcccgtcaaggagatgggcacagactcgttggcatggcccattgatcttctggatttttggttgcgtgagccctcgaagcttggccaagttcgcgcatacaagctcgatgcagacaacaacccgatgacgggtcttacgagctacgtcacccaggtactacccgcaggcgtcggttcaattgagcgcaaacacctgtcgaacttgatacgcgtggatttcgtggccgctcaacgggggctcggcagcgaagaagctgattcgcgatcgacctcgggcacacatcgagtcggcatgttttctaaccagcttctcaagtttgcccggcagcatttgaacgtcgccagcaccgggcacggccaccgaacggatcttgtcaaggcggtggccgaggcgcagagagacttggacaagaagattcacgaggccattgccgactcggttgctgaggtcaagaaactgggatatccgggcctgcacgatcctcaggagatgcgcttccgtacacgcatccagacggctgacttgctcgatcatggaaccgctgttcagtacagcatgcaaaaggagtcgcacgaagaactccttccggaatactcgatcgggcttggttatcagaatctgcagtcactcagctatcagttggtttcgttcaaagccgcccggctcaagcccgagaaaggttcgccggcacctgttcatttggtaatgatcgaggagcccgaggcacaccttcatgttcaggtgcaacgcatctttccggataaggcatacaagctcatcaatcccaccgaaaaggatgcgtcgaccctgcagagtcagttgcttattagcacccattcgagtcatctggcccatgctgaggattttgacagacttcggtacgttcgccgcgtcgcaaagaacgcaacgagcggcatgccaacgaccgaagttgtcaaccttggacaagtttttggcgacgacacgaagactcgccagttcgctgagcgatacttccgtgttcagcacactgacctgctgtttgcaaacgcggcaatcttcgttgaaggcgttgccgagcgcatgctggtgccgctgttcatcgagcgagatttcgaggaactgaacagccgctacgtgtcttttctcgatatcggcgggagtcatgcccacagactcaagccactggtcgagcggcttaggattcccactgtcgtcattaccgacattgacccttgcgaagaaaaggaaggcaaggccaagaagaatggggagccaaccaaaaagctcgtcgccgttgcgaacacggggcaagctgggcttcactgtggtaacccgacactgcgcggctggcatccgaaattgcagacgctcgacgaattcaagaatccgactgacgatcagttggtctggaacgagtcaggctgcttggtgcggttcgcctggcaactgcccgtcgcggaagcagacggcaagtggcctagtacgttcgaagactcgctcatcctgacaaacatcggttggttcaagggcctgatggacgagaaagatgatgacgatgatacagagaacgaggcccccaccggcgcgcttggctccgttgcaaaaacagtcgcgaaagccgggacggttgccgaactgttaggcgcgctccatgtgctgatgcacgactcgttcaaaaagggagacttcgccgcgagcatcttcgagaaagtttccgcaaaagcgccggttacgtgcccgaaatacatcgcggacgccctagtatggctgacgaaacagcttgaacccaaccaggagctgatgggatga

SEQ ID NO: 74591 - DNA, 1959 bp, Burkholderia cenocepacia
atgaacacggttcccatgatcgctgacaacaatcgcgacgccggggttgtcgaagaaatctgcggctatctcaccgaggagcccgcccgtagttacttcctttttgccggcgcgggttcagggaaaacacgtaccctcgttgaagtgctacgccggttgacgggtgtcgtggagcatgagaaaggtggtcaacttgcgcggcgcctgcggatgtacggacggtccatacgcgtggtgacatacactcagaacgcggtctcggtgatcaacggacgcttgggggataacgacctggtcaatgtctccaccatccacgcgttttgttgggaactcatcggcgggtttaacgaagacatccgggccgcgctcatagcagtcacgcaagccaaacttgaaaaggaaactgaagaggccctggcgaagccaagaggcatcacgaaggcaaaacaacgggacctagatgaaataaaagcagacatcgaggagtttagatccacagatgtgttcgtctatcacccggaccgcaatacttacggggccggggcgcttgcacataatcacgtgctcgaggcgacggcttggctcctgcagaacaaacccacgctcaggactatcctcaaagacagccatccgatcatcctcattgacgagtcccaggacacgatgaagggcatgctacatgcattgatcgatattgcggagccgcggggaaatggccttaccctcggtttgcttggcgaccatcgacaacgcatttacaccgatgggcactcaaatctcccaagcttagtcccgcccagttgggcaacccccgaactgcaaatgaaccatcgcagtcagcgccgaattgtcaccctcatcaacaaaatttgggaggcaaagcttgaaggcaggacgcaaccagctaacggtgtggcacaacatccacgaacagagaaggccggcggcgtggttcgactctatgtaggcaacacatcgcttacgccggaggaaaaagtgcgcggcgaacgttggtgtgctgaccagatgcggcacgcaagcggtgcggccgcctggagcgatggaaaattccaactgctcgccttggagcacaagctcgtggcaacacgcggatcgtttctcgaggcgtttgatgcgatgctcctgctcgacccgaacactgccgctccaagcggaagtggcgaaaacaagggacccgctgctgcgcaagtattgctgaacgagcttgctcaacttgaggcatgtgtcggcgctgacggtgcggtggacgagtccaaggtcaccgaggtctttcggcgctacggtcgcctcgacgatatgcccgaggacgcagcgttacgcgcatgccgtgtcgacgaaattcgtcaagccgtcaccgctttcgccaccgtttgcacagacccgaaatctactgtgagcgatgtgctcgcaacggttttgagcgcaaatctgtttgaagttgacgatcgccttttagtcgcatacgccgacaagtctcccccacctcctgcccccggtcgaggagaagaggagtccaagcaagatcgaatgcgtcgcggatggtgcaagctgtttgctgctccttggaatcagctccagaagtaccgaaagtatcttgaaggaaattcgacacttgccactcatcaggtcgtcaaaggttctgaattccgccatgtcatggtggtgatggacgacaaggtggccaatggcaaccaaatttcctatgacaagatttttggagggtcgaagctcagtagcagggactgggagaatgttgacagcggcaaggaaacaactattgatcgctcgctgcgcctcctgtacgtgacttgcagccgtgcacaagagtcgttggcactggtactctggtcttctgacccaactgcagctttggcacagatcaaaaatagtgactggtttgtcaacggtgagtttgaggtaattccgccactcacttga

SEQ ID NO: 74592 - DNA, 1992 bp, Vibrio parahaemolyticus; identical to SEQ ID NO: 72330

SEQ ID NO: 74593 - DNA, 1752 bp, Vibrio parahaemolyticus; identical to SEQ ID NO: 72331

SEQ ID NO: 74594 - DNA, 1992 bp, Vibrio parahaemolyticus; identical to SEQ ID NO: 72330

SEQ ID NO: 74595 - DNA, 1752 bp, Vibrio parahaemolyticus; identical to SEQ ID NO: 72331

SEQ ID NO: 74596 - DNA, 1992 bp, Vibrio parahaemolyticus; identical to SEQ ID NO: 72330

SEQ ID NO: 74597 - DNA, 1752 bp, Vibrio parahaemolyticus; identical to SEQ ID NO: 72331

SEQ ID NO: 74598 - DNA, 1992 bp, Vibrio parahaemolyticus; identical to SEQ ID NO: 72330

SEQ ID NO: 74599 - DNA, 1752 bp, Vibrio parahaemolyticus; identical to SEQ ID NO: 72331

SEQ ID NO: 74600 - DNA, 1992 bp, Vibrio parahaemolyticus; identical to SEQ ID NO: 72330

SEQ ID NO: 74601 - DNA, 1752 bp, Vibrio parahaemolyticus; identical to SEQ ID NO: 72331

SEQ ID NO: 74602 - DNA, 975 bp, Vibrio parahaemolyticus
gggcttagtgatgaacaaattggctttgtacaacgatatctagatgcgatacgaagcaacttactattcgcacgaagtgtcgtgctagttgagggggatgctgaagagattcttattcctattctactgaaaaaggttctagggttaagtttagacgaaattggtatcagtttagttaatattcggagcactggtttcgagaatattgcaatgttatttaacaatgaaagaatcaaaaaacgttgcagcattatcaccgacctagatgaaaccttctttgatactacgatttatcctacagatagtgacgcagatagaaagaagaaagagaaagccctcggctctgaagaaactggctttgctcgtaaaggaaggcttgatgacttctgtcaaaataacccttggatttcgattttttatgcaaaacatacttttgaggttgatttcatacaatcatccaacagcgattacctcaagatgattgtcagagatgtgtacactcagccagctactgtgaatgctgctacaacagagctatcttctactgatattgctatctcaggctcaagagcattaactatggcgaactatcaaggtaaaggttggtttgcccttacacttagtaaagtgattgactttaaagtagctattcctgagtacattttcgatgctatcaagtttgcgcatggtgacttcaatgcagaactcactttcaaaatactcaagcaccgttacgaatcagttattgaacatgtcaaagatggcctagacataattgagcgtttagatgaagaaggcaacgttagcctaaaacaagaatgggaagcatacttggctccatatgaaagtggcttagcgacatttactcctaaatgggaagcttttaacccattaggtggcgatataaatgttctaaaagctcaactgatgaacgacctgcctactgaaaacaatgacattttaacaaggatctga

SEQ ID NO: 74603 - DNA, 1791 bp, Vibrio parahaemolyticus
atgtttgtgtgggatgaggaagacctaaacgatgagcaagtagcggcgattagtgagccgaataatgtgtttttggtagcatgtccgggaagtggtaaaactcggactcttacctacaaaattgctcttgagctttcgaggttagacaccatcaacaaatgggtcgttgctattacttatacgcatagagctgctgatgagatacgtgagcgcattgaaactcttggtgtagatacatcacaactgtggataggcacaattcacgcattttgtttagagtggatattgaagccatacagtctataccatgacaagctgaagcacggatttaaaataatcaactcttatgactctgaagaaattatttcccgaatatgttctaacatacgtaccgagcgtattcgctatggagagtgtagtcattactacacaccaaggggcttagagctgacttgcgcaggaaataagacttcactagttaggcaggtattaggtgactatcaccttcatcttgaagataatagtcagatcgattttgagcagattctatatttttcttatgagatattggccagtaattcagcgatcgctaagataatagctaatctattctcgtatgttcttattgatgagtatcaagacaccaaagagatacagtattcaattgttgctagcgttataaaagctagccgaggtggtgtaaaaacgttcattgttggagacccaaatcaagctatttacggttcactcgggggctacgcaataacacaacaggaacttgagcaaataaccgaagtatcatttacgccaatggctttagataaaaattatagaagctcaagcaggattattgattactacagcaattataatgttattcctagcgcaactgttgctgaaggtaagtataaagaccatctgagtgttattacttatgatcaggttactcataaggattatttagttgagcaagttagtaggcatattgagcatagtgttgagaatttgggtatcttggaaaaagagatttgtgttatagcaccttggtggatgcacttggctgcgctaacccgtaacttagtaaaccgattaccgcaatatagctttgatggtccgggtctagttccattctcaagagatattgataacttttggtttaagttgactcaaatcattttaacagagccatcacctaacatgtatgttaagcgtcttcggtgggcatctgatatcttatttgacatggaacttgcacaggtagatgtcaactcgataacctcaaaacagctacttaaaaccatcaactctatttcaatagatgaagacgatggtttgacttatctacgttcattttttgatgaattactacatgctctgggaatagactttgccttatatccaatgttaaaggaacatcatgattcattctttaacagtacacaaaatcgaattgaacgtctgaggaacgaaagtgcactatttgctacagatatagaggcatttcgcagagcgtttaaacctaggactggtattaaagtgtcaacgatacatggggtaaaaggaggtgaatatgatgtcgtcatctcttttggtctgctacaaggtttagtgccaaatttcaatgattcttccgttgaaagttcaaagaaactgctatacgtgataggttctagagctagaaaaaatctgcaccttatttcagaaaaaggaagaatgtttggctttggtcgatatagaagcgagcgtcagcctacagaagtcctgtgcaacttagtctacacatacgattaa

SEQ ID NO: 74604 - DNA, 1992 bp, Vibrio parahaemolyticus; identical to SEQ ID NO: 72330

SEQ ID NO: 74605 - DNA, 1752 bp, Vibrio parahaemolyticus; identical to SEQ ID NO: 72331

SEQ ID NO: 74606 - DNA, 1992 bp, Vibrio parahaemolyticus; identical to SEQ ID NO: 72330

SEQ ID NO: 74607 - DNA, 1752 bp, Vibrio parahaemolyticus; identical to SEQ ID NO: 72331

SEQ ID NO: 74608 - DNA, 1992 bp, Vibrio parahaemolyticus; identical to SEQ ID NO: 72330

SEQ ID NO: 74609 - DNA, 1752 bp, Vibrio parahaemolyticus; identical to SEQ ID NO: 72331

SEQ ID NO: 74610 - DNA, 1992 bp, Vibrio parahaemolyticus O4:K12 str. K1203; identical to SEQ ID NO: 72330

SEQ ID NO: 74611 - DNA, 1752 bp, Vibrio parahaemolyticus O4:K12 str. K1203; identical to SEQ ID NO: 72331

SEQ ID NO: 74612 - DNA, 1992 bp, Vibrio parahaemolyticus; identical to SEQ ID NO: 72330

SEQ ID NO: 74613 - DNA, 1752 bp, Vibrio parahaemolyticus; identical to SEQ ID NO: 72331

SEQ ID NO: 74614 - DNA, 2211 bp, Vibrio parahaemolyticus
atgcacatcaccaaactatccctagtcaactatagaaactttaataatgttaaacttctgtttaataagggaataaacacaataattggtgagaatggatctggtaagactaacttattccgagcgatgagattgttgcttgatagctcaatgcctcgtttcgcgacgaaattggcagaaggcgatttttgtagagcacttggcgattggcgtggtcattggattatcattagtcttgagtttgatgatattgcgggtgatgaagccagtcagtctttattcctccatggtgtgggaaatgcggaagatgaagttgtctctagagcaacgtacaatcttatttttaggcctaaggcatacgttagacaggctttagcacaactaccaacaggggatctagccgcattagaaagttacttgggtagtataactatcgatgactatgaaacggtcctaacaggcaaaagtgtcgctaattttaatgatcccagtgtctacaagagtatagttggtgactttgaaagggtagattttcctactgcgttaaataacccagttgttggtatacgcttaccaaatatccttaatatgcccaatgaagtttcgtttaccttcatcaaggcactaagagatgtagtatcggactttaatagtaatagaaccaatcctctgctcactctactaaaaagtaaatcgggtgatattactcagtctgatttccaacctattgcagatctgattggaacactgaacaatgaaattgaagggctacctgacatctgtgcaattcgtgatgatattgtaactacggtaggagatacggtcggtgatacatattctccaaattcaatctctattcgatcaagtttgactgatgagtcagaccaacttttccggtcattaaagctttttgtctctgagtctagtgatggttatgaaggtgctatccatgaaatgagcttaggcggtgcaaacttgctgtatctcacattgaagctactagagttcaagtaccaaaaggctaaccaatcaattgcaaatttcttgttgattgaagaacctgaagcacacatacatactcatattcaaaaatcgcttttcgacaacattaactacgaaaacactcagattatttattcaacccactcttcacatatttcagaagtaagtaatatcaacaatatgaacatcattggtcttgtcaatggtgtttgtgaggtatttcagccgtcatcggggcttagtgatgaacaaattggctttgtacaacgatatctagatgcgatacgaagcaacttactattcgcacgaagtgtcgtgctagttgagggggatgctgaagagattcttattcctattctactgaaaaaggttctagggttaagtttagacgaaattggtatcagtttagttaatattcggagcactggtttcgagaatattgcaatgttatttaacaatgaaagaatcaaaaaacgttgcagcattatcaccgacctagatgaaaccttctttgatactacgatttatcctacagatagtgacgcagatagaaagaagaaagagaaagccctcggctctgaagaaactggctttgctcgtaaaggaaggcttgatgacttctgtcaaaataacccttggatttcgattttttatgcaaaacatacttttgaggttgatttcatacaatcatccaacagcgattacctcaagatgattgtcagagatgtgtacactcagccagctactgtgaatgctgctacaacagagctatcttctactgatattgctatctcaggctcaagagcattaactatggcgaactatcaaggtaaaggttggtttgcccttacacttagtaaagtgattgactttaaagtagctattcctgagtacattttcgatgctatcaagtttgcgcatggtgacttcaatgcagaactcactttcaaaatactcaagcaccgttacgaatcagttattgaacatgtcaaagatggcctagacataattgagcgtttagatgaagaaggcaacgttagcctaaaacaagaatgggaagcatacttggctccatatgaaagtggcttagcgacatttactcctaaatgggaagcttttaacccattaggtggcgatataaatgttctaaaagctcaactgatgaacgacctgcctactgaaaacaatgacattttaacaaggatctga

SEQ ID NO: 74615 - DNA, 1791 bp, Vibrio parahaemolyticus; identical to SEQ ID NO: 74603

SEQ ID NO: 74616 - DNA, 1992 bp, Vibrio parahaemolyticus; identical to SEQ ID NO: 72330

SEQ ID NO: 74617 - DNA, 1752 bp, Vibrio parahaemolyticus; identical to SEQ ID NO: 72331

SEQ ID NO: 74618 - DNA, 2316 bp, Klebsiella pneumoniae BIDMC 33B; identical to SEQ ID NO: 73440

SEQ ID NO: 74619 - DNA, 1878 bp, Klebsiella pneumoniae BIDMC 33B; identical to SEQ ID NO: 73441

SEQ ID NO: 74620 - DNA, 2187 bp, Staphylococcus aureus
atgtttatatctactcttcaaattcgaaattttagaaattatgaatccgaaatctttcgattcgataatgagacaaatactattataggtgagaatgattcagggaaaaccaatgctcttactgcattgagaatcttattagatgatagttattactatagtagtaaaacactgaaagaatcagatttttttcatggaattcaaaatgggtggcaagggcattggattattatctctgcgacatttgaaggaatcagcgaagaagaatttgacaatgagatttgtgcttccatttctttaaattctgaaagtcaaacaatcttagaagaattgatttcaaatgcagataaaggtgtaggtagtatttctctatttattagacctaacaaagctattagaaagcaattatttgatatttccactgaattagactctcatcaatttaacgaatttagaaattctattcgtctatccgactatgaattttactacacatctaaatcaaatctaaatttctgtatcaatgaaaattatgataaattggtaggaagactcaatgacaatatagctagtaatcctgaagaagacgatgaagctctgttgggctcaagaattgacatgtcagatattttcaagcatatttcggttgtttatgttgacgctcttcgagatgttcttagagaaatgaaaaacaatcgaaacccagtcaaaagaatcatggaaacaattgaatcaaaaatatcatcagataatgttgagtcattaaaaacaattatacagcaattaaatgagactattaccagtgttcctgaaattaggaaaattggcgaaaatattaatcggcaactaaatagcataattggttcagtgtattctcctaatcttctttcctcaactatgtcagatgatatgggttctttagcaaaatttctttcaatgaagccagaacaaaatatcgacttagacttactagggttaggacatctaaatatgatttatttagctttgaaaatagtcgaatttgaagcgtgtcgttcaagagaactacttaatattatgttgattgaagaaccagaagctcatattcatcatcatattcaaaaaactctgttcgaaggattaaatcttcaaaaaaactatactcagattctcatgaccacacattctgtacatttagctgaagtgtctgaaatatctcggatgaatgtattaaaatcgtttaatggcaaatctatcgttatgaatccagcaaataatctgaactcatttgctaaagaaaagttaaaaaagaacaatctaaatctaataaacgcagtagagagatatttagatgttaaaagaaatggattgcttttttctaaaggtgttatcttagttgaaggagatgctgaagaaatacttattcctcaaatagtaaaaaaattatttggtataaacttagacgaacttggaataggtttgattaatgttggtagtacttcgtttgaatatatcgctagcttgtttgacgatgatagaatacagagaaagtgtgctattgtaactgatttagatgaacaggcaatcccatcagaacatcgattgtataaaagcactgcacaagagaaaggtcaagcaagaaaagaaaaattatcctccctttttaatgaaaacaattgggttaattgtttttatgctaatacaacatttgaaattgagtttttagatgtgaataaagaaaatattctaacttatgtcagtccaattatagatgacgcattcaaagataaaaaaacaataactgcttataaagaagaaatacaaagtgaacaatatttagaaagaaatttagcgatgttaaaactagccaatcatgttggtaaggggtggtttgcaattgagttaggtgaaaaaattgactttttaatcaaaattcctaagtatattcttaatgctattgcttttgcatgtcaggaaatagtagatctctcaatttataaaaaaattctactccatacaatcgacttgtacgaggaaactacagaattgtcagctttatcagctagtttaaaaacaagtgatacagctgatttgaatatagcaataatttctttattagagtactttggtaaagatgaggatgttgtgtatctaatcaatcagatagaaaattacacaaaaatactttatgctgaggtttcaaaatga

SEQ ID NO: 74621 - DNA, 1794 bp, Staphylococcus aureus; identical to SEQ ID NO: 71697

SEQ ID NO: 74622 - DNA, 2016 bp, Endozoicomonas elysicola
atgcacatacgcaagatacgaatacagaatttcaggttacttaaagacaccacactagatctggaagatgagtcaaataacgagctatcccttttgatagggaagaataattctggcaagacatctttcatcgtactgtttgaaaagtttctgaaatcaaggaagttttactacgatgacttcccattgagcctgcgtgaagacatccataatcttagtgaaaagacagatgagtattcgatagcaataagactatcccttagtattaagtatggcgaagaagataatctacagaacctttctgaattcattgtagatcttgatccgaaatgcaacacggcacgaatttcctttgaagcaacgatcaacaaatcaaaactgctaaaggatcttgatgttgttgccaaaaaaaaagatgagttcatcaaaaagaacctttctgattacattcaagttagatactacatctttaatgagtacagtgattttgagccgaaacatcgctcgaacctaatccaaaaagatgtatctgatgttaatagcctaatcaacttgaagataattcaagcaaatagaaatgtaacgagttcggatgcaaagcctcaagagcgaaagatactttcacacttaacgacacagttctacaacagtaaagtcaatatttctcatgatgagctagacgggatcaattcatcaatcattgaagcagacagccaacttagcagtaattacaaaatcttttttgagcctttcctgaagaatgcaaagtcctttcttggccttaccgaactaaacgttgtatccgaccttcagtccaaggaggttatggcaaaccattctaagatcacctatgggaaagatagcaccgaactacctgaacatctaaatggtttgggatacatgaacatactctatcttcttctaaacatagagattgagaaggctgattttaaagagactgggcgggatataaaccttctgtttattgaagagcctgaagctcacacccatccacaattacagtatgtctttattgaccaaatcacaaaaacattaaaagggattaaggggcttcaagctttcatttcaactcattctgctcatatcgtcaagaaatgcaatttcagggatattcgttactttcgcatcaaaaaggacgaagccaatacagatatacgaaatttctatatagagctacaatcaaggtatgctgatgtaaagaatgttgatatcgacaaggtagagaaggagaatttcaagtttctcaaccaatatttaacaattgagtcatcagaactattctttgcagaaaagataatctttatagaaggtacttctgaaaaaatgctccttccatactttatcaataaatttgatcaagatggcatgggtgataaggatgaagttgcacttacttctcaaaacatatcaattctagaggtgggagcaaacgcaaaagcattcaaacattttctcgactttcttgaaattaagacactcatcattacagatctagacactacagagaagaagatcaaaaagggagataacggtaaggatagcattagttacacagcatgccctgcaaaggttggcacacatactagcaatgctaccctacggcattactataactcaccgaagtttgaagaggtgggcttttctgcatggatggaaaagctaaaagagcaaagccatgatgatccatctccattgatcaagattgcctatcaggatgttgaagacggataccagggtagaagctttgaagaagcattcgttagtgcgaatatggacgacataggcaataaccttgaagatgtcgacggacttaaaaataagagcaagtttgatgagtgcaagtctgaccctgataagtttgttgatgtaatgcttgatagtaaggggaagtctagctttgcctcatctttactctatctcgccctttcaaaagaaaacctgaagtggaatatcccttcgtatattaaggaggggttaaagtggatagccaagtaa

SEQ ID NO: 74623 - DNA, 1683 bp, Endozoicomonas elysicola
gtggatagccaagtaaccccactggaaagaatccaggaatgcacagcaaacaagaaaagttttgttttacagggaggggcaggctgtgggaagacagaaacactaaaacaaacattacaactcttatccaaagattattctaagaagagaattgcgtgtattacccataccaatcttgcggttaacgaaatcatcgatcgtgtaggagaaggttacaacatatccaccatacactcttttcttggctcactaatcgagaactacacaaaatcaatccacgaagttatacatgagatatatgcagtagataaggtagaatttgagactgaggagagttcgggattatctggcaatgagcttaagaaagctaatcatgaaaactacaagaagccttacaagaagtatgcaaagttaaaatacattgccaaaggtcagccctccggaaaagagcttggtaagagagagtatgacaaggcaccggatgatatcagtcaggaactgaataaaaatatcgatgaattgaatgttgaagttcgacagatgattcaacgcaaggatcataggagtattaagtacaataattcacgatttgataacctcagtgatctttcatttggacatgatagcctactcagggtcacaagtttgctctttcaacgctatccaaggcttggaaagatcctatgtgataagtacgacttcatcctggttgacgaataccaagacacacatgaggatgtggttaatgtgttcttaaagcatctccctaaagataggcagacaacaataggattatttggggatgctatgcaaagcatatactcagatggtataggggatgtgcgtgcctttattgactcaggtgatcttgtcgagatactaaaggaagataactttcgatgttcagaacaagtaattaactttgtgaatattcttagggaggatgctcttagccaagaacttgcattcaagattaaagatgatggcaccaaagaggccttcaaagataggcaaggtcaggttaggttgctttatgcagtctggggcgataacaaacctcatactaggagtcgtcctgaagagaagcatgcataccttgatttcgttgataagttaattgaatcggctgacggtgaagaatcccctcataagaagttgatgcttacaaacaagtcaattgcaggaaaggttggattttcctcactctataaggtgttttctgatagatatacggaagtcaaagacgagctcgaaagggtactttcaagcattcaggtacttgatctagctgaattatgtgatgcctatagtgggtcaaaaaagaggtacaacttcatactaaccgaactaaagaagtcagggtttgtgcttaacaaacttgaggacaaagaaaagattgtcgctgcatttgagaagatcgctacgggtgatctaagcattgctaaaactcttgaggttgcttttgaggaaaagctgattagcaagccggacagttaccttgcatatattgggcgtaaggattctttcttagctgagttgcaaaaagacagggcttaccagaagttcaaagagagattcaattcaggaagcaataccataactaagatggcaaaagaagaccctgaactgactgaagaagtattcaatgaattcaaatccagtcttgataaagagagattctaa

SEQ ID NO: 74624 - DNA, 1785 bp, Escherichia coli 2-316-03_S1_C2; identical to SEQ ID NO: 73688

SEQ ID NO: 74625 - DNA, 1818 bp, Escherichia coli 2-316-03_S1_C2; identical to SEQ ID NO: 73689

SEQ ID NO: 74626 - DNA, 1785 bp, Escherichia coli 2-316-03_S1_C1; identical to SEQ ID NO: 73688

SEQ ID NO: 74627 - DNA, 1788 bp, Escherichia coli 2-316-03_S1_C1
ttggctcaggctgccgagctggccgggaatccgggccagttagccgcgtatgaatcccgtgggcattgcgtggtactcgccgggccaggtagtggtaagaccaagacgctcgtgctgaagctggcccgaatcctggccgaggatgttcaggctccacgtggcgcggcatgtatcacatatagccaagaatgtgctcgcgagctgacccgtcgtctcgaagcgctggggctcagagaagcaccgaatctctttatcggaaccgtccatgggttctgtttgcgccatctgttgatgccctatggacgactggccgatttgccaatcccatttccgctttcagtagcttctcagcgtgctagcgagcggttacttcgacaatctggtgaccgtctctttggcccaaaccatccctataaggctattgatctcggacgacatcgccgttcggtgctgaaccgcaacagtgttgcctggcgtgcagaggaggaactcgctgcctgggccgaggcctacgaagcggcattgcggcaggaagggctaatcgactacgacgatatggtggtattcggccagcgtctgatcgtcgagcatgactgggttctacccttggtacaggcgaaatttccgatccttgcggttgatgaatatcaggatttgggcgttgcgctccaccgtatagtcaaacgcctggctttcgagggtggcgtacgcttatttgctgtgggtgatgcagaccaatcgatctacggtttcactggtgccgatggtgcgttactcatggaactggcaagcaggagagacgttgaaacagtcaggcttcagttgaactatagatcaggaacgggcatcgtcaatgcatctgagatggtattgggtgaggttcgtggttatcgcgcaagcgacccgaaccgccagacaaccattgcgttccagctgtgtccggatggtctggaggatcaggctgtccatgctgtcgcgcagattattccaactgcgttagctgctaagccgggtcgaacgctgggtgacatcgccattctgtacaaggactaccgtgccggtgatgtggtggccgatgcggtgaccgctggcggttttgattacattcgtgtggacaccgcagcaccttatcgcaaggttgccttgacgagctgggtggaggattgcgcggcatggtgtgctggtggttggcgtattgggcgccctcaactgcgtggattgatagaccgttatctggcatttcatcgggcgagactggatgatgcatgcgcccggcgcaagggacaggagttaactaggctgctttgggcacttcgcaccgaccagcaacctgcgtgcgattttgtcgtgtcgttgcgcaacggactcgttgattccctgctggctactgaaccggcactttctgatcaggctgagcaactggaacacatgactgcagcacttgccgaaggcggtgcgttggcgctgctggacataacgagcctaggtggtcgtgacggctcacctgaacacctcaatttgctgacgcttcactcagccaaaggttgcgaatatgacgtggtcatcatggtcggtttggatctggggaatttgccgtggcgtaatgaggcgccagagaagctgcgcgaaagccgtcgtcttttctatgtggggctgacccgcgcacgggatgaggtgcatatgctgtattccggttttgttgatggtcgctacggccctatgcgtctagggcgttccccatttctggatgaactggaggcgcgaatgcgaggggccggtttatggtag

SEQ ID NO: 74628 - DNA, 2079 bp, Lysinibacillus sphaericus
atgtatcttaaaacaatcaaactctataattttagaaaattcggagctaaagaaggtggaagtccagggttaactctacatttaaatccatcttttaatattttggtaggagagaatgatgctggtaaaacagcaattgtagatgcaatccgttatttattgggaagtgttagtgatgaatatgagaaaattaaaccagatgatttttttagttatgaaaaagatagttacagtgaagagttttgtattgaaggatttttttcaggtataagtgaaaaagaagctggattgtttttagaatggttatcttttgatgaagatggggaatacagcttaagagtagctttgaaagtggaaaaacgaaaaaatgataatggaaatgaatatattgatagaaagttagttgctggtgaggaaagttttgagcatagattagatagtgctgcaagagaagttctaaaaactacatatttgaagcctttaagagatgcaaatgctgaactcaaacctggtgtaaaatcaagactggtgaacatattaaaagcccatccaacttttaaagaagataataatggagatcacgaattagtatcagtaatgaaaaaagctaatgaagagattgtaaattattttgaaacagaatatgtatctggacactcaatactacaagatgtagagaatcttttagaggatttttatgataatgcagatctgagtaaatctaaagcgaaatttagtgttactaaaacagatttgaattcaattttaagaaagttaagtctagatacggaagacataaacctaggcttaggaaatcaaaatttactttttattgctactgaattactccttttgaataattaccttacaggtagtgaggtaattggcccaaatattacattaatagaggaagtagaggcacatttacatacccaagcacaaattagattaattaaatttttagaaaatgagttagaagataaaaaaaatgcaagtcaatttattttaacttcacatagtccaaacttagttgcttcaattaatccatctagtattattttattacatgataattgtgcttatcctttaaaagaggaatatacaatgttaaatgaattagattataagtttttggaaaggtttttagattctacaaaaagtaatctattttttgctaaggggattatattggtcgaaggggactcagagatgcttcttcttcctgcattagctgaattattggattatccgttgtttaaatacggtatatcgttggtgaatgtaagaggaacttcatttgaaagatatgttaagttattttcccgatctaaattgtggagagaggaatataaactgcctattcttaaattacctatttctattataacagatgttgatgttaaacccattgtctattttgatgaagaaagtgaagacaagtttaggtatgttttaaatgaaggagaagtagatgaaatactgcaacatatagataaaagcaaagataagctgaatttaagttatattgataaagaatattcaactttaagaaaattagctaaagattttaaatttaaagttacaaacgaaaatgaaagtgaactaaataggataattaagaaaactataaacgaaggctatataaagaatgaaaatctactaaaacaagcatctataaataatagatacagcactaattatgactgtaatctgaaggttaatattgcaccagaatggactttagaatattgtctatccctcagttgtttagccgaatatttatataaaagtatataccaattacaaaataatgttgtagattttgaaaatgaacagaatgaagatttcacctcaatgctagcgaaaattagagatccaaaaagagaaattgagaaagtagcatataacatctttaaaccattaaatgataaaacaatatcaaaggcagaaactgctcagactttagcaacaatgattaaatctttagagttacaagaaagagaaaatctgaaaaacttagttttagaagataaaaaattgaaatacttggtgaatgctattgaacatgtcataaaataa

SEQ ID NO: 74629 - DNA, 1830 bp, Lysinibacillus sphaericus
gtgagtctagaaacattaaaggaaatagaaaaaaagcttttgccttcgaatgctgagttctttgatcaacaaagagaggtaatattaaataacaattcattaaatattgtagctgggccaggctcaggtaaaacaacagtattgatagctaaatgtgcgttattattaaaaaagaatgaaggtggaaaaaaaggtatttgtttaataacacatactaatgtagctgttgaagaaatgaagataggattagaaaggtcaggatataaaaatatcgagtttcctaactttatagggactattcaagagttttttaatactttctttgtaaaaaaagcattacatttacttataggaaataaacctttccgggtattagataaagacgattaccaagagaaatttgttgagagtttcaatcctgtgaaaccttattggtatactggaaatcctcctaacttttctaaaagtaatacagagtttctttttaaagatgataatacctttgaaataataaatgatagcataagtcatagatatagaagtgaattcaaacaggcagttaaacaggtatttcaaagtggtattctgacaaattctcaatgtttggatgtaagccagtggtatttaacgaagtataaagagaagttaagggcggcaatggctaacagatttgattttgtacttttagatgaggcacaggactcaaatgaaatgcagtatagtcttttaaaacaattattcgataataacgtaaattttcaaagatttggtgatccttatcaagctttatataatattttcaatgaagatgaggatgtatggaaacctacagaagagatatctaaagtaaatagagcagatatatctaaaagttctagatttggaactagtatagcgaatatagtaaaaaacctatctatagaaaaatatgatacttttgagtctcaaaaattggtagaatcatttgcaccgtattttttggtttataagaatgaagagggtttattaacagcctatagagagttaattagagaattaagtaatgaagaagttttgttttcacattcaactaaaaaagacgcaatagtagctgtaacacataaaaacctaacgagcacttttaaatcatatattaaaccaaaatcaacaattaaaaatactgggtccccagttcagcaatcttacaaattcttagtggatcttgtagctaaagagttagacatgtcttttaaagaaactaaaaaaataatagatgagaatctgaattttaaaattaaatttagtaaaatagttacattgttattaagtgatgaattgaaagatatctctgtaatttccacttatgtttcaactgttttacgagatatcacacaagctgatgaacaaaaatttgaaagtgaaaatttggcgcagaaaatacaagtatttagagagtcaattaaagttaataaagaacagaaagaatttaaagaaaaagatttttatattggtacaatacattcgactaaaggagaaacacatcgatctactctattaatattaaattattcttttgaaaaagagggtcaatcccatcaaatgatggatttattgagagggtatttaaccggtaagtatgtggaattaaatcaaatacaagatacagtcatacaaagtagttcggctaaagcattaaaactagcttacgtcgcgctaagtagaccaacacatttagctgctatagcaattcctgaagaatttattcaagataaagcattcttagcagagttaaaagaatttggttggaaagagtttacgtgtaaagaagtagctagtagaggggatagctga

SEQ ID NO: 74630 - DNA, 1698 bp, Shewanella xiamenensis
atgtatatcaaaaaggtaacgattaacaactatcgtagcttccgcaatttcgaagctaaacttcaacaactgacagttgttattggtgaaaacgatactggtaagacgaactttttcaccgcactttcgttaccgttaagcggcaaccaaatagatttcaaccagaagcgtttgagtgtttctgacattaacaaagatgccgttattgattttctaacgtctgtagtaaatgacgaaactgaaaaaaatcagcttaataagatccctaaagtatcagtaactgtggagttcgctgatccgaaagatgcttatgaaacagcactgttggctaaatggattgttgctgatggagataaagaaacttacaaaatcagatatgactttaagcctaaagatgacaaagacttgcttgaagtcgtgaagaaatcgctcactggtaagactttagatgatattaactggtttactctacccgttgagctatacgactaccaaatcgtatctgtgaataacgaaaagcctatcgcatacagtgacttaaaacacgtcagtgtccatagtatcaatgccgagcgagatgacttctcagaaagcagttcaatgaagtccaatagcattttcaccaagctgcttatgaacactctcaacgatgacgacaaaggtaagatcaatacagcctactcagagttctttagtgctattgaaaagactgaaacattcgaaaaagtcattggaactaatgacgattttgagaattacgacagtattatcaaacaacttgaatgcactcctaacctacccaacttaaaaaacatcttatcgaacatcactttgaaatacggtaatgaatttctgtaccaaaaaggcttaggacaaagaaaccttatctacatactcatcctatttgcttactacaaatcatgtggtgatacattcaacctgtgctgtatagaagaaccagaagcacacttgagcgttaacaaccttcgtttggtaagagacttcatcgagaaaagctcaagcaacagtggttcgcttgtacaaactatcatttctacccataacccatcgatcatcaacaagctgaagatcactaacgtcttggcatttactggcgagaaagcaattagcctgtccgatactccaactaagctagttgactacctaagaaagagaccgaattttgacattctgaagctgctgttcgcaaacaaagtaattctcgtagagggtccgacggaagaaatgctgatcagcacttatttgtccaaacaatcagccctcaacgacattgatattattccaattggtcaacgtggttacgctacttttttagatatatggctcgccttgaacaaaaataaccagaacaagaaaattggtgttgtccgcgattatgacaattcagaggaagctaaagagagacacaatgcttatgacactgcgcacgcgaatgtcactgtaagaacaacaaagcactacacacttgaaattgatttagtagaagcaaaagacaacctagctttgctaaatggtttattcgaaatggatggcaacctcgacgaagtgtccggtcacatgattaaaggtaaaacagcaagaatgcttgatgtctgcgatgcgatgattgatgaagagaatccattggatatccaattgccggctcacatcgctgaggtcatcgaggctttgtcatga

SEQ ID NO: 74631 - DNA, 1377 bp, Shewanella xiamenensis
atgatagaagtacagattgctggtgctggtgctgggaaaacttatggcttagcaaagactttgatagaacacatcaaagcgtgtactagtcacaaaaagacatttgcattgacatacacaaactcagcaacagcgaagatagagcaagagataatcaaacaaaatggctttattccgtcgaacctctgtatacagacagtacatagcttcttgttgaacgaaatcatctacccattctcgtcattcactctcggcgatgtctataacgatgcatcaatcatgatattgccgagtgattttaagttaaaaaattggcacttaaagcgattaaaagagaaaaacatcattcatgccgagagcgtttacaacatcgccaaacaggttgttgatgaaaccatcagcaagcacgacaacaaggcaaagaaagcaaaagtccgcagactattagctattctagagagttgctttgacaagatattcatcgacgaagtccaagacttagatgacgatgctctccgctttttcgaagtactaggcagcaacgatattgacatatacatgattggagatccaaaacaagcaatcaagtatccacaagcacttgatactttcgttaaaaaagtaactccaaaagaatacgcaaatatcttaccaatcaacaatcaaacaagacgagtacccacggagatcttagctatatcaaacagcttctgttatgaagaccagcaacaagaatcactatcagaagtagtcggtgaactcatgtacatagaatcggtggatagacgatatgacgagctactaacgaattacatagatgcaaaacaacttgtttgtatcgacaaaaagaatggtcgttatacaacttcgtctacacacaaacacgcattcccacgagagatcgaggaaatgattcgtgagtctaaccacaagaaagacaaaactttgtttgttaaagccgccttttctgactttatggacgatgcaatcaatgaagataataagcgagccataagcaaactcattactcggcattcattaactcttaataaacagcacttcgcccaattacatgagctgtgcaattcttgcacaaaaaatggcgttcaattcaaagtccaaagtatcgactctatcaagggattagatgccgaaacgtgtgtaatcatacttagctctaacacactgaaatacttaacccaaaatggtattagcaaagagaaacaatttaataaggaatggaaacgagtctatgtagctcttactcgtgccaagaagaggttggtcttagcattagatcacgagttactagctaaagaagacatggcggcagttagggattcgataggtgaattggggtttgtcagccatgattaa

SEQ ID NO: 74632 - DNA, 1926 bp, Escherichia coli 5-172-05_S1_C1
atgaagcttgaggcaattcgattatctggtttccagtcttttggcaaagtaccaaccgaattgagcctagaagatgttacttatctcattggtcctaatggatcaggtaaaacagcagcacttcaggctttatgtcgactttttgcgtttgatccagcgttgcggcgtgtccaacgatcagatttccatgtcccttttgatgaaggtgaagttccttcagagagacagttatggattgaagctgacttcctgtttcacgagcttgcagaggatgaggataacagtaccgtggctcctcattttggtcatatgcgacttgatgagccagaaggtattccacgtgtacgttttcgcctcactgcaactatgggaatggatggggatattgaagaaaacttagtatatgttttggatgtcaatgctgatagttcacctcaaaccacagctaaagtaacacgagcagagcgtaatattatccaaattcattatttgccagccagacgagatcctgcagaccatattgcttacggtgcgaacgcattactcggacgtttgcttcgcgctgtacgttgggatgatgaacgtaatgcgattaggggattaaccaaccagataagcgaaagcctagcagctaacccctccatcaatgctttcagtgaaagtttgaaattaacctgggcaaccctacataaaggcaaatttttctctgaccctaaaattacatttgtggcttcggagattgaagcgttgctacgccatttatcggtttcatttactcccagccatgatggctcgcttgtcgatttctctcggttgagtgatggtcaaaaatcgatgctttatctttcgctggttctatcatctcaagcgatcggtagagctgtgctcgcagaggaagatgttacatttgatcccgacaaattgcgccctccgatttttactctggtcgcagtggaagaaccggagaatagcctttctccccattacttgggacgtatcgtcagtgccttgaataccatggcaaagaatattgatgcgcaagccttaattgctactcatgcaccatcaatgttgcgaagagttgatcctaggtttatacgatacctacggcttacagaggaaagaaaaacacggattacgtgtatcaaattgccacctaaagcagatgaagcacataaatttgtgagagaggctgtacaagcattcccagagatctacttctcacgcttggttgtgcttggcgaaggagatagtgaagaaatcgtactgccgcgtttgctccaagttaaaggtactcctgttgatgaatcagccatcacggtagcaccgttaggtggtaggcatgtaaatcatttctggcgattgctttccgcactacagattccctatctgactttgcttgatctggatgtagctcggtatggtgcaggatgggggcgaattaaatatgttaacgatcagcttgctgcatttgagccggagaaaatacttcctacagaatggaaaattacaagatggaatgatgaagctacaccagtaagaactcaccatttttttaataaaggcactcaggacatttttgaagaacttgaaaacagatctgtgtttttttcctttcccatggatttagacttttccatgctgctagcttatcccgaagcttatggagttgaagaagaggagccggacgaatcaacaataaaagcagtgcttggcaaaagctataacgatgtttctcaatatagtgtagatgaacagagtttgttcgttacttaccatcaacgttttaaattaggtagtaagccagccgcacacattgatgctttagcgaaactaagcgacaaagaattaattgcgaagatgccagagtcactgaatagactagttgatgccgttattgccaaacttggagaattacctgaatga

SEQ ID NO: 74633 - DNA, 1677 bp, Escherichia coli 5-172-05_S1_C1
atgattcctattgaagtatggcaccccgccgatggattaacgctggaaccaaatgcaaaacgagcagcaaaagcccgtaaacgttgtttggctcttaccgcgggtcctggcgctggtaaaactgaaatgcttgcacagcgggcagatttcctattgcggacaggtacatgtcggtatccgaagcgaattctagctatctccttcaaggttgatgcaagtagaaatttaaaagagcgcgtcgaacggcgctgtggtgcagaccttgcctcccgtttcgacagttatactttccatgcatttgccaagcgaataatcgatcgctttagaccagtgctgaaaggaagagatgcattggattccggttatacgatcgttgacaagaaaatcggtatatctagcacccaaatagagtttagtgatcttgtcccattggctatcaagatattgcaaaactcaagaattgcccgtaatgcaattcgtcaggcttacagcgatatttttcttgatgagtttcaggattgtacaaatttgcagtatgaattagttaagcttgcttttctagggactaaaatccgcctcactgctgtaggtgacactaagcaaaaaatcatgggttgggcgggagcgatggatgggatttttcaaacatttactaatgattttaatgcagtgccactaaacatgtaccgaaatttccgctcaaaaccgcaattactgcgagttcagaacgaaataattcgggagcttgatccgacctctgtcatgccagatgaacaactgaatggtgacgaaggtgagatttatgtcgaaagtttcggaaacagccaagaagaagccatttatttggcggatattattaataactggatcaataaagaacaattgccgccagcagaaattgctgtcttagtttctaaacagttagatctctatgctgaccatctaatgatggagctggaattacgtggcattccatatcgaaatgagcagcaaatgcaggatattactgtcgagccagctgcacgtttaatcgtagattatctttcatgcctctatggaaagcgtgaacctaaggcttggatccgtttggtgaatcagttgattccttttgccgatgaagaagtacagtccagtgtgcgaaaggaccttgatcgtttgttaaaaaaacagcgcaaagaagcagctagtgctgaacagcttgattcatctttttcttgttggtggaagtttgtgaaggcgtttttaaagcatattggctctgatacgatcgtagccctatcacctgattacgaatcccacaaacgcctacaggaagtttttcgtgataccaaagcacggattgaagagttgcttaaaattgaatcagatttgccgcgagcgcttgggcggtttacggatgaccaagcagtccggattctgaccattcacaaaagcaaaggactagagttcgattctgtaattataatggcggttgaaaacgagattttctttggtaaccaagatgagaatcgatgtgcatttttcgttggtatttcacgtgcgaaaagacgattgattttaactcatgcagacgagcgacaacgtcctgctaacgccaaacgttgggatgttcacagaaccgctcaatctgagtattttagttacgttacgccgtttataacagcagcaataaagtga

SEQ ID NO: 74634 - DNA, 2316 bp, Klebsiella oxytoca KONIH1
atgcatttgagaaagctgtcagtccgtaattttagaaggctgcacgatgttgttatcgatcttgcgtcagacatttcaattttcgtaggggcgaataacagtggtaagacttctgtcggtcatgcacttcaactatttaccggtaaaagccgattcaatattcatgacttcaatgctgaatgttggactgacattgtcacatttggagaaggggcagatgctgcgtcgctaccttcactggaacttgatatttggtttgaagtaacaccgaatgatgttcatcgtgtagtcgatcttctccccagcctatcgtggtcaggttctctggttggaatgcgcgttgctttttcccccatcaatcctgaagaaatccgttcgcgcttcctcgcagtacgtcagcttgctatcgatgccacacctaaagatgaaaatggaattctcaaatacgatccttcacctcgtaacctttgggaatatcttcgcgatagactcaatgacgaatatgaactccgctattttgttcttgatcccgcacgtttcaatgcggaaatgatatccgaggaaggctatgaacctactccgctcacagggcgtgatcgaagtggtcgcgaaatactgaacagccttatccaaatcaattttttgaatgctcagcgtcatctttcagatggttccggaggttcccgttcggaggatctttctcgtgttctcagccgtttttacggacgaaatcttgaacaaaaaggtgaagattacgaagcattaattgctttagctgcgtctgaatcagctttcaatcagcatcttgaacgtgtttttgcacctacgctgaaaagtctggcgaaactcggataccctggactttcaaacccacgcatgatgattcgttcggccttagacccagcgcagatcatgaacaaccaaaatggggccgtaatacattacgcgctgggggaggatgacggtaatcctaccccgccaacactacccgatagttataacgggcttggttttaagaatctgatctttatggttgttgaattactcgacatccacaaccaatggttatcaatagaagagaatcgaccaccagttcacctgatttttattgaagagccagaagctcatctccacgcacagttacagcaggctttaatacgcaagataatggaccttcttgccatggagagccaggagcttatgcactacaccactcaagtggtggttacttctcattcaactcatattctttacgaacgtggttttcggccgatccgttactttcggcggaagcgttcatcaaatatgtcggcaacagatgtgctcaatctctctgttttttatgataatactgatcctgaaattcgagactttcttgagcgttacttgaagctgacccattgtgatttgttttttgccgacggggctgtacttgtagaaggcaatgttgagcggctactgctcccgcaaatgattgctaccgccgcacctagattaaaatcctcttacctaacagtccttgagattggcggtgcttttggctatcgattccaaaaactaattgaatatcttgggattactacactcattattacagatctggatagtgtgtactgtacccctccggtacaagatgcaacagaagctcgagcagatgagttagatggtcttgcagaaaatccggctgcaaatgatgatggcgaggaacctgatgatgaggaggaagaacaggccaacacagaaacaccaggaaaggcttgtattgccagtcatcctggagctatgacctctaatcaaacacttcggcagtggttaccgaaatgtgacaccgttgccgctttatgggaagcaactgaggaaatgaaaatacaaagccgcacagctgagtgtgacgctttggttcgtgttgcttaccagtgccagacaaatgttacatggaaagaggaaacactggcacttgctggtcgtactttagaggaagcttttgcacttgaaaatctgtcctggtgtcaagatgtgggctgtaagccactcaagctacgtattgccagagctgtaagtatggatctactgcaattggtccagcgcattcacaagcgcgtgcaatcaaaaagcttcagtaaaactgattttgctctgaatttacttcttaaaaaaccggatgaatggtctgtcccaacatacattgctgaaggattaaaatggctcgaagctgaaatagccccgccggaactagaagttgcagaaggtcaggaagaggatgttgaggatatgtccgtcgctttggctgaaacagatggtgggagggttgcatga

SEQ ID NO: 74635 - DNA, 1878 bp, Klebsiella oxytoca KONIH1
atgaccagtcgcattggtagccctgatacacaggcagatattgatgttcgtgcttgtctggatagctcgccaccacgttcatttgtcatggtagctggtgctggttcaggtaaaacaacatctctcattaaagccttggcacatttggctgatacccgtggttctgctttacgtcgtgccgggcaaaaaatatcctgtatcacgtatacagaggtagctgttggtgagattgccgctgacgttggtaactcgcagttatttcatatttcaaccattcatagctttctttggtcggtcatccgaccttttcatgtagatatcgcaaagtgggtcgtagcgcgaatacatgaaaaaatagctgaaaagcaagcccattatgataagcccagaacacaagctaaaacaaaatctcgtcttgaagatgaaattgcctatctctctgctcaacttgagtgcattgatgatgttgataaatttatctacgggacaggaagtaactatgctaagggtattctagggcacgatgatattcttaaactcgtccctgcttgtgttgaggctcatccacttttgagaaggattgtagccaagcgctttccatttgtttttgtcgatgaaagtcaggataccgatcctgatgtgatctctgcgcttcgaactattgctaatgacaatcctgacatgtgcataggattttttggtgatccgatgcagaaaatctatatgagcggagctggtgctattccgttaagtgatgggtgggctgaaattacaaaaccagagaatttcagatgtccgacgtctgtacttggtgttatcaattcgattcgagcttctggggatggcctccaacaaattcgtggccgaacaactatcgtggatggtgttgaacagactgtattaggcacagtgaatcttttcatcttgccttcaaatgtggaacgaagtgcctatctcacatctgtcagacgttaccttgcaaatgaaactagcgatgaacaatggctaagtgatacacgcgaaggtgatgttcgtctgcttgttttggtacatcgtatggcagctaatcgactgggattccctaatttattttctgcccttactgataaagcaccgatgagcttgagtgaaggggtgaacgatgggtcagcttggccgcttcgcccatttgtccagcatatccttccaatttttgcggcggctcaggcaaacgatcaatttcagattatgtcgattatgcgtaacgagtgcccaaagctggagccatcacgactgcatggtcaagctatggtggcagttttaaatgaactacaacaaggcatcaatagcctgcttgcactgctggaagaaggatcgcaagcaacagttcgggatatattgctacacgttagagactgtgaactgctacgtcttgacgatcgctttgataaccacttaagtgatgaacctgtgaatgatggtaatgatgacttcggaaatgttcagaattatctaagatgcaatgcctatgaactttgggcgtaccgacgctatctttcagaagaatcaccttttgccactcaccatggtgtaaaaggtgcacagtttgagcgcgtattggttgttatcgatgatgaagaggctcgcttcagccaatattcgtatgggaaatattttcaatacattcccctatccgacaatgatctagccaatcttgaagagggtaaagagtcagtactcgatcgtactcgtcgccttttttatgtatgttgctcccgtgcactgaaagatttggctgttgtcatctttgttcccgatgttgccgtcgctcaagcggcaatcgttgagcaaaatttatttccagcatcggtaattttaggggagcatgatctggcctag

SEQ ID NO: 74636 - DNA, 1986 bp, Burkholderia sp. K24
gtgcgtctcgaaagcatcattctttcgggctttcgttgcttcggcccggagcctacacaggtcaattttgcgcccacgataaccgcgatcgtggggccaaacgctgcaggaaaaacagcacttctgcaaggtctcatgaagctcttcggggtctcccgggcgcagcgaacggttcatcgatctgatttccatgttggacctggctcagatcccggcagccgtctcccccgcgaactcttcatcgatgtgttgattggtcttccggagctcgcggatggcaccgccatgccagagacggttgccccttcatttcgccatatgcgcctgagccgggcgggggaggtgcccatttgccgggtgcgactggaagcgcgttgggaggatgacgggacggtcgagggcgaggtgtcgcaggagatgttctgggtcgataccttggattcacttccgaccgatgagcaaaagcacgttgttgctgccgctgatcgagggctcatccagctctactacacaccggccagtcgcgacgccggaacacaggtcagagcaacgaccggtgcgctagcggctcgacttctccgggcgattgaatggtcggtggacacacaggaggcgatcggcgaagcaagcgtgagcttgtccgaagcattcgagagcgaagactctgttgctgccattggcaaagcgctgggaaggcgatggtcggaactgcatgacgaggtggtgaataccaagccaagactcagcctggtgagtcgtcggtttgaggagatcgtcaaccggatcgcggtgatttttgagcagggggcggacggggaggagcgtggcctggagtcgctcagcgacgggcagcagtccttattctattttgcactggtggcggcggtttttgatcttgagcgcgatatcgtcgaagagaacgttgatggattccgcaacgacgatcttcgaattcctgcgttgacgatttttgcgctcgaggagcccgagaatcatctttctccatattttcttgcgcgcattatccagcaggttcaatcgcttacagaccggggcggcgcgcaagcaatcgtgaccagtcattctccggcggtgttaagtagggtggagccgcagcaagtgcggtattgccgcgttgatccaacatcgcgagcctccagcgtcaagcagatcgagatgcctgccgacagcgtcgaagcaaccaagtttgtacgcggcgctatcctggcgtaccccgaactgtacttcgcacgcttcgtgctgctggtggagggtgattcagagcggatagttttgccgcgcctggcggaagccatggatctcctgattgatccggcttttgttgcgatcgtgccattgggcggccggcacgtgcaatacttttggcggttactgagtaacctcggtattccatacgctactttgcttgacctcgacctcggccgcgaagggggagggtttggtcgagtaaagaccgtggtgcagcgacttatcgagatcggtatctcgaagaagaaactactggcgctggagaacggagggcgtgtgtccgatgaagagttagcggagatgcacacgtggcaaagtctcgacgatgtgaaacaactgcgtgcatggatcgatgacctgaagcagtacggcgtcttcttctcgattccgctcgatcttgacctggcaatgttgaaggcatttccggaggcatatagtgccaccatccctaagggtggcggtcctaaaatgactgtggaaaaggcggcagaggtagtgcttgggaccgcagggccagggctggcactgtatgtaaacaaccgcaaggcttacccagatctcctgcccgcctaccgctaccactttcttacccatagcaaacctgcatctcaccttgcggcgttggcaaatgtgaagacagaagcgctacgcgacggaatgccgaaagtactaggggaggtccttaggcacattgaatccaagttgcggcgagattga

SEQ ID NO: 74637 - DNA, 1902 bp, Burkholderia sp. K24
atgactttgcttgcacggcgcgtttctcgtgacgactggcgcccaattggggttaaggaactggagaagagcgcactcgatgttgttcgatcggaagatagtcgatcggtcatcgctggccctggagccggcaagaccgagcttctggctcaacgtgccgcatacctgcttcagacaggcctggctccatctccgcaacgaattctggctatcagctttaaacgggacgctgctgcgaaccttgctacgcgggtgcgtaagcgctgtcatcgaagtcatgcagaccggcttgactctcttacctttgacgcatttgccaagagtatcgttgatcgttttgggcaggcactgccagaacggtggcgcccgcggcccgattacgacattctgtcgaccaacgacaagctctatcgtggctttctggaacagattgcgtcgcctcctccggacatcggtacgcgagccgacctcaactctgtgtcacccaagacgttcgagcgcgtttatctgctaggttcgccattgcctgtggatggatggtcgagcctggttcctgcgcagtgggcggcagaccgattctggcaatcagcactccacgaaggaaaaaggacatatctgtcctttccaatgattggcaggctagctgaattgctgctgcggatcaatccgatggtacgtgacgcattgcggctgacctattcgcatcttttcatggacgagttccaggacacgactcagacccagtacgacctggttaagaccatcttcctgcattcgaattcgattatcacggcggtaggagacaacaagcagcagataatgcgctgggcattggcgatggatgatccgttcggggcgctcgaggctgacttcggagcgcgcagaacgtcacttctcaacaattatcgttcgtcgcctgatctcgtgcgtattcagcacgtccttgctcaagctctggacaagcgcgcagttgcaccggtgtcaaaaaccgaaggttcgatcgctggtgatagctgcgcgatctgggatttttcgacgccagcaaaagaagcgcaacgcctcgcggatttcgtcctttcggagatgacgacgtacaacttggcgccgagagactttgtattgctcgtacgtcagaaggccgatgattatgcagcagtaatcgagcctgcatttagagctgttggaatatcacttcgaaacgaggccggcctcattggaaaagtggcccttcaagaactattgacagaggatgcctcccgggtacttctatacgtcctgcggctcgctgcgatccagcgaggtgggagacactggagcacctgtctgcaggcattggcgactctccaccgtctgaggactgacgacgaggttgcccatgaccggctcgcgcgcaacctcgacgcgtttgcgaccgctctgttcaaggattacgcggctccgccatctgataaggccgcagttcgtgcactggtcgaccggattttcgggtttgtcggattggacaaaatcgtcgctgcttacccagcctatgcacagggagattggttggcaaaggttatcgagtccgcggcacaccatctttggaccagttgttcatcgacgagcgattggactggagcgctcgatgcctatgaaggtgtgcacgctgtcccacttatgacgattcacaaaagtaaggggctcgaataccacaccgttgtatttgtcggccttgacgacggagcatggtggagcttcacgggggatcaggtcgagggcacggcgggattcttcgtcgcttttacgcgtgcgaaacagcgcgtcgtcttcacgtactgcgcgcagcggggtgctaggtcgaagatcaaaaccttgtacgaattacttaaggcggcaggtgttaaagctgcccaggtcgagtaa

SEQ ID NO: 74638 - DNA, 1785 bp, Escherichia coli; identical to SEQ ID NO: 73688

SEQ ID NO: 74639 - DNA, 1818 bp, Escherichia coli; identical to SEQ ID NO: 73689

SEQ ID NO: 74640 - DNA, 2235 bp, Thioclava dalianensis
atgaagcttacacgcattgaagttttcaattttcgcaaattgcggcgcgcccgtctggatatgtcggacaagcagaccctgctcgtcggggccaacaacagcggcaagacatcggccatgaaggcgctgcgcaaattccttaaggatcgcggcggtatcgacacgcgtgatgtgacagcctcaaactgggccgcaattgaacagatcgcgggagcctggacacaggaggtcgaggtggatctcagcccgctcctggcccagcttccgttcattgacgtctggctccatgctgacacgtcagagctgcaccatgtcgcgcacctgatcccaacactgacctggactggtggcttgctgggcgtgcgcctacgcttggagccaaagaagggggcggacatcaaggcgcagtacctggccgcacgagaggccgctcagacgctgcaacccggcggcgcaacggccaaagggttcgcgctttggccacgtgactttcgagaatttctagacaagcgcctgagggacctattcgagcttaacgcccatcttctggatcccatgagcttcaccacgacagggccggttgagccgcatgccctgccggccttgtcggaggggatcggttcgaacccctttgctggactcatccacattcgtgagatcaacgcgcaacgcggtttcgcagacgcaggggacagtaatggcgacgacgatgaaccgacgaacgcaactagccgcaagattgccagccagattcagccctatttccgtaaacatatcgaccccgaaaaggaccccacgccgaacgacgtcaaagcgctcgaggcaatccatgatgccgaaaccacctttaatgcccggctcaaggatggtttcgctgatgctatcaaggaactggaaagtctcggctaccccggcgggctgaacaatccgaaactcttcatagccacgcagatcaaaccggttgacgggctcgatcacccggctgcggtgcaatacgatatctcgggcgacacttccggggtgaagttgcctgaaagctacaatggcctcggcttccagaacctgatctccatggtgtttcagctaatgcgtttccgggatgactggatgcaagtaggcaagttcaaatcgcagttagtgaccccagacgacaagggtatcgaacctctgcaactggtgctaatcgaggaaccggaggcgcatctgcatgttcaggtacagcaggtctttatggctagggcccacaaggtgctgcgcaaccataaagatctggagcaggagggctcggcctttaccactcagctggtcgtgagcacccattcgggccatattgcacacgccgccgcgtttgaggagctgcgttacttcaagcgcgagctgccaagtcacggagttgtgcccacggccagtgtggcgaatatgactgggctctttggtgcggacaatgaaacccatcgcttcgtgacgcgctatctgctgagcacacattttgatctattctttgccgacgccatcatcgtgatcgagggtgctgcggagcgaattctgctgccgcatctgatccaacatcactaccctgatttggctgcagcctatctatcctttttagagctggggggcagtcacgcgcataggctgcggcctctgatcgaggcgctggaggtgccgacgctgatcatcaccgatctcgacgcggtggcagcggtcgacaaaggcgggaaggtcgtcaaagaatcggtccagccttgctgcggggctgctcaaaccacagccaaccacgtgctaaagacctggctccccaagctggcagagatcgatgagctgttaggctctccccccacggctctgtgtcacacggcccctgaccgccccatcgccgtcagctatcaaaccccgcaaaaagtgacacttggttcggtgtccacgagcgtcacgcccagcaccttcgaggatgctctggtcctgactaacccgaaagccgtgacggacgccgcaggaacagagttctcctgcctcatgacccgtgcctttgccaaatccatcgctgaggctcaggcccctgaagacctcgccaaggcgctctttgaaaggttggcaaaaagaccggaaaaggccgccttcgcactggatcttctgtacatcaaagacatcaaagtgttgcgcgcgccgccctatatcaacaccggccttacctggctcgcgagccagctgaagggcgtggagggcgcggcgtga

SEQ ID NO: 74641 - DNA, 1974 bp, Thioclava dalianensis
gtgacagacgtgaccgacgctacccgcgacgcgggcgctgacgcgacgattcgcgcgtgcctgtcccttggtcagccgcgcagcttctttctctttgccggggcgggatctggaaagacgcgatctctcaaggaggcacttgagggattggacacacagaccctgaccaccttgcgcaaacacagccgcaagatcgccgtcatcacctataccaacgccgccgcagatgagatcacacgccgcgtcaaggccgatccggtgtttcaggtacagaccatccacagcttcgcttggtcgctcatcgaggggcgcacggcggatattcggggctggctagagagcaacctgcggacagaaattgccgagatccaagcagcccatgcgaagggccgtgtgggcaccgacgcccatgacaaacgcgagaagaagatggcctccaagacgaagcgtctggagcgcctggctgaaatccgcgccttcacctatgcgcccgagggggacaatttcggccgcgatgcgctgcaacataccgaagtcattgcgctcgccgcgcatttcctgactgaaagcgagacgtttcagaacatcgttctggcgcgctatccgttcatcctgatcgatgagagtcaggacacgatgaaaccgctgatggaggcgctcttgaccttcgaggcgcgccatcgcggccgcatcgccctagggctgctcggggacacgatgcagcgcatttataccgatggtttgcgcgatcttgaccagcgagtgggggatttttcgcaaccggccaaacagatgaaccaccgcagccgcaagcggatcgtggacctggcgaattcgatccggcgcgacgatgatggccgccagcagcgggcgcgcgaagacaaaccgggtggcaccgtgcgcgtctttcttgcaccaagcgagggcacggatcgcggagcctttgaagccttcgcttgtgcggacatggcccgcatcaccggagaccccgcgtggcagaacgcggaggcgatcaagacacttacgatcgagcgtcacatggccgccgcgcgtcttggttttagtgaactgtttgagccattgagcaaacccgacaagctcaaggacgggtttcgcgatggcaccttacctgcgatgcggcttttcacccaccgggtcttgcctttggtgacggcacaaaggaatggggatgcctttgccgcgatggcagtgctgcgcgacggctcaccgctggtcgataagagaggtatccggacggggcgcgggggccaggcttctggcctcgacgcggcacgggcgggcgttgcggcgctgatgacgctatttaaggacgaaccggatccgagttgtgccgacgtgttggcagtcgtggccgagcaccggttgttcccgatccctgaccagcttcgaccctgtttgcctgacgacaatccggcggccgaggacatggccgatatccttgccgagcttgatcccttgtttgacgagctggacctgaccacgcccgaggacacaccacccactgaacccaccatcaccgaggcctggacgcaggcgcttgatgccccgttttcccaagtggcgcgctacctcgcctatgtcgaagatcgcagcccctttggcacccaccagggggtcaaagggctcgaatttccccgggtcatggtaatcgccgacgacgtccatactcgcttcaagggccttgcttcttacgagacgctgtttggtgtgaaacccttgggcccaaccgcccaaaaaaaggcggacaatggcgaggaaaccacgatcgagcgcacccgccgcttgctctatgtcacttgcacccgcgccgaagagagcctcgcgctagtgctctattccgaagcccccgatacgatccgcaggtttctgatctccaaccaatggatggccgaggacgaggtcgtgatggctgcggccgacgggacctttcaggaagctgcacagcaacgctga

SEQ ID NO: 74642 - DNA, 432 bp, Snodgrassella alvi SCGC AB-598-J21
ttgaaaatattatgtggaattgaagaactgaatgataatttacaatataaagaaatcaacaatacttatattgtttttcaaaaagaccccattaacaagcaatatgctaccagtctggaagaagcaattattttaaccaattatgataaccagttggttatcgaatcacttaaatcaactatatccaccaaaatgtttaatattataatggataataataggattaatcctaattgttcttttgaaatacagaaaaaactcaatacgaacgggggtaaaacaaaatttgccagcacactcctttataatatgattaccgttactgctaacacagatccagactcatcgaatatcatacctgaattacctcagtatattactgatggttttgattggttaaaaagacaattggaaaatgataaagggaaataa

SEQ ID NO: 74643 - DNA, 933 bp, Snodgrassella alvi SCGC AB-598-J21
atgagtctggaagaaaatctgaatcaagaaatccagcaacagcagaaaatatttacagccattgataagtttgaaagttttattgtttatgctggtgccggtgctggtaaaacctacacgctgattgaagcaatcaaatatattttgagtcatcatttagatactttgcacaggcataatcaaaaaattatctgtattacctatactaatgtggccgttaatgaaatccgccaacgcttaggagaaagccaatatattcaggtgtcaactattcacgaaatgctttggcaacaaatcagattgtataaacaagatgaattgatcgagttacataaaaataaacttgagaaagagcttagaaaaaatgaattgaaaataatagaacaagttaatcatcctaatctttcttgtctgaatactgaggaaaataaagagttatttaaacagtttgtgcaaaaaaacaaaaagctattttttaatctggaaaaagtgctaaacacaacccaactcagaaaagaaaagatattggaaataaatcaaacaaatccaatattaaatcaggaaattttagaaaaatccttaaaaaattttgctattttcaaaaaatattttaatcttgtcgatagaaatattacttttcaacaagcaatagaaaaaataaataattctcaaaacaataataatattttatctgtagaatatgacagtaactctaacagtgaccgtttggcttcaatgaaatttagccacgatactctgcttgaatatagcttacagctagtagaaaaatatgatatgtttaaaaaattactgacagataaatatccttatatgtttattgacgaatatcaggatacaaatgaatctgttgtaagaattctggcaaatttacaccagtatacctatcagcgaaagcagaaatggcttgctgga

SEQ ID NO: 74644 - DNA, 2223 bp, Lactobacillus reuteri
atgtacttaaagagtatatctatacaaaattatagaaaatttggtgaagagcagacatttgagttcgctcatagtagttgggaaaaaggaattaacagtatgttggaggagaagaaagaggaggaaacagagaaatatatttcaaagagtacttctttatttgtagggaaaaataatgccggaaagagtactgttattaatttgctaaatcgtttgcaaaacactaaatgcggcaatcgggcggtctttcaatataacgactttaatttagaatatttacatgaatggtataaaaaatattttgaatcttcagttgagattaacgatatttcaccagaagatttgccttttatgaaattcgaactaaaagttggtattgatgacgggaacgatattatctcgaattttaaggatattttagttattagtggcctaaaagaaataaagaataatccgatagatgataatcagccagtggtcacgatcactattaggtatgaagttatagacgttgaaaaattcaaaaagcaattaatagacttaagaaccgaagagcgcgaaattaatagtaaagaatcttcatattataaaggattgatttatcggaaatttttgcaactttttaatgaaaactattatgctcttaatttttatcctcttgatgcagatgaatatgcagagcaattttctttagcaccattacttaaggtagatgttgtcgaggctaatacggtgaaagataaccataccttatcaaaagcttatagtaagatcgtatcaacatatgcgaaaaataacgatataaatgacattactgaggtagttaatgagttaaattctaaggttaagaatatggtggatgataatgtaaaagaaattttacaaaatgctgtttctgctgtcgaagcaacaaaaaacttacaaatgaatttatatccagatgtaactttagaaaaagtattagctcataatatcatttatgagtatcaggagaatgaggataatattccagaaacacaatatgggatgggctatacaaatctgatggtaatcattgcaaatattgtgaattatttagaattatacaaagaagatgatattaatggtgctattaatatactatgtattgaggaacctgaatcctttatgcatccacaaatgcaagagctatttattagaaacatctcaaaggcaattgcaaggctgcttgggaagaaaggtgaacttgatacatttcagattctaatcactacacattcgtcacacatcttaaacagtaaaattcattcagcaaatagtcttgataatattatttatttaggtaattttgatggtcataacttggtaagaaatattaaggataaagatattaaaggtgcatatgatgaagataataagctatgggaatataccaaaaaatatctacgcttagaagctaatgatatattttttgcagatgcaatcattttagtagagggattatctgaggaaacttatataagatatcttattgacgaaaagactaaactatataattgtcatattaaggtttaccgaattgatggtgcctatgctcataaatttattagtttattaaatcttattggcgttaaaaccgtaataataaccgatttagatttgaaaagggagaaaagaaaggacaaaaatggtaggaatataattgataaggataatataaaagatttgactaaatgttatggatataagactggttgtattacaacaaataatgcactaagagcagttatagagaaagcttttggtattcctaagaatatgaataataaaataaatgaaaaaataatctctacgattaatgatagagaatttcttaggttagatctccctaatactaatattacaatttattcacaaggtaaaataaagggaagttttgctacaagttttgaggaagctattatcttaacaaatagtgagattaatagagattcaatcagaagactattgaggagaagcagtgttcatataagctctgaagaacagaaagagagtaagcattttgcaaataattcatataactaccaaagaaggatagcgtctggtcaaagaaaagaaaagttctcaacaaatatagtacgtatgtcaataggatgtgacggatttgaattaaaagagccggcatatatttactcagcattagaagagatatgccaatattttaacggagatacaaatgagtga

SEQ ID NO: 74645 - DNA, 2031 bp, Lactobacillus reuteri
atgagtgaggaagttataaagaataacttaaaagaagaagtaaaaattcaagaaaaacttaatgattgtgtagacgaggctaaaagtttttgcttcgacgctggtgccggagcaggaaagacatatgctcttgttaatacaattaggtatatcttgcaggatgaaaataaaagacaattattaagaaatcgtagtcagaaaattttatgtataacatatacgaatgctgcaaaagatgaaattattaatcgaattggtcataactcagaagttgttatttccactattcatgatttcttatgggattttatttcgatacaacaaactttattggttcaacaacataaggataaaattagaaatgaacaaaaaagagctgaaaaactagaagaggcatttataagagagtattctttagaaaaagatatcttcaaggaaaaagtaactgatcaaggttttctaaaggcttttcatcaaaattatgctaagaatgcactacctttcaaagaagccattggattatatgataatttctggaatggttttaaatttagtgtgagtaaacttaaaaaggcagttagtgctgttaatagcttattaaattatgaaaaagcactagaaaataataatagtaaggtgaagtatttaccgaccagaaacagggatgacttagcaaattatattattagtcatgacacattgttagattatagtaagaatattattgaaaaaagtaacctgttacaaagattactgttagataactatccatatgttttcatagatgagtatcaagatactgataaaagagtaattgatattataactagtattaaagaatatgcaaataagaagaaaaaaagatttgtagtcggttattttggggatgctttacaaaatatatacaaaaatgggatcggcgctttaccaaacattaacgagtacgtatctattcaaaagaaattcaatcgacgttcgacaacacagattgtttcgattattgaaaaaattagaaatgatggctttggtcaaagagctattgatgaaaataataatgatggattatgcaagttttatttatctgataccaattttgacttagaaaaatttttaaaagaaaatgacctaactagagagactgcatgcttattattaaagaataaggatattgcagataagagagaatttaacgaattattagcagtaattagtaaatatccaagatttagtgatagtaattacgttaatataaataatgaatttttgcagaaaaatcaacaacgtattggatggtttttacgtgatgttttaacatttgttggattcattttatgtgttagcgacgattcctcaacggtaagtaagattattaaatttatgcaggagccaactaatcgaattacatttaatgaaatgagtgagttaattaaaaagattaggcttcaagtccatgataatatgaccttagaggaatgtataaaacagctttctcaaattgataaggctgatagtattatcaaaaatattttttctataaatgataaaagcactgatcttataactcatataaagaataacgcatttgaatatttgcttttctcagatgctaatgattctgaactattggacggattttttgatattaagtttgtacaatttaaaaattggtataattatgtcttcaataaagatgtgaatacaggtttaacctatcagactctgcatggatcaaagggattagaatttgataatgttgtggttgttttacaagataatttcgcgcgtaagaaagattattgttactacttttttgataattacaataatcctgataccgaagataaacagaggtttaacgaagtaagaaatctgttatatgttgcttgttcaagaacgaaaaagaatctatatgtgatatatgaaacaaaggattatcaagagttattgacaaatgataaattaaaaatccttacgaatattaaaacaatattttctgagatagaatttattggcagtactttagatgagtaa

SEQ ID NO: 74646 - DNA, 2040 bp, Streptococcus mitis
atgaaaattaaaaaaatttatgtacaaaattatcgattattgaaggatttttctctagagttgaaaaatgatttatctttaattgttggtaaaaataattgtggtaaaacttcggttttatctgtgttagaaaagatattcaataagaattctagtaataccttaacatgggaagatattagcttaagtcatagaaaagaaatttatgaaaaagtaaagttattttctgatatttctgagaaagactgggaacctattttaggtactagtcttcaaatttggattcaatattcggaaatagattcgtatcaaaatatccaaacattcatgatggatttaaatcccgataacaattttattattcttgaatttacgtatataatccctattcaaaaacttcgtgacttaaatcttcaagttagtgattttatagatgatttttcaagatttgagtcgttcatgaagaaaaatatgagtaaacttttcgaaatgcagatttactcactgggatacaatccttctactcaaaaattaacagaagaaaaatctgatttacttgaaatgaaagatgttcataaaattattaaagtaagagggatcagtgctagtcgagaagtatctaataaagaaaataaccattcattgtctaagacgtcaaatcgattttataaattaaataatggcgaagctattgacagtaatgcaattaatttacttcaatctgcaattttaaaggcggatgaaactttaacgaaagcttatagtggtgatgatagtaacgaaggaatatttactccagtttttgaacgagtaaaaagatttggtggaaataatagtgaagcagagttggcaatttattcatcactgtctgagaaggatattttaagtaataatacgacgttgtattataaacatgatgatagtctattacctgagacatataatggtttgggatatttaaatctatatggaataatttttgaaattgagactgtaatggcagatataaaacaagaccctgcagatattaacctagtttatattgaagagccagaatcgcatacgcatccacaattacagtatatttttatcaagaatatcaaagatttattagcagaacatgtaaaggagcttaaagaaaaaagtagtgcatgtgacatccagtccttaattacaactcattcatcgcatattgtatctgattgtgattttgatgatttaatttattttaagcgcaataatggtactgccacagcgaaggcttttaattctttaaaagaagaatatggtacagatagactcggatataaatttgtgaagcaatatctgactttaaatagtagtgaattatttttttctgataaagttatttgtattgaaggtgatacagaaagaattttactaccaacaatgatgaaaaaagtggatgtagctaacccagttcaacaaaattctactatcatgcccttgctttcgcaaaatatctctattattgaaacaggtgctcattcacaagtatttaggaaattatttgaatttttagagcttagaatattgattattactgacattgatccagtaaagaagaaaaaaaacggtcgtcttacttcttgttcagcccaaaaagcaacaactacttcaaattcatcaattaaaaatttttttgatatttctggggataataattttttagcagttagtaataaacgttttgaagacaaaatcaattcagataatagcattcgtatcgcatatcaaattggcaatccagagagtagctatcagccagctagttttgaagatgcttttattagcttgaatagtcagtttatcttagataataaagagaatttaatagaatatgaggcgcttaagagttttagtaaaagtgatatttacgatttgtatcattttgctagggataaagtgaacaaaaaatctgcctttgcatcaagtctattgtattttgaagatgaccaaaatacttggaaagttcctaaatacatttcggagggattattatggttgagagaacaatag

SEQ ID NO: 74647 - DNA, 1923 bp, Streptococcus mitis
atggttgagagaacaatagagccagaggtagaaaaggtatttgaagcaatcaaagaagataaaaatttcattcttgaaggtggtgctggaagtggaaaaactttttcattaatttctataattgaaaaaatatcaagagatgaaccagataaatccattgtatgtattacatatactaacaatgctgttgctgaaattagagagcggataactaatgataaattaaaagtatcaacgattcatgaatttatctggagtatcatagaacaatttcaaaatgaaataaaatgctgtttaattgatctaataaatgatgatgagcagaaagcatttattagacctcttgattacccgagtgaagatccacttacagatacttattttgaaaacattcgtgtagattatgatgagcgttattcaatgagtataattgataatcgcgttcaaattagtcatgagcatattttaatagttgctgaaaaaatgttttctacatatcctaagttatgcgatattttgatcgatatagctgattatatttttgtagatgaataccaggatactagtccgttagttgtaaaaattttattggaatatatacagaatagaacaaagaaaaatattgtgggattttttggagattctatgcaagccatctatgactcaggaataggagatttaagttcatataatttggaaaagatagcaaaagctcaaaatcgtcgcaatcctaaaaaagttattgatttagctaataaatttagagatgatggattgattcaaactccctccgacgatgatacggcacctaatatggataatgggagtatcattccgggaacagtaaaatttgtctatgggaatgatattaatcaacttgaaattcttagaggtagtcaactttatagagagttagaatttaatgcaccctcaaaaacaaaagaattgcgcctgacgcataaacttaacgcagaaatggcaggtttctctaagttatttgaattatataattctgacatatttgtgaaattagttgcaaatttgaagaagaaaattgacacaaatcaggtaattgatgatggaaaatcatttgaagagttagtagaagaagatcaaatagttgttggaaggggtggtccattaataattgatgttgttaaatctaccccagaacttttagatttttatgatgaagttaaaacatattcgtttgaagaagtgattagtaagagtaaagttaacaaagattctttattagcatataaatttaatggatcaagcagtagatatgaagcgggtacagatagagataggattcttagaagactagatctaatccatgaactattagatctatataaaacaggtaagcataatgaatttttacgtattactaaatttaatataacttcgtcagaagataaaattactctatctgaagttatgacaaaaatctctgttgatgatattacaattggaaaagtcatagaacttgcagagggaagtggattaatttcaaaggatgacttatttactaattttattgaaaatagaggatattatttatggttacgacttaagaaattaccatttaaagaatatataaatagtattgcttatcttagagaatatgtatctgtcataactcagcataaagttaaaggtagtgaatatgagaatgtcttagttttgttagataatggaaggtggaatcaatataattttgataccttatttggtatgggggctactagtgagaaggttcaagatagaacgaagaaattattctatgtcgcaatcactagatctatgaaaaatttaatcgtttatatgccgactagtgatagtcagattattaaaaaagcacaagattacttcgaattagatgatattgttgatattttgtctttcgttgatgagtaa

SEQ ID NO: 74648 - DNA, 2226 bp, Streptococcus mitis
atgtatttaaaaagtttatcaataaaaaattatagaaaatatggcgaagaggttcaggtaattaacttcgctcatagcaaatggccagaaatgtcaggcgatgaagatgaaatgcaaaagttaaatataacagaagagtatatatcaaaaagttcatcattaattgtaggtaaaaataattctggtaaaagtacaattgtcaaattattaaatacactacaaaatagcaagtcaggtagtcgtagtattttcaaatacaccgattttaatttaaaaatattatcagattggtatcatgaaaatattgtcaataaatctgaagaagagataaaaaatattgataaatctcattttcctaaactagaatttcagttgatattaggaattgatgatggcaatgatttgatttcaaattttgaagatatattaattttaagtggtatagaggcagttgaaactcatgaaaatcaagagatctctgaagtgactatcgatgttaagtatgaagttgtggatgaagtagcttttttagaagatctggttaaaattaagactagctattttaatgatagtcaacagtacgatgaactatataaaaaagagcttcaatatcgacaatttttagctttatttagcagtaattactttgtattaaatttttatcctataggaagagaggagccagctaaagagttttctctatcttcattgtttaaggtggatacaatagaagcgaatacggttaaaaatgacaagacactttcgcaagcttacaacaaaatagtttcaacttatataaaaaataatgatattgaagagattaatagtttagttggtggtattaattatctagtaaaggggatggttgatgccaatataaaggatattcttcaaagcgccgtgtctagtattgaatcaactaagaatctaaagatgaatttacatccagatgtaactttagagaaaatttttgcaaatagtattatttatgagtaccaagagggaaataacaacatacctgagagccagtttggtatggggtatacaaatttgatggtaattatcgcaaagattgttgattatattgagctatacagtgagaaagatattaatggttcagtaaatattctttgtattgaagaaccagagtcatttatgcatccacagatgcaagagttatttataaaaaatatttcaaaagcaattgcgacattactaggcaaaaaacaacaactagatacctttcaaattatcatcacaactcactcaacccatattttaaacagtaagattcaatcaggaaacactctaaataatattagttatctaggtcaagcaggtgtaaataatattataaaaaacataagtgatgacgcaatagtatctggtgtagatattgacaaaaaagcttatgaatatatcaagaaatatttaaggctagaggtgtcagacattttctttgctgatgcagccattttagttgaaggtgtttcagaagaaacctatttaagatatgaaattgataaacatccaatattaaaaaatcatcatattaaagtttatagaattgatggcgcctatgctcatcagttcgtgagtttattagatttgttaggaatcaaaactgttatttttacagatatggatttgaaaagaaaagagaaagatgaagacggggaaaagattgagatcctttcatacaatattaatgatttaaatattcaatatgcaaattcaacggagtgtttgactacaaatggtactctacaatattttataaaaaaagaactaaatgataaaaaggcaaaatatgacaaaattaatccaaagttaattgaaatgcttgctgataaagatgagttagttattatttgtgaaaatatttcaatgtattctcaaggtaaaataaatggatattacgcgactagttttgaggaggcaattgttttaacaaatgcaggaaacgaagatgaaaataaatacaagaaatccttgattaaagcactacaatatgtccatcctaatatgaagtattttggtgatattgatgaaacatcagaaatagccgataaatcttatatgtatcaagttaaattatctgatggaaaatcaagattttctactgggattgtatatttatctgaaactgatgacgactttagcctcaaacaacctcagtatattgaatcaggtttgaactcactttgtagttattttaaggagtaa

SEQ ID NO: 74649 - DNA, 1548 bp, Streptococcus mitis
atgacatatacgattagtccagaaaataaacaactagagttagatattcaggaaaaaattaataaatgtttagataactttgagagtttttgttttgatgccggtgctggtgcagggaaaacctatgcattacaaaagtcaattgaacatattttgaagacggagggagaaaatttaaaattacgaaatcaaaaaatcttatgtatcacttacactaatgccgcaaaagatgagattcttagtcggcttggtaaaaattctgctatactggtctctacaattcatgaatttctatgggaatttatttctattcagcaagagtcactaactatagaacataagaataaaataattgatgaactccatgctattgattgtaaaataaatgaaaattctctttctagtaatgtggttctgcctgaatttcaaaatgttgtttgtaaggatgattttataaaaactttttatagttattacggtatttctgctagagattttagagatgcaatgaaaaattatgatacttactttgagacttatctcagtaatatttctaattttaaaaatctggttaaggacattaataaaaagagtagattatcaaaaacattgaaggatattgaggataaagaatctaaaaaaattatttataatccagttcaaaaccgtgataaacttgaaaattatgtcattagtcatgacacattattactttactgtaaaaatataattactaataaagatatattaaagagattattttcggataggtatccatatattttaatcgatgagtaccaagatacagatgaaaaagttgttgctattattgatagtatcagggaatattcaaattctaggaaaaagttagtagtaggattttttggcgactccttgcaaaatatttatggttcgggagtggggattcttcccaaaaaagaagagtataagagtattgagaaagtcttcaatcggcgttcttctatgcaaatagtagagttgattgaaaaaattagaaacgacaattttgggcagcaatctatatatactgattttgataatggatcttataatttttatatctcaggtgatgattttaatatagatacttttttacaggaaaatcacctgattaataatacggcctgtcttcttatgaaaaatgatgatatttccaaagcaagaggttttgatgaaatattatcagtattgaaaaagttccctcgatttagtggtgttaactttgagaatgtgtctaatgaatttttacagaaaaatttacagcatatgggatggtttttgagagagattttaactttcatagacttcattcaaaaggtaagggatgataattcaacggttagggagattattcagtttataacatcgaataaaccaaaactaacatttgcagtaatgaagcaatttattggtaatttgagagagcctaacctatctacattaacaattgatagatgcattgatgaaattgcaaatattcaggaaccaatctcaggtaatgatattctaaaaaaatattttcattag

SEQ ID NO: 74650 - DNA, 2286 bp, Photorhabdus temperata subsp. temperata Meg1
ttgtatcttcactcgtatcgcctcaggaattttagacgtcttaaagacgctcatattgaactcgctgatgacatttcaatattcgtaggatcgaataatagtggaaaaacgtcagcaacccaggccatctactcattcatcacgggaggaaaagagcgtttcagtctctacgatttcagctcttcgtgctggaaaaccttcgatgaagctggcgatatcaacctgactgacccgattcctgaaggcttcacactgccgagtatagaccttgatctctggtttgaagttgcagcacccgacctttatctggtgattgccttgctaccgagtactacgtggaaaggaaccaaggttggtatacgaatatctctgaccgctcgaaatcccatcaacctcattcagaactatcaagaagctaaggctaagggtactgagccgtctgctcaattaccccccgggtcacaatatgttccctggccccgctccatgacggactatctccaacgtgagctgaagagtgaatatgaactgcgttacttcatcctggatcacactcggtttgatgataactaccgtgaaatcggtgactacgttcctgatgaactaggtggagagccgggcggtggaacgattctaaaatcgcttattcagatcgataacttaagtgctcagcgacatctcgctgatcctaacccggaagcaggtggcagatcagaagacttatcaaagcgtttgagtcgcttctataagcgcaacctcaatcagagacaagacgatcatttagccctcaaagcgctgtttgactcagaacaagcactaaatgttcacttggatggggtatttaaaccaatgcttgatcggctcgccaagcttggctaccccggtatcaataatcctcaactgaagattatgtctgcgttagaccccgctcatgtcatgagtcagaatgctcgggttcactaccagatcggggatggagatgacatagccactcttcctgatagttataacggtctcggattcaaaaatttgatctacatggttgtggaaatccttgatgcccaaaccaggtggtcgacgatggagaatcgccccccattacacctgatttttgtggaggaacccgaagcccatttacatgctcaactccaacaggtctttatccgcaatgttcttgagctcctaagcatagagggcgacaacggaagtatttttgacagtcagatggtcatcacgacccactcgcctcacattctatacgaacgaggtttcaagcctattcgttactttcggcgcaagaaggttggcaaagagcagcagaccgaagttctaaatttatcggctttttatcacgctcagccagacgatcgtgattttctggaacgatatttaaaactcactcactgcgatctttttttctcagatgctgccatccttgttgaaggcaatgttgagagattactcctgccaataatgattcgtaaggtggcaaaaactctccgttcagcctgcctttgtattctggaagtcggaggagcctttggtcaccgttttcaatcacttatcgaatttctcggtctaacaacgttgattattaccgatattgatagcgttgcccttgtagttcctgcggcgaatgacatcactgatgatgaagaactcgaggagttcgaaatttcaggggacatagaggaagatcaagttctggaagagacacagagccctgtcgtggaaccagagcttaagaagaaatacggcaaggcctgtttgccctgtaaactaggggctgcgacctcgaatcaaaccctaataaaatggcttcctagcaagctcaccatcgaagacctacatgcagcctctgaagcggagaaaactcatgagctggaagacggtgcgaaggttcgtgtggcctatcagactgagcgggatgttacttggaacggaaccactgatagcctatgtgggcgaacgcttgaagaagactttggcctcgaaaatccggaatggtcacaagctacggcaaggaaacatctcggcctgattataaaggggaacattgaaaaccctaatgctcttgccaaaggtcttcatgagagagtatcacggaaaagtttcgataaaacaaagttcgcacttgctgtacttactgaaaaagaggatgagtgggatgttccggcttacatccgtgaagggcttgtctggttgaaggacgaagtgcgaatcgagcttgatactgctctgcccggtatcatcgatgatgtagctgtaggaggtgaacatgagtag

SEQ ID NO: 74651 - DNA, 1953 bp, Photorhabdus temperata subsp. temperata Meg1
atgagtagtagggcgaataaaccggatacccaagctgatatcgatttacgaatctgccttggtgatgttcctccacgcagcttcataatgaaagctggtgccggttctggcaaaacgacatctctcattaagggcttatcgtcggtcatccaaatgcacggaaataagctaaggaaagcccgtcagcgcgttgcctgcattacctacacagagatcgcagctgctgagatctggagagacgtcagcaatgacccactgattcacgtttcgacaatccatagctttatgtggttgctagctaaaccgttccagaacgacattcgcgcttgggtatcagtacgcattctggagaaaattgaggcgcttgaagagaaacgatcaacctacggtcctagagttcagcaacgcacgaaggataaggatgcgcgagaattggagcgtctccaccgtcagtcagaacggatctccaccgtcaaaagtttccgatacggcattgggagtgattacataaaggggattctgggtcatgacgacattctgaaactcgtgccccatctcattgccgaacgccctctctttcgaaccctcttggcgcgccagttccccttcgtcttcgtggatgaaagccaagatacgactgctgaagtcgtggaagctttaaaaaccgtcgagagtgaacctggtgtctcactttgtctcggtttcttcggagatccgatgcagcggatttacgcaacgggaaccggattagttgaagctaaacctacttgggttgacattcctaagcctgaaaatttccggtgttcaagcaaggttctagatcttgcaaatgccattcgtcgtgatggtgatgatctcgtccaagtgcctggtcaacgcctgggccctgatggaattattccaacccctgaaggctcagcccatcttttcatcttaccggctgacgatacgcgagatatcaatctgattcgagtacgagaatggatggcgatgcaaactggtgatgatcattggcaacgtggtggtgatgaccaggaacgagtgaaacttctagttattgttcaccaaatggctgcaaaacgcttaggattcggtgatctatatactgcactcaattccaaaaccccgtcagcgttcaaggatggctttttagatggttctgcatggcccatctcgccgtgtgtaaagtttttaatcccaatagcgatcgcccacactgaaggccaacatctcgaagtgatgcaacttatcaggaaatattcccccctccttgataaggattatctcattaaggtaagcgtagctgaacgccttaaagaaattagagaacttgttgcttatattgcagcaggtatagcgggggattctggcataacaatcggagagcttcttaagcgggtgcatgcggctgagcttttgctgcttgatcctcgactggtctcatacttagacccaggagcaagtgtaccaaccccatccgaaccagaggaaagactcggaaataacgatgatcaagaagatgatgagtccgacaaggaaatggcttcaatggacgcttttctggcgtgccccgccagtcaactcttggcgtaccaaacttacatttcggaacgttcacccttctggacacagcaaggtattaaaggggccgagtttaagagggttctcgtcgtccttgacgatgccgaaagtactcacttccagttttcctacgaaaaatatctgggtctcaaacccctctcagatgctgatcaaaaacatttagatgcgggtgaggaaactactgtagatcgaacacgccgtctcttctacgtcagttgtactagagcgttaaaggacttagctgtcgtcctattcacagcagaccctgagctggcagaggcgcacatacgccagcttaaccttttcgaagatggagccattcacactcagcttgtttttcagacagcgtaa

SEQ ID NO: 74652 - DNA, 2055 bp, Ruminococcus bicirculans
atgaaacttacaaaaataaaaattcagaactatcgttgttttggagaagaacaaataatagattttgatgacttaactgcttttattggaaataactgttctggaaaaacaacagctatgtctgcgcttaattgtattttttcaaataatagcaacgatagaatacttaaacgcagtgattttcatcttccacatgataagagttggaactcactcgatcatcaagaactatttatagaagccgtttttgtttttgatgaattagctgaaaaagatgctgatctttcagctatccctgtattttttaagagttttgtggtggatgaaccaggtggaacaccctatctgcgaataaggctagaagcatcatgggaaaaaagcaacaatattgagggtgcaatagagaacaaagtatactatattacttgttctgaatcagaagcaattacagaaagtgctaaatccccagcaaatcgaaaagatttagatcagatcagagttatctatgttccagcagttcgagatcctttaaaacaacttaagaacacttctggaacaatgatcaaccaaataatgagcaaggtaaattggagtgacgaatctcaaaagcagataaacgactcaattgaagccttgaatcaaagttttttagcagaaaaaggtatctctgtgattagtgaatcaataaatagccaatggaagatgtatgattcagattctcgttacacaaatgcacagttgagatttaacagcacggatattgattcttcaattaagaattcggaagtagtattctcgcctgcccctatggcaaaagaatgttccattgatgaattgagtgacggccttcgttcgttgttttatatttcactagtggacagcatccttaatgttgaaatacaaatcaaacaggaaatgccttcttatccagaacagctatcattttcattcactccgcctgtattaactattattgctcttgaagaacctgaaaatcacattgccccacatcttattggtaagttggttcacaatttaaaaagcatagcttcaaaaagcaacgcacaaactatattaagttctcattcttcttcaataatcaagcgagtagaaccagaaaacctaagatattttagaattgattctagacatgatacaacttctgtccgctcgctaactttacctgacaaggaaaagctgtccgatcagtataaatatataaaggaagcggtaaaagcttatcctgaattatatttcgcaaaactggtgattttaggtgaaggtgatagtgaagaaatcattttacctaaggtatggaacgcaaagaatggtgatactgatataagcgggatatcaatcgttccattaggcggacgccatgttaatcatttctggagattgctcaatgatttgaaaattccacatataacccttttggatctagatcgagaacgtgatggtggcggttggggacgaatagcatatgcagtagagcaattaatccaatataatcctgagaagaaatcgttgctacaatcagacaaaggcacgattagtcttgatgcgatgaaaaaatggaatgtatcggataatatggacttatggattaagtggttagaagaaaatgatgtgttcttctcatctccattagacattgattttttgatgctcgaacaatataaagatgtatatatttctacacttgagtcatcagagggtcctcaactaatggtttcagaagagggaaaaaaacataggaataaaataatcgatatagaaacacaagggaaaacatctttgccggagtatactgaaagaatagaaaatgatgtccatagtacattgaaagaatgtggcggagatggagcaacatattcagatgagcagaaacgattgatgatctggtatacatactttttcttaaatcgaggaaagccatccacccacattgaagcactatcgagaattgataatgaacaattaaaaacgactatgccagatgttttatgcaggctgatagcttcagctgaaaagaaactaaaggagacgatgtga

SEQ ID NO: 74653 - DNA, 1824 bp, Ruminococcus bicirculans
atggccattatagctgatgaaaaatggttaccatctgatagtatcattcttgaaaaaaatgcagatgttgcaataaggcagaaaagaaatgttcttgtggtagctggaccaggcgcaggtaaaacggaattattagcacaaaaagctaactatctgtttgaaactgataattgcaaagaaccatatagaatattagcaatcagttttaagaaagatgcagccaaaaatcttaaagaacgtgtggaacaaagatgtggtaaagagacagcttgtcgtttcgattcaatgacatatgatgcttttgccaaaaaccttcttgatcattttcgtttagcgcttccgcaggaattacgtccaaagcaagattacatagtagaagataaagatatattaaaagccgcttttgaacaatataataatcataatacaagatattatgatgctattatatcctcagtgtcacttccgttcgccaaagatgaggtgggagaaagaatatggaaacttttgctacatggatttgacgatcatacatcgatgctcactttcaaaatgattagtatgctagctgagtatattattagaactaatataatgataagaaacggattacaagaaacatataaatatgttttcttagatgaattccaagacacaacaactcttcaatacgaactagtgaagcgatgttttttatcttcaaaagcaataattacagcagttggagataataaacaacgtataatggtatgggctggagcaagaaaaacagttttcgtggattttcagaatgattttaatgcgatcaagtataagctgataatgaaccacagatccgctccgaggttagttgacttacagagaaaaatgtattccgtgcttaatgaaagcgacggtcaagtacagcattcggcaaaatggagagaagatgacggaattataaacttgattatttcagagaactctgaatcagaagcattaacaataactaatagcataataaaaaaaatagaaacaggtatttctccgacacaaatatgtattctttgcaaacaaaaaccacaagattttacgcagataatcattgattatttaggacaaaaaggtatatatgcaagaattgaaaatgattatcaagatttaatcaaagaacctattatagaaatcattctttctattttgtcacttacctgtaatcggaaacatcctgatgattggcaagtattagtatcttctataatagaattatggaacatctcgggcacacagtctgatgatgaatactttaatgttcaaaatcaaattgatgatgagttattaagaattaaacaacagtttagtttagtaacgacaaaatcggagttctatgaagtattaaagaagatagtatcttttttgaaatttgattgtataaaagctgtgtttccagagtatagtcaaggcaaatatctaaatgatgtacttaatagatttgcaaagctcttttgggatgaattagaaaaaacatctattgatttgaatatgtctattgagcagtttaaggggctacactcaattccaataatgacaatacataaaagcaaggggttggaatacgataccgtgttttttgtgggattagaggatgcagctttttggaacttcaaaaatcaacctgaagaagatcgctgtgctttttttgttgctctttctcgcgctaagagcgaagtgtcattttctttttgtaagaatcgaaatcataaaacgcaaaagcataatgatattaatgaattctttgatctgttacaggagcccagaatagcaaatattataactcccccttga

SEQ ID NO: 74654 - DNA, 1929 bp, Mucinivorans hirudinis
atgtacttagctaaaataaaaattgaaaattataaaggcattgaactagtagaaacagagtttgaccctaaactaaatataattattggagaaaacggatgtggaaagtctgcagttattgatgcaattagactattgtataacgttggagaaccgattagagaattgtcagtctcttctgatgactttcatcaaaaggaagttgacaatgcagggacgaaaactattcaaaaatctactctaataaccatcacctatacattcaaaggtttgtctacctcgcaaaaaggtgctttctatgaatatatggttattgaccccaataaaatagaagaagactacgctaaaatctctatttcttatgaggaaaaggacggaaaatatccctatttctcttataatacaggtaatatagatggtcaaaaagccgattacaaaacctttgaattatttcaacattactatttaggtgctttaagagatagtactcgagatttattaagtactagaaacagtattcttggaaaagtgatacgaagatttgttagaagagaaaattcagaagcagatattgaaaaaataataaaagacgcaaattctcaattattagatcgggacgaagttaaaaatacaagagatggtgtaaacactaaccttgagaatatatttaagaaagtcattgataataaaattggacttcgcatagaagatgcaagaacagaatatatagtcaatgcaataaaaccatatcttcctcacgatagaacaactctaattgatgatggctttcatttatggcaaaatagcttagggtttaacaatttgatatatatagctgttgtattgggtgacataaaggagcagattaaagataatgggcttcctcatttcgcattattaattgaagaacctgaatcacatcttcatccacaattacaactcagcttatacaacttccttaataatgctaacgctacagaaaacagccaactattcataacgacccattcacccactttaacatctaaagtaccttttaaaaatctcattttactagattgtgataaagctacaaagattgacaaacaatttcaaaatagagagtctgaaaaaatcattgaagacacgactaaaggcaaagaattacttgatgctgattttgaaaatagaatgaagaaattacagagatatattgatgtaacaaaatctcaacttctattcgctaaatctattttattcatagaggggatttccgaagaattattagtttcagcttttacacaattgcaagattataagctagaagattatagaactgaaattgtaaatgttagagggacatcattctatccatttttatatctgtttaataactcaaacccaatagaaagaataaataaacaaatctctgtaattaccgatgatgatagatttacagattctaaaaaatcagattacagctttgacaaattaatagatgataattcaattcttgattctttagatgactctatacaaacaggcaatgcagtttcaagaatcaaaaatttaaactcggtcaaaaataaagctaataacattgaggtttttgaatcatttaaaacacttgaatatgaagtggcattgcataatgtaaatattgatagaagaaactttaaagacaactttctcgtgcaatatattgactcaattgacaatgctaaaacaactaagataattgcctatatggcaacatttacaaatgatattatggcagaagaagaaagaagaaaagtcgcaactctgctatggaaaagttttccagctaaggccgaatttgctcaagatttttcaattcacttgcttgaaaatttagaagctgcaaaagcgtcttttaaagtccctggatatatattaaaagcccttaatcatttaaaaaaaggattgtaa

SEQ ID NO: 74655 - DNA, 1821 bp, Mucinivorans hirudinis
atgtattttgaaaatgatgaaagattagcttatttaggagcaagaggaaaagtgattttaaatgcttgccctggtagtggaaaaacaacgaccattgcaaagaagattttagatttagaaaatcagaatgagattggaggtcattcaggtgtagcttgtttatcgttcacaaactctgctaaagacgaaattaatgaagcgtatagaaaattgagtgggaaatcgcttcaatttcctaatcacgtatcaacaattgatagtttcatcaacaaattcattacgctgccattttacaatttgcttaatcgtgattttaaccgaccaaagatacttgaccagacaaatatcttggatgacatgtggaaaacaacttatattgaccgaaatgggaaaatgcaagatggcttaagaagaccattgaacgatccagaatacaaggcaaaaaacaacagaagtatatttcatctttacccaccaagcgaaataagaattgagcctaatggtgcattttcaatcaatgggaatcaaccatctgctgataaagtcgacagggcaaattttaacaagtattgtcagcttattaaaaacaagcaatttacaaaaggacttatatcaacaggtgattctgcatatattgcacttcatttactaaagaataatccaaagataagtaaatggcttagcttgagatttccatttataatcatagatgaggctcaagataattcgataatgcaacacgcaatattcgaagaactgacaaatcaaggcttaaacaatattgaactaattggagacccttatcaaagtttatatgaatggagagatgcaaatccaactgaatttttaagaaagtatgatgaagatgaaacgtggcagtcgtttgatttaacagataatagacgttctccgcaaaatatcgttgatgttttctcaaaagtgagaaggcaggaagattcaaaaatcaatagtgttggttgtcaagaattagaagaatccattgttgtctacaaatatacagccaataatcatcaattgataataaaacattacgatgatttttgctcaaaaaacaaatatcttaacagctgtattgttgtgcgagggaattcattgaaagatttgctgttaggaaaaaaatcagaacaaagaccttggaatgttgagttgccgaaaagtataatttatgctaaaaatttatatttgagcggtgatataaaaaatgcaatcaaagaaatacgaacaatttgtattcctttaattcattctgataatactgactaccacagtttaaaagagattgaaaaagaaaaaagtatagacccttcattcaattctctaatgataactattcttgctgaattacctagcttttctttatctgttagtgattggacaataaaaactcaagtatttttaaaagaacaactgaatttaaattacgatgtagacttcaacttaaggaatagaaaatcaaaatatttagaaatgactacattggatgaaagtgttgaaatccatttcaagaaatcatattcagcctttaatattcccataacaacaatacatcaagtaaaaggtcagacattagattcaatacttgttttctttaatgaaaagaaacataaagacaatatcacttttgaaaatatttcaaatactgaaaatatatttccagatgaaacaaaaagattaatctatgttgctttatctagaccaaaacatttattagcaatggcgtttccagaatcaataacaaacggagagcttataaataaatttggtgaaaaaattagaattatagaagaaaatgaattatga

SEQ ID NO: 74656 - DNA, 1710 bp, Vibrio nigripulchritudo Wn13
atgtacattcgtacggtcgaaattgaaaactaccgagccttcaaaaactttgagattaaactttcaccgcttagcctaattatcggtgaaaatgaagcaggtaaaaccaaccttttcagtgcacttaccctgccacttaacagcaacgatattagcttcaataagaaacgcctctcggtatcagatatcaatcgggaagcaatcaaatacttttaccaagctatcatcgacgacaaggaagatgatgaagtcaaggctttgattccaaaggttcgaattgagatcgagttcgctgagccaaagaacataatcgaagaaggcgttgttggaaagtggataatcggagaagaagccgacgatagctataagattccctatgacttcagacccaaagatgcagatctctttgtgaagacagccaaggatctactcgaaggcatcgaggacattaaagatactcgttggttcaaccttccaattgagctgtacgactacgacgtaacgcaaagcaataatgggttaaaggtcagctattcagatctaagactgatatctatcaactcgattaacgccgaacgtgacgactttgcagagagtaacactcagaaatcaaacgacattctgactaagatgttgatctcgtcgcttgtggatactgacaaggccaaaatcaatagcgcgtacacgtcattctttgacgccatagaaaacaccgaaactttcgagaagatcgttactcctgacccagactttgaaaacttcttcgacgagattgtagataagcttgaatgtattcccaacttaccaaacttaaaaagcatcctgtccaatatcaccctgaagtctggtgaaagctacttatatcagcgtggccttgggtatcgtaacctcgtatacatctacctgttatttgagttttttaaaggcaacaagaatgctctcaacctttgttgcatcgaagaacctgaagcgcatctgagcgtgaacaacctgcgcttcgctaccgatttcatatataaaagtacgcaaaaaggtggatcatctctacaaactcttattagctcccacagcccacaggttatcaataaacttgagctaactaacgtgatcgtattatctggaaatgatgccatccacctaactgatagtaagaagcaactcacgaactaccttcgtaaaagaccaaacttcgacatactaaaactgctgttgagcaacaagaccgtgcttgttgaaggtaccaccgaagagatgctcatcaacgccatcctctatcgtgacaacaaaaacgttagcagccttgaagtaatatctatcgagcagactggctttacgacattcatggacgtttggctgcaagtcaacaaaggcaatactaagaagaagctgagtatcattcgagatcacgatgagaatgaaactaccaagaaaaaacatgaaaaatacgatatagacaacgacaatattcgagtaagaaccaccaccaaatatacgctcgaagatgatcttgcagaggctgatggaaatcttgaccgcttaaacacactgttcaaaaagaagtacaaaacctctgacgaaatgaccaagttcctgaagaaaagtaaagccgaaagaatgcttaagattgccgactcgattttagacgaaaagaacgaagatccgatcaagctacccaaacacattcaagaagctttggatttcatgaaatga

SEQ ID NO: 74657 - DNA, 1482 bp, Vibrio nigripulchritudo Wn13
atgattgaagttcaaatagcaggagcaggagcaggtgcaggtaagacttatggtctagcgaagaagatcatcgcacactacgacctaaagtcgcataaaaagatttttgccatcacttatactaacagtgccgcgaagaacatctcacaagcgattatcaaacacctaggatacctgccagaaaatatcatggtttgcacagttcatacgtttctattgaatgagatcatttacccttactctccattcgtactaaatgagaagcatactacctcctcacgctgcaaaacgttctcaaactttcctcctgggaagactgaagaacaaaagaaacgagaaacggcgagtaccatcagtagactaaagaagagtggtgttatacacgttgacgaaacctatgccgctgcatggagagttgtcgatgaaaactactcaaaacacagcagccagaagaaaaagtctaaagttaggaaagttcacaatatcctaagtagcgctattgataagattttcctcgacgaagctcaggatcttgatgaaactgctctcaaagcctttcaaaaaatcggtgagctttcagttgacatctacatggtgggcgaccctaaacaagcaatagattatccaaaatctttcaaaggctggctagctgcgaacaaagccaacgaaaaagttaaagtgcttccgaatataaagacttctcgtagggttcctcagagaattcttgatatctcaaataacttctgccccagaggtcaagcgcaaactagcttgtctgaagttgaaggacacctaacatacataacttctgaagatgagcattacgaccaaattctctgtcatcatattaagaatggaagcttagttagcatattcagaaaagaaggtaattactcaaccaagaaagcgggatctctccccgagtttgacccagaggtagaagggctacttacagtgaagtttcctgaatacgaagaaggtgtggtcatatactcattgcagcgctattttgcatccttgttatccaacaatgacaataagacatcaatacgtatatttcttaataagctagagattccgtacgaaaaagaactattcaagaagctttgccgatcagcagaacaatacgattcatccaaagataattcagccaagtacgcaatcagtagcatccaaataaccaagggcttagagtctaaggtgtgtgttttgatcttaactccagcgattttcaagtacttaatgcaagatggcgttgaaaaattcaacaaaacttggaatatggtctatgtcgcgttgactcgtgctcaatctgaactagttgttgctgtagatatggatttacttggtaaaaaatataagcatgatgatattgttgagggtcttaaatctattgggtttgaagagctaaacccaaatcatccaaaccacaaaaccgaagagaaattcggaagcataatatcgaccaaagataattactga

SEQ ID NO: 74658 - DNA, 1956 bp, Clostridium pasteurianum DSM 525 = ATCC 6013; identical to SEQ ID NO: 73050

SEQ ID NO: 74659 - DNA, 2013 bp, Clostridium pasteurianum DSM 525 = ATCC 6013; identical to SEQ ID NO: 73051

SEQ ID NO: 74660 - DNA, 2112 bp, Enterobacter cloacae ECNIH2
atgtatatcaataaattagctattagaaactataaaaactttcgaagctcaaatttctactttgttaaaggctcagtgaatacaattatcggtgaaaatgcttcgggaaaaacaaatttatttaatgcgatgagattaattctagatgattctctcccaatgaattctaggattttatctaatgaggacttctaccgtggattatccgaaccctttggtcattggatcataattacgctatattttgatgatttaagtgagtcggaggaggaacaggtccttgccaactatacagtaaatgatggtaatgataagtctataaaggaaggtaattatacttttatatatcgacctaaatttcatattcgacaaaagctgtatgagttaacattagaagatgacaatgtggaagcaagatccgcttcttttactgaatttgcatctaaccatattatttctaaagaaacatatgaagcagtagcttttgttagaacaaaggttgatttgaataatgacgaaatttataaacaagtagttggtgattttgatagttactccttttcaaatcctaatgatgatgatgctactgtattaggggttaagaagccaccttactttgccttaggcagcgaagtcgcttgcacttatgtcaaagcacttaggaatgtagttgcagatcttaaatattataaaacgaatccattgtataaattacttactttaaaaagtaaacaaattgatgatagaagagatattgtagaaaatgttaaagagatcaatggtaaaatttcagctatacctgaaattgagagattgagtaataagatatctgcttcattacttaatacagtaggctcgacttattcccctaaaatattagtatcctcacaacttccagaagatttcacagaattaattcaatcacttggcttagtggttgaagattctctggattacaatggctcaggaaagattgatgatctgagtcttggtggagcaaacttaatttatcttgctttaaagttatatgaatacgaagaaataagggatagtgaagagcatattactcacttcttgttaattgaagagcccgaagcacatattcataatcatatccaaaaaacccttttcgataacttcaattttaaaaatacgcaagtgtttgtttctacacattcaacacaaattagctctgtatcaaaaatatcatcaatgaatatattatcacgccaaaatggattcactgatgtatatcatccatcgtttggtttgacgccgaaagaaatttcttccgtagagcgatatcttgatgcaattcgtagtgaccttttgtttgctaaaagtgtcattctggtagaaggcgatgcagaacttattttaataccagcaatggtaaaagaaacgttaggaattagtttagatgagttgggtataagtcttatcaaagtagatggcactgtttttaaacatatttctaatcttttccatgaaaaacggttgaaaagaaaatgtgcaattctcacggatcttgattcggcctatgtaaaagtagctgataatatttttgatgcggattttgtcgaatctctggtagatgccgaagatgatggattacgaagaaaagaagagttagataaatatattgaaggtaatgagtttataactgttcattacgcagaaaatactttcgaaactgagcttgttcgctacgatgaaaacaataacttgtttatagaagttatgaaaaccgagtataaaaaagaagcgtattttaaaaaggctgaatcagacgtaaattcatctgatctcagagttcggtataaaagagtattaaagtttgcaaagaaaatagggaagggatggttagctactgaaatggtagaacatcttagtgttgataatcgtgttcctgattatattttacaggccattcaatttgttcttcgggatagaaatgttgagcctatatatcaaaaaatgcttgactacaatatgtctttaatgggggttaaagcatttgactgtataaatgccgaaaaagatttttctagtaaaatgatagaatataagaaacacttcaatgacagttttgtaagattgttggagttatag

SEQ ID NO: 74661 - DNA, 1752 bp, Enterobacter cloacae ECNIH2; identical to SEQ ID NO: 74091

SEQ ID NO: 74662 - DNA, 1833 bp, Bacteroides fragilis
atgcaaaagatactgattgacgaaattagaatagatggattccgtggattgaaagattttaaaatgagcctttcagaaactacggtactgaccggtatgaataatgtcgggaaaacctctgttttaaaagctctacagctgttgtttggaaatagctcgttcctttcaacagaagatttacacattgacaagaacggcaaatcaaattgtatcattgttgatgccaaaatagtagcaattgataatgctggaaaacgtatcccaaatttctcagatgtatgggaaattgcatttggtgcggataatataaaaatggatgctgaagaacacgcctatgtgcctttgcgtgttaaatacacttttcaaacacttcagaattcatttaatagggatatgcaaatcttgaatgaatgggactctgcaggcatcgcttggcaagatttgaaaggtaaaaaatccactgttaagggagattattttcagttccactatttggatgctaaacgggatattcaggatgatttaaaagccagaacctcttatttaggtaaaatgcttggtgatgtagttagcaattatgacccgaaagatgttgctgaattagaacaaaaaataagttctttaaatgcagaagccatagaaaagagtgatgtgcttaaaaatattcaggaatcactaaaagggattgacgctacaatggactcttcgggcaaggtctatgtttcaccttttgctaagaaattgcgagatttgaacaaaagcttgacgattcattatggaacggaggatagtagttttacaatggactatcatggcatgggaactaggagttggtcttccatgttgtcgtttcgggcttttgtaaagcaaatgtgcgatagcaagaacccggaagacgaggcttttttgccgattatagctatagaagaacctgaagcgcatttgcatccgaatgcacagaagcaactctacaaacaaatgaacgaaatgccgggcattaaaataatctcaacacattctccgtatgtggctgcatgtgcggaattgtcagagctgagaggtatgtataaagccgcagagaagactatttgtggaagtttgcccgttgcagaactaataccagaggaacaaagaaaaatcagacaagccgtattgacgagcaatggcgaactgttgtttgccaaaggtattgtgttgggagaaggtgaaacagaagtacaagctttacctattttctgccagcaacattggggattgactcccgttgagtccggtctgtcgtttgtcgatgcaaaggggtgtggtaattattatccgtttgtcgtccttgctgatgcgttcaaaataccttggtacattttctcggatggtgaagcaaaagcccaaaaagaactcaaaaaacttttggaaagaatttataatgaagataaggaactggcagaacagaagaatattttcctcattcccgatgaaaaggattttgaaggaatgctccttgacgatgggtataaggatgaaatagaaaaagctatagaacaattgaaaggagaaggctatattgataaatttattagagaaaataatcataagcctaagaaacgagaaaaaacttctaaagtgtgtgaaagttgtcatcagaatatttttgttgatatagaacgaatatatgataatgaagatggccgactgacagctttggatgatataatggagaaaaacaaggcccagttaggtccggtgttggcaaattgcataattgaaagcggaaaaacattacctccattggtagttaaactatttgatggaataaaaaaggacatatgccatgtgtaa

SEQ ID NO: 74663 - DNA, 1857 bp, Bacteroides fragilis
atgtgtaagataaagttatcttctaaacaacaagaaattgcatcattgaaagatggcgcaattttagtacgtgcaagtgccggtagtggcaagacaagagtacttgttgagcgtataaagatgttggctggtatgactaaacgtaaggttctggcgattacgttcaccaacaaagcttgtgaggagattagaacaagacttgcggaagtggatgaaaatctgctggaacatgtttttgttgcaactttccatggtctgtgtgagtcaatcattgaaagccatatcgccgctacaagatttgtgacaatgccgcaaatctttgcagatgacgacagaaaaaaaattttggaagaaacaattacagaaactccatcattgagccagtggtatagggggctgaatgataaagaacgtagggaaactctttatcgggcattggataatatcagtcttataaaacggtctgtgattttagatgatgaactgtctaaggttattaaagatggacagatgcgtaatctatatttaagttatagagagcagatggattcgctaaacgcaattgattttgatgacttgttgcttaatgcttaccaattactgatacataacccaagaattgcagacttatatcgaagaagttttacatacatttgtgtggacgaggcacaggatttaaacaaggctcaatacatggttcttcgtgcgattactggtagcgagcataagaatgtaatgctggttggcgacaccaaacaatccatatatgcctttaatggctcaagcagtaaatatatggatgattggtttgtgaatgactacaccccgaccatatataacctaaatgagaattatcgaagtgctaaggcgattttggattatgcacaaaaggtagtgcatgatgacaccttagatgtaaccttaccttatacgggcgtttgtaaggaatatgcttatgatacaccatgtgaggaagcgcaagaagtagtaagtggtataaaatcattggttggtactgaaatagaaggttatgacgggaaattgagctattctgatattgctgtacttgctagaaataaattcgttcttggaaagattgaagagcaattaaagagtagtaacttgccatatcattataaaactacgggagcaggtctggaatttgcatccactgctgctaaagcctttgatttggctatggtagtacgaaccaatccctatgatagactgcatcttgatatgttgcagtctatagtaggcgtgagccattgcaaatcattagaacaagtcgtagaaagtattagcgatgcattcttgaaagaagtcgtgcagcaagcctcactattggaagatgatggtagtaatatgtatcaaaccatcaaatctgtattgaatactttaaaagcctctaatgcttcggaatttaaatcaacagatgaagctttggctgtttttgatgaatttgaattattaaaacatcattggagctcttatgctaagagtgtaacaaactattctttgtctgcttttcgtaatgcaatgtcgttggggcaaacttcggttgcttctttggatgtagaaggggttacattgagtacggttcacactatgaaaggtcaacaagctgtagtagtattccttgtgggtatggatgagggtacattccccgattaccgtgctataaaaaaagggaacaatagcattgaaatgcaacaagagaaaaataacttatatgttgcaattactagagctcaaagacatctttatatttgttaccctcaaaaaagaaagatgccttggggcgattggtctccaagaaaaagatctagtttgcttcccaaacaaacgattgtataa

SEQ ID NO: 74664 - DNA, 1584 bp, Listeria monocytogenes; identical to SEQ ID NO: 73566

SEQ ID NO: 74665 - DNA, 2142 bp, Listeria monocytogenes
attagtaatacaaacaattttgcttcagatgttgtgaggatggaagatgaagatgctaatatttttcatcatttagtaagtttaaatggaggtaacgaatttaacaaagagcaagtaaatgctattcgatttgatatgagaacacatcttaggattatcgctggtgctggaagtggaaaaacgcaaacaatttgtgcaaaggcagcttatttagttttgaaagaaaaaattcaagaacgaaatatagtgatgtgcacattctctaaaaaagcaagccaagaaatgaaggaacgtgtcaacgagtttcttggtggcaatagtcgaatagaagtattgactttccatggatggtttcaaaaagagtacaatgtacttattaaaaaatatccgtatctagaaaagtatgggatagcgggagaggtacccggaaaaggctctggaaaagatagccatgataggattttaatgaatttaattaagcagtatcatttatataattttgataaatatgaagaaaaaccaattaatgaacgacttagttattggcgaaatatgggatataatgatgaggaaattgttgcttttatagcaagatattttgatgacaaagaaatattaaaggatcaactacttagtgaagttttttcagagatgttaaaagaattggaacgaattaagagaagagagaaagtcattaattttgatgatatgttaattaatttaaagtgtgtattggagaacgactcaaatgctctttctttaatacaaactcgatatcaatatatatttattgatgagtttcaggatatcaatcccttgcaaaaacagataattgaacttatttgtccaccagattacgagaagagtgttatcaattctactaaattaattattgtaggagacgatgatcaaagtatttatttcttccgtggtgctgaaccacgttacattaaagaatttgatagacaatacaggcaaacgtcaatagagttaatgactaactatcgttctattgctcctgtggtacatataggaaatactctgatatcaaacaatcaacatgatagaataaagaagtctatgatacctcacaaactaaatgaaggtgattgttacgcaaaagtatttcaaaatgaacagctagaagctaattggattgcaatgcggatattaagcttgtcttcagaagagaaaccattccaagatcaaattggtaaaccgaattatacggaaacaatcgtattataccctaataaaaatcaattaaaatctatgattattgctttacaggaaaaaggaattccctttgtcacaaaatcggatgatgatttacttggtatatttggtattaatttttttaaacgatcattcaatctattaatggatattattgatgcagaaacgatagaaataaaaaagcatttatacaagcaactcataaaaaatatttgtttatattattatataccatttgcaaaaagtacagattttgtctcagatgagactaattatacttcggaaaagttaactgattttatatgcaaagaaaagaaagttagtaaaaaagagatggcacttattaaatccatattccgagatattaatgaatttataaaaaccgaagaattgaatattaaagtttttgttaattggcttgtagaaactccgaaagtaaagaaacaattaattgatgaagagaaagattggttgcttaaagaggttagcaatgttaaaacgctaaaagagttaatacttaaatataaagcagcgagaaccttaaaagaagagatggctgacaaattaagagaatatgataataataactataatgcagtgtatctattaacaattcattcaagtaagggattgggatataaaaatgtttttgtaaaaggtatttataaaaactcactaccagactatcgttcagtggataaagaaagtattgaacttcagccgttaattgaacaagcatctccaccaacaacaatggaagaacaaagaagattaatgtatgtagcgctaacccgagcaaaagaaaatctttatgtaacttaccctagagaaataaatgataagcctacacttgtgtcaccatttataaaagaatctaatattatgtttagtgaagaaaaaatatag

SEQ ID NO: 74666 - DNA, 1584 bp, Listeria monocytogenes; identical to SEQ ID NO: 73566

SEQ ID NO: 74667 - DNA, 2142 bp, Listeria monocytogenes; identical to SEQ ID NO: 74665

SEQ ID NO: 74668 - DNA, 1584 bp, Listeria monocytogenes; identical to SEQ ID NO: 73566

SEQ ID NO: 74669 - DNA, 2142 bp, Listeria monocytogenes; identical to SEQ ID NO: 74665

SEQ ID NO: 74670 - DNA, 1584 bp, Listeria monocytogenes; identical to SEQ ID NO: 73566

SEQ ID NO: 74671 - DNA, 2142 bp, Listeria monocytogenes; identical to SEQ ID NO: 74665

SEQ ID NO: 74672 - DNA, 1584 bp, Listeria monocytogenes; identical to SEQ ID NO: 73566

SEQ ID NO: 74673 - DNA, 2142 bp, Listeria monocytogenes; identical to SEQ ID NO: 74665

SEQ ID NO: 74674 - DNA, 1584 bp, Listeria monocytogenes; identical to SEQ ID NO: 73566

SEQ ID NO: 74675 - DNA, 2142 bp, Listeria monocytogenes; identical to SEQ ID NO: 74665

SEQ ID NO: 74676 - DNA, 1584 bp, Listeria monocytogenes; identical to SEQ ID NO: 73566

SEQ ID NO: 74677 - DNA, 2142 bp, Listeria monocytogenes; identical to SEQ ID NO: 74665

SEQ ID NO: 74678 - DNA, 1584 bp, Listeria monocytogenes; identical to SEQ ID NO: 73566

SEQ ID NO: 74679 - DNA, 2142 bp, Listeria monocytogenes; identical to SEQ ID NO: 74665

SEQ ID NO: 74680 - DNA, 1584 bp, Listeria monocytogenes; identical to SEQ ID NO: 73566

SEQ ID NO: 74681 - DNA, 2142 bp, Listeria monocytogenes; identical to SEQ ID NO: 74665

SEQ ID NO: 74682 - DNA, 1584 bp, Listeria monocytogenes; identical to SEQ ID NO: 73566

SEQ ID NO: 74683 - DNA, 2142 bp, Listeria monocytogenes; identical to SEQ ID NO: 74665

SEQ ID NO: 74684 - DNA, 1584 bp, Listeria monocytogenes; identical to SEQ ID NO: 73566

SEQ ID NO: 74685 - DNA, 694 bp, Listeria monocytogenes
aggtttatattattatataccatttgcaaaaagtacagattttgtctcagatgagactaattatacttcggaaaagttaactgattttatatgcaaagaaaagaaagttagtaaaaaagagatggcacttattaaatccatattccgagatattaatgaatttataaaaaccgaagaattgaatattaaagtttttgttaattggcttgtagaaactccgaaagtaaagaaacaattaattgatgaagagaaagattggttgcttaaagaggttagcaatgttaaaacgctaaaagagttaatacttaaatataaagcagcgagaaccttaaaagaagagatggctgacaaattaagagaatatgataataataactataatgcagtgtatctattaacaattcattcaagtaagggattgggatataaaaatgtttttgtaaaaggtatttataaaaactcactaccagactatcgttcagtggataaagaaagtattgaacttcagccgttaattgaacaagcatctccaccaacaacaatggaagaacaaagaagattaatgtatgtagcgctaacccgagcaaaagaaaatctttatgtaacttaccctagagaaataaatgataagcctacacttgtgtcaccatttataaaagaatctaatattatgtttagtgaagaaaaaatatag

SEQ ID NO: 74686 - DNA, 1584 bp, Listeria monocytogenes; identical to SEQ ID NO: 73566

SEQ ID NO: 74687 - DNA, 2142 bp, Listeria monocytogenes; identical to SEQ ID NO: 74665

SEQ ID NO: 74688 - DNA, 1584 bp, Listeria monocytogenes; identical to SEQ ID NO: 73566

SEQ ID NO: 74689 - DNA, 2142 bp, Listeria monocytogenes; identical to SEQ ID NO: 74665

SEQ ID NO: 74690 - DNA, 1584 bp, Listeria monocytogenes; identical to SEQ ID NO: 73566

SEQ ID NO: 74691 - DNA, 723 bp, Listeria monocytogenes
catttatacaagcaactcataaaaaatatttgtttatattattatataccatttgcaaaaagtacagattttgtctcagatgagactaattatacttcggaaaagttaactgattttatatgcaaagaaaagaaagttagtaaaaaagagatggcacttattaaatccatattccgagatattaatgaatttataaaaaccgaagaattgaatattaaagtttttgttaattggcttgtagaaactccgaaagtaaagaaacaattaattgatgaagagaaagattggttgcttaaagaggttagcaatgttaaaacgctaaaagagttaatacttaaatataaagcagcgagaaccttaaaagaagagatggctgacaaattaagagaatatgataataataactataatgcagtgtatctattaacaattcattcaagtaagggattgggatataaaaatgtttttgtaaaaggtatttataaaaactcactaccagactatcgttcagtggataaagaaagtattgaacttcagccgttaattgaacaagcatctccaccaacaacaatggaagaacaaagaagattaatgtatgtagcgctaacccgagcaaaagaaaatctttatgtaacttaccctagagaaataaatgataagcctacacttgtgtcaccatttataaaagaatctaatattatgtttagtgaagaaaaaatatag

SEQ ID NO: 74692 - DNA, 1584 bp, Listeria monocytogenes; identical to SEQ ID NO: 73566

SEQ ID NO: 74693 - DNA, 2142 bp, Listeria monocytogenes; identical to SEQ ID NO: 74665

SEQ ID NO: 74694 - DNA, 1584 bp, Listeria monocytogenes; identical to SEQ ID NO: 73566

SEQ ID NO: 74695 - DNA, 2142 bp, Listeria monocytogenes; identical to SEQ ID NO: 74665

SEQ ID NO: 74696 - DNA, 1584 bp, Listeria monocytogenes; identical to SEQ ID NO: 73566

SEQ ID NO: 74697 - DNA, 684 bp, Listeria monocytogenes
gattatataccatttgcaaaaagtacagattttgtctcagatgagactaattatacttcggaaaagttaactgattttatatgcaaagaaaagaaagttagtaaaaaagagatggcacttattaaatccatattccgagatattaatgaatttataaaaaccgaagaattgaatattaaagtttttgttaattggcttgtagaaactccgaaagtaaagaaacaattaattgatgaagagaaagattggttgcttaaagaggttagcaatgttaaaacgctaaaagagttaatacttaaatataaagcagcgagaaccttaaaagaagagatggctgacaaattaagagaatatgataataataactataatgcagtgtatctattaacaattcattcaagtaagggattgggatataaaaatgtttttgtaaaaggtatttataaaaactcactaccagactatcgttcagtggataaagaaagtattgaacttcagccgttaattgaacaagcatctccaccaacaacaatggaagaacaaagaagattaatgtatgtagcgctaacccgagcaaaagaaaatctttatgtaacttaccctagagaaataaatgataagcctacacttgtgtcaccatttataaaagaatctaatattatgtttagtgaagaaaaaatatag

SEQ ID NO: 74698 - DNA, 1584 bp, Listeria monocytogenes; identical to SEQ ID NO: 73566

SEQ ID NO: 74699 - DNA, 2142 bp, Listeria monocytogenes; identical to SEQ ID NO: 74665

SEQ ID NO: 74700 - DNA, 1584 bp, Listeria monocytogenes; identical to SEQ ID NO: 73566

SEQ ID NO: 74701 - DNA, 2142 bp, Listeria monocytogenes; identical to SEQ ID NO: 74665

SEQ ID NO: 74702 - DNA, 1584 bp, Listeria monocytogenes; identical to SEQ ID NO: 73566

SEQ ID NO: 74703 - DNA, 2142 bp, Listeria monocytogenes; identical to SEQ ID NO: 74665

SEQ ID NO: 74704 - DNA, 1584 bp, Listeria monocytogenes; identical to SEQ ID NO: 73566

SEQ ID NO: 74705 - DNA, 2142 bp, Listeria monocytogenes; identical to SEQ ID NO: 74665

SEQ ID NO: 74706 - DNA, 1584 bp, Listeria monocytogenes; identical to SEQ ID NO: 73566

SEQ ID NO: 74707 - DNA, 2142 bp, Listeria monocytogenes; identical to SEQ ID NO: 74665

SEQ ID NO: 74708 - DNA, 1584 bp, Listeria monocytogenes; identical to SEQ ID NO: 73566

SEQ ID NO: 74709 - DNA, 2142 bp, Listeria monocytogenes; identical to SEQ ID NO: 74665

SEQ ID NO: 74710 - DNA, 1584 bp, Listeria monocytogenes; identical to SEQ ID NO: 73566

SEQ ID NO: 74711 - DNA, 2142 bp, Listeria monocytogenes; identical to SEQ ID NO: 74665

SEQ ID NO: 74712 - DNA, 1584 bp, Listeria monocytogenes; identical to SEQ ID NO: 73566

SEQ ID NO: 74713 - DNA, 2142 bp, Listeria monocytogenes; identical to SEQ ID NO: 74665

SEQ ID NO: 74714 - DNA, 1584 bp, Listeria monocytogenes; identical to SEQ ID NO: 73566

SEQ ID NO: 74715 - DNA, 2142 bp, Listeria monocytogenes; identical to SEQ ID NO: 74665

SEQ ID NO: 74716 - DNA, 1584 bp, Listeria monocytogenes; identical to SEQ ID NO: 73566

SEQ ID NO: 74717 - DNA, 2142 bp, Listeria monocytogenes; identical to SEQ ID NO: 74665

SEQ ID NO: 74718 - DNA, 1584 bp, Listeria monocytogenes; identical to SEQ ID NO: 73566

SEQ ID NO: 74719 - DNA, 2142 bp, Listeria monocytogenes; identical to SEQ ID NO: 74665

SEQ ID NO: 74720 - DNA, 1584 bp, Listeria monocytogenes; identical to SEQ ID NO: 73566

SEQ ID NO: 74721 - DNA, 2142 bp, Listeria monocytogenes; identical to SEQ ID NO: 74665

SEQ ID NO: 74722 - DNA, 1584 bp, Listeria monocytogenes; identical to SEQ ID NO: 73566

SEQ ID NO: 74723 - DNA, 2142 bp, Listeria monocytogenes; identical to SEQ ID NO: 74665

SEQ ID NO: 74724 - DNA, 1584 bp, Listeria monocytogenes; identical to SEQ ID NO: 73566

SEQ ID NO: 74725 - DNA, 2142 bp, Listeria monocytogenes; identical to SEQ ID NO: 74665

SEQ ID NO: 74726 - DNA, 1584 bp, Listeria monocytogenes; identical to SEQ ID NO: 73566

SEQ ID NO: 74727 - DNA, 2142 bp, Listeria monocytogenes; identical to SEQ ID NO: 74665

SEQ ID NO: 74728 - DNA, 1584 bp, Listeria monocytogenes; identical to SEQ ID NO: 73566

SEQ ID NO: 74729 - DNA, 2142 bp, Listeria monocytogenes; identical to SEQ ID NO: 74665

SEQ ID NO: 74730 - DNA, 1584 bp, Listeria monocytogenes; identical to SEQ ID NO: 73566

SEQ ID NO: 74731 - DNA, 2142 bp, Listeria monocytogenes; identical to SEQ ID NO: 74665

SEQ ID NO: 74732 - DNA, 1584 bp, Listeria monocytogenes; identical to SEQ ID NO: 73566

SEQ ID NO: 74733 - DNA, 2142 bp, Listeria monocytogenes; identical to SEQ ID NO: 74665

SEQ ID NO: 74734 - DNA, 1584 bp, Listeria monocytogenes; identical to SEQ ID NO: 73566

SEQ ID NO: 74735 - DNA, 2142 bp, Listeria monocytogenes; identical to SEQ ID NO: 74665

SEQ ID NO: 74736 - DNA, 1584 bp, Listeria monocytogenes; identical to SEQ ID NO: 73566

SEQ ID NO: 74737 - DNA, 2142 bp, Listeria monocytogenes; identical to SEQ ID NO: 74665

SEQ ID NO: 74738 - DNA, 1584 bp, Listeria monocytogenes; identical to SEQ ID NO: 73566

SEQ ID NO: 74739 - DNA, 2142 bp, Listeria monocytogenes; identical to SEQ ID NO: 74665

SEQ ID NO: 74740 - DNA, 1584 bp, Listeria monocytogenes; identical to SEQ ID NO: 73566

SEQ ID NO: 74741 - DNA, 2142 bp, Listeria monocytogenes; identical to SEQ ID NO: 74665

SEQ ID NO: 74742 - DNA, 1584 bp, Listeria monocytogenes; identical to SEQ ID NO: 73566

SEQ ID NO: 74743 - DNA, 2142 bp, Listeria monocytogenes; identical to SEQ ID NO: 74665

SEQ ID NO: 74744 - DNA, 1584 bp, Listeria monocytogenes; identical to SEQ ID NO: 73566

SEQ ID NO: 74745 - DNA, 2142 bp, Listeria monocytogenes; identical to SEQ ID NO: 74665

SEQ ID NO: 74746 - DNA, 1584 bp, Listeria monocytogenes; identical to SEQ ID NO: 73566

SEQ ID NO: 74747 - DNA, 2142 bp, Listeria monocytogenes; identical to SEQ ID NO: 74665

SEQ ID NO: 74748 - DNA, 1584 bp, Listeria monocytogenes; identical to SEQ ID NO: 73566

SEQ ID NO: 74749 - DNA, 2142 bp, Listeria monocytogenes; identical to SEQ ID NO: 74665

SEQ ID NO: 74750 - DNA, 1584 bp, Listeria monocytogenes; identical to SEQ ID NO: 73566

SEQ ID NO: 74751 - DNA, 2142 bp, Listeria monocytogenes; identical to SEQ ID NO: 74665

SEQ ID NO: 74752 - DNA, 1584 bp, Listeria monocytogenes; identical to SEQ ID NO: 73566

SEQ ID NO: 74753 - DNA, 2142 bp, Listeria monocytogenes; identical to SEQ ID NO: 74665

SEQ ID NO: 74754 - DNA, 1584 bp, Listeria monocytogenes; identical to SEQ ID NO: 73566

SEQ ID NO: 74755 - DNA, 2142 bp, Listeria monocytogenes; identical to SEQ ID NO: 74665

SEQ ID NO: 74756 - DNA, 1584 bp, Listeria monocytogenes; identical to SEQ ID NO: 73566

SEQ ID NO: 74757 - DNA, 2142 bp, Listeria monocytogenes; identical to SEQ ID NO: 74665

SEQ ID NO: 74758 - DNA, 1584 bp, Listeria monocytogenes; identical to SEQ ID NO: 73566

SEQ ID NO: 74759 - DNA, 2142 bp, Listeria monocytogenes; identical to SEQ ID NO: 74665

SEQ ID NO: 74760 - DNA, 1584 bp, Listeria monocytogenes; identical to SEQ ID NO: 73566

SEQ ID NO: 74761 - DNA, 2142 bp, Listeria monocytogenes; identical to SEQ ID NO: 74665

SEQ ID NO: 74762 - DNA, 1584 bp, Listeria monocytogenes; identical to SEQ ID NO: 73566

SEQ ID NO: 74763 - DNA, 2142 bp, Listeria monocytogenes; identical to SEQ ID NO: 74665

SEQ ID NO: 74764 - DNA, 1584 bp, Listeria monocytogenes; identical to SEQ ID NO: 73566

SEQ ID NO: 74765 - DNA, 2142 bp, Listeria monocytogenes; identical to SEQ ID NO: 74665

SEQ ID NO: 74766 - DNA, 1584 bp, Listeria monocytogenes; identical to SEQ ID NO: 73566

SEQ ID NO: 74767 - DNA, 2142 bp, Listeria monocytogenes; identical to SEQ ID NO: 74665

SEQ ID NO: 74768 - DNA, 1584 bp, Listeria monocytogenes; identical to SEQ ID NO: 73566

SEQ ID NO: 74769 - DNA, 2142 bp, Listeria monocytogenes; identical to SEQ ID NO: 74665

SEQ ID NO: 74770 - DNA, 1584 bp, Listeria monocytogenes; identical to SEQ ID NO: 73566

SEQ ID NO: 74771 - DNA, 2142 bp, Listeria monocytogenes; identical to SEQ ID NO: 74665

SEQ ID NO: 74772 - DNA, 1584 bp, Listeria monocytogenes; identical to SEQ ID NO: 73566

SEQ ID NO: 74773 - DNA, 2142 bp, Listeria monocytogenes; identical to SEQ ID NO: 74665

SEQ ID NO: 74774 - DNA, 1584 bp, Listeria monocytogenes; identical to SEQ ID NO: 73566

SEQ ID NO: 74775 - DNA, 2142 bp, Listeria monocytogenes; identical to SEQ ID NO: 74665

SEQ ID NO: 74776 - DNA, 1584 bp, Listeria monocytogenes; identical to SEQ ID NO: 73566

SEQ ID NO: 74777 - DNA, 2142 bp, Listeria monocytogenes; identical to SEQ ID NO: 74665

SEQ ID NO: 74778 - DNA, 1584 bp, Listeria monocytogenes; identical to SEQ ID NO: 73566

SEQ ID NO: 74779 - DNA, 2142 bp, Listeria monocytogenes; identical to SEQ ID NO: 74665

SEQ ID NO: 74780 - DNA, 1584 bp, Listeria monocytogenes; identical to SEQ ID NO: 73566

SEQ ID NO: 74781 - DNA, 2142 bp, Listeria monocytogenes; identical to SEQ ID NO: 74665

SEQ ID NO: 74782 - DNA, 1584 bp, Listeria monocytogenes; identical to SEQ ID NO: 73566

SEQ ID NO: 74783 - DNA, 2142 bp, Listeria monocytogenes; identical to SEQ ID NO: 74665

SEQ ID NO: 74784 - DNA, 1584 bp, Listeria monocytogenes; identical to SEQ ID NO: 73566

SEQ ID NO: 74785 - DNA, 2142 bp, Listeria monocytogenes; identical to SEQ ID NO: 74665

SEQ ID NO: 74786 - DNA, 1584 bp, Listeria monocytogenes; identical to SEQ ID NO: 73566

SEQ ID NO: 74787 - DNA, 2142 bp, Listeria monocytogenes; identical to SEQ ID NO: 74665

SEQ ID NO: 74788 - DNA, 1584 bp, Listeria monocytogenes; identical to SEQ ID NO: 73566

SEQ ID NO: 74789 - DNA, 2142 bp, Listeria monocytogenes; identical to SEQ ID NO: 74665

SEQ ID NO: 74790 - DNA, 1584 bp, Listeria monocytogenes; identical to SEQ ID NO: 73566

SEQ ID NO: 74791 - DNA, 2142 bp, Listeria monocytogenes; identical to SEQ ID NO: 74665

SEQ ID NO: 74792 - DNA, 1584 bp, Listeria monocytogenes; identical to SEQ ID NO: 73566

SEQ ID NO: 74793 - DNA, 2142 bp, Listeria monocytogenes; identical to SEQ ID NO: 74665

SEQ ID NO: 74794 - DNA, 1584 bp, Listeria monocytogenes; identical to SEQ ID NO: 73566

SEQ ID NO: 74795 - DNA, 2142 bp, Listeria monocytogenes; identical to SEQ ID NO: 74665

SEQ ID NO: 74796 - DNA, 1584 bp, Listeria monocytogenes; identical to SEQ ID NO: 73566

SEQ ID NO: 74797 - DNA, 700 bp, Listeria monocytogenes
aaatatttgtttatattattatataccatttgcaaaaagtacagattttgtctcagatgagactaattatacttcggaaaagttaactgattttatatgcaaagaaaagaaagttagtaaaaaagagatggcacttattaaatccatattccgagatattaatgaatttataaaaaccgaagaattgaatattaaagtttttgttaattggcttgtagaaactccgaaagtaaagaaacaattaattgatgaagagaaagattggttgcttaaagaggttagcaatgttaaaacgctaaaagagttaatacttaaatataaagcagcgagaaccttaaaagaagagatggctgacaaattaagagaatatgataataataactataatgcagtgtatctattaacaattcattcaagtaagggattgggatataaaaatgtttttgtaaaaggtatttataaaaactcactaccagactatcgttcagtggataaagaaagtattgaacttcagccgttaattgaacaagcatctccaccaacaacaatggaagaacaaagaagattaatgtatgtagcgctaacccgagcaaaagaaaatctttatgtaacttaccctagagaaataaatgataagcctacacttgtgtcaccatttataaaagaatctaatattatgtttagtgaagaaaaaatatag

SEQ ID NO: 74798 - DNA, 1584 bp, Listeria monocytogenes; identical to SEQ ID NO: 73566

SEQ ID NO: 74799 - DNA, 2142 bp, Listeria monocytogenes; identical to SEQ ID NO: 74665

SEQ ID NO: 74800 - DNA, 1584 bp, Listeria monocytogenes; identical to SEQ ID NO: 73566

SEQ ID NO: 74801 - DNA, 2142 bp, Listeria monocytogenes; identical to SEQ ID NO: 74665

SEQ ID NO: 74802 - DNA, 1584 bp, Listeria monocytogenes; identical to SEQ ID NO: 73566

SEQ ID NO: 74803 - DNA, 2142 bp, Listeria monocytogenes; identical to SEQ ID NO: 74665

SEQ ID NO: 74804 - DNA, 1584 bp, Listeria monocytogenes; identical to SEQ ID NO: 73566

SEQ ID NO: 74805 - DNA, 2142 bp, Listeria monocytogenes; identical to SEQ ID NO: 74665

SEQ ID NO: 74806 - DNA, 1584 bp, Listeria monocytogenes; identical to SEQ ID NO: 73566

SEQ ID NO: 74807 - DNA, 2142 bp, Listeria monocytogenes; identical to SEQ ID NO: 74665

SEQ ID NO: 74808 - DNA, 1584 bp, Listeria monocytogenes; identical to SEQ ID NO: 73566

SEQ ID NO: 74809 - DNA, 2142 bp, Listeria monocytogenes; identical to SEQ ID NO: 74665

SEQ ID NO: 74810 - DNA, 1584 bp, Listeria monocytogenes; identical to SEQ ID NO: 73566

SEQ ID NO: 74811 - DNA, 2142 bp, Listeria monocytogenes; identical to SEQ ID NO: 74665

SEQ ID NO: 74812 - DNA, 1584 bp, Listeria monocytogenes; identical to SEQ ID NO: 73566

SEQ ID NO: 74813 - DNA, 2142 bp, Listeria monocytogenes; identical to SEQ ID NO: 74665

SEQ ID NO: 74814 - DNA, 1584 bp, Listeria monocytogenes; identical to SEQ ID NO: 73566

SEQ ID NO: 74815 - DNA, 2142 bp, Listeria monocytogenes; identical to SEQ ID NO: 74665

SEQ ID NO: 74816 - DNA, 1584 bp, Listeria monocytogenes; identical to SEQ ID NO: 73566

SEQ ID NO: 74817 - DNA, 2142 bp, Listeria monocytogenes; identical to SEQ ID NO: 74665

SEQ ID NO: 74818 - DNA, 1734 bp, Agrobacterium tumefaciens; identical to SEQ ID NO: 71924

SEQ ID NO: 74819 - DNA, 1743 bp, Agrobacterium tumefaciens
atgtcagccgtagaggaactctcgaaggcccaagaggaggttgtggacctgccagcggagccgttcgtcgtctcggcatgtgcaggcagcggtaagacgaaaacggctgtgcatcgcgttgcagcgatgcagaatcgattgaccgaccggatagggcgcatcctcctgttatcgttttccaacgtggcagtggaaacgttccagcgcgaatatggaatgttggtcactaacgacaaacgacggatagggcccatcgtcgaaatcgacacggtcgatggctttctcaccaaaaacctcctgagaccgcacggccatcgcgtgatgggctgcgataggtgtccattcctcgtcgatgggcgcgagccgttcttgaaacatttcactgtgtgggacggttctaaacctgcacggactgccgacctgcggatcaccatggacggaggcaagttttccttcagagtaggaaagtgggccgggacggcgatttcccgaacgcctgcagtagaggctttggaaaagctcggagcagttggagcttatacgcatgaaagtgcccggtactgggcgtaccgtctgctcaacgaagtccccttcgttctgcgagccatagcgcgtcgatattcccatatcctggtcgacgaagcgcaggatatcggaacgatccatcaggcgctccttgagaagatttcggatgccggggctgaactctcgctgattggcgacgtcaatcagggcattttcgagttcaccggagcgactggagatttccttggaaattatcatagccgagctggggtgaccgcgaaggaattgaaccgaaatttccgatcggtgccgtcgatagtaaaaatcgcaaaccagctgtccggccgaaaagatgagccggatcgagccgctcctgatgagctcagtggggcgttttacattgcagtcgatcacgacaagcgcgatgaggcgctgctgcggttcaagaagtttcttgataaaggtagtatttcgcagtcgaagggagtcgtcgtctttcgttcaagcgaagtcttcaacacttggagcgggccaggcgatccccaaggccagggcgttattaagtctttcgtggccagtgcgagatggagagaccaagccaagcgttttgaccaagctttttcacaggcgtgtgcggggatagtaggtctattggatgatggccacggagacctgctttcgctgatcaaaggacaggcggtctctcaagagttgcgcggcgttcgccgagagatttggaatttcgtgaaaaatcctgccacgggattgcccgcatcgaatctggatgcggttaaagaatggcatccccagttggtggttcgagtgaaagctctgttggggcgtttggaaaagcagtacggcttcgtttccggcgataaccttgggaaccgccttaagaaaacggcgttgccgaacggaccactggttgaggctccggaaggcgatgagcctcagaatctccaattcaggctttccactgttcacaaagttaagggcgaaagcctcgacggcgtcatgtatgtcgccagtaggagcaacattgaagaatttttggcggggacgaaaaccgaaaacggtaagatcggttacgttgcactgaccagggcgcgcaacgtctttgtgctcgcggtaccttccgacgccatcgcggcgctaaagccgctcctagatgcgactggattccaagacggggacgtctgcgcgctagccggtgcatga

SEQ ID NO: 74820 - DNA, 2217 bp, Escherichia coli
atgtttataagaaaagtcgctttagtgaactaccggaatttcaaaggggctaatttttactttgataaaggtattaacacaattattggtgaaaatgcatctgggaaaacaaatttattcagagcgataaggttgctacttgatagctcaatgccaagatatactttaaaattacaggaaggcgatttcaaccgttcaataggtgaatggcgagggcattggataataattagtgccgagtttgacgatatagcaaaagatgaagccagccaatcactatttcttcatggagccgggaatgctgaagctgagatcgtcagtcgagctacatatagtttaatatttaggccaaagtcatttattagacaaagtttatcaaaaataacttctggcgatcgttctgcacttgaagaaatacttaggtctataactattgatgattatgaaactatccttgttggtaaaagctcagttgatttaagcaacccttctgtttataaaaaaattgtaggcgattttgaaaatatagtattcccacagaaattaaatcatccagagttaggagttaagctacctaacatattaaatattccaaatgaagtttgtttgacttatatcaaggccctaagagatgttgtatctgattttcataataataaaaccaatcctctattaacacttctaaaaagaaagtctggtgagataagcactactgattttcaaccaattgctgatttggtacggaatctaaataatgaaatagaaaacttacctgacatatgtgatgtaaatagtgatattgcaacaacgattaaagacgctgtaggagatacttattctcctaaaggtatgtcaattaaatcaagtttgagcgaagagtctaatgaattatttcaatcacttaaactatttgtagctgagtcctcagatggctatgaaggagcaattcatgagatgagtcttgggggagcaaatttactatatctaacgttaaaattattagaatttaaatatcagcacgcgaatcaatccattgctaattttctattaatagaagaacctgaagcacacatccacacacatattcaaaaatcactattcgaaaatataaaatatcataatacacaaataatttattctacgcattcttcaaacatctctgagattagcaacataaaaaatatgaacataattggcttcgtaaataataattgcgaagttttccaaccatcgaaatcattgaatgatgtacaatgtgagtttattcaaaggtatttggatgcaattagaagcaatttattattcgctcgaagtgttattttagttgaaggggatgcagaggaattattgattccaacattaatcaagaaggtcattggactaagcctggatgaaattggaataagcttaatcaatataagaagcactggatttgaaaacgtagcgttgttgtttagtgatgaaaggataaaaaagaaatgtagtatagttacagatcttgatgaggctttttttgatattactattcctgagggtgccgataatgacaatgatgaaataaaagttaaaaagaaggcagccgcatctcaaaaatcgggagctgaacgaaaagtaagattacaaaacttcagtaataacaacgattgggttgaagtgttcttcgcagaacacacatttgaagttgacttcatcaaatcaggcaacaaatattatttggacaagatcgtcgacgatgtctataagcaagcagccacaattgaaatcgccaaaaatgaattaaactcatcggatataagcatctccggagtgagagctttgactatggcaaattaccaaggaaaaggatggttcgcgcttacattaggaaaagtaattgatttcaaaacagcaattccggactatatatttgatgctatcaaattctctcatggtgacttcaacagacagcttaaatataagattttagaacaccgttacaaatcagttgttgaacatgtttcttttgcacatgaactgataagtaagctaaatgaaccagaagatatacagcttaaaaaagaatggagtggctatattaaagcctatgaagatggactaaatgcttttactccaaaatggaatatgtttgacatactaaaaggtgatgtggatgctcttaaaattcagatgatgaatgatcttccaaatgaaaacaaagacattttaaggagaatataa

SEQ ID NO: 74821 - DNA, 1788 bp, Escherichia coli
atgtttacatgggagaaaggagaattaaatgaagagcaggaagaagcaattaatatgcccggtagcgtattattaatcgcgtgccctggtagtggtaaaactagaacattgacttataaaatagcattagagctttcaaagcttagtgatgataaaaagtatgttcttgcaataacttatacccataaagctgctgacgaaattaaagagagaattgagctattaggtgttgatacatcacaattatggatcggaacaattcattctttctgctacgaatggctactaaaaccatattctatctatcatgaaaatctaaaggatggatttaagatactcaatagctatgactcagaagaattgattactaatatttgctcgaattacaagagcgtaaaaacgaaattttacgaatgtaaccattactatacttcggaaggaatgcagctatcaggaaatttcaaaaaacacgaagccataagaaatatactgaaagaatatcatcttcagcttagaagcaataatcaaattgacttcgagcaaatgttatatttctcatttcaattgataagcaaacaatctatatcaaaaatactgagtggtattttttcctacatatttatagatgaatttcaagacactaaagagattcaatatgtcattgttgctaaaataattaaatctagcaagggtgctattgatgcttttgtagttggagatcctaaccaagctatatacgggtcattaggtggatatgcaatatcgcaagaaagactggaagaaatgacggattctcatttctcatgcctaactttagataagaattacagaagctcacaaagaatcatagacttctatagaaatttcaatgtattacatagtgcaacaagttcggaaagcgagctgaagggttacaagagccttataacgtataatcaaataattaataaggtagatttagttgatcatataagcaagtatatcgagcacaatattaaaacgctaggcattgagcagaaggaaatatgcatccttgcaccatggtggatgcacctcgctgctttaacaagaaatttagttacaagacttccaaactataattttgatgggcctggcttagtcccattctcaagagatatcgataatttctggtacaagatcactcaagtaattcttactgaaccttcacccaacttgtatgttaaacgaatgcgctgggttgatgacatcttatcagaaatgaatttttctcaggtcgatgtccacaaactaaatccgaggctatttttaaatataattaatgatataaaaattgatgttgtaaatggactggattatctaagagatttcttttctgaattatttaataggatagatgtaaatatatcctcataccctcttttacaggaacattatgattctttttttaaaagttcacaggataggattgaacgtttgaaaaaagataatgaacattttgagactcatataaatgcgtttcgtaatgcattcaaacctaggactggaattaaagtgtcaacgatacatggagtaaaaggtggtgagtatgacactgttatatcattcggtttattacaagatatggttccaaattttaatgattcatctgatgaaagcgcaaaaaaactattatatgtcattggttcgagagccagaaaaaacctacatcttatttctgaaagaggaaggaaagggacatgtaaagcttatgagtcaacaaaggttctatctggaacaaaattcccctacgacccagatcctttttaa

SEQ ID NO: 74822 - DNA, 1749 bp, Burkholderia sp. MSh2
gtgcatttggcgcagttaacgatctcgaatttccgaaaattgcagaaagcagaattgcgattccaaccgggcttaaatgtcctggtgggtgccaataacgtcgggaagactgccgtggttgatgccttacgggctttacttgccgggcacgacgaaccctacccacgcctcgacatcgatgacgttcatcgacctcacggcggggtgcccggcggagacatcacgttccagtacatattccgcggcctcgatgaagacgacgaagccgacttcctgccggcgttgaagatagatgccgctggcaaggctgaggctcacatcaccatccgctatgcggaagccgacaagattggccggctgcgcgccaaacgctggtgtggcgatcacgaagacgtcgggctgaccgccgacatgatggaaaatctgcgcggggtgtacttgccaccgctgcgtgatgcctcccaaagcttgaaaccgagtcgcagtagccaacttgcccggttattccagcttctgtccgacgatgccgggcggaaagagatcaacgaggcactggagaagctcgatgaagaactgaaaaagcatcagccgatcaccaatacccatacggccatcaagagtcggcacgacagtatgctcggcccgcagttggcccagcttctggaactcggattgagcggaagcgactttcagagactggcatcccgtctttcgctcatggtcgatgctttcgagatcgaacagaacggcctcggcttcaataatctgattttcatggcagtcgtcctcagcgaattggccaagaacccggaatcaagttatcgcggattgattattgaagagccggaagcgcatttgcatcctcagctccaagctgtcctcttgggttatctggaaacgatcaaggcaaccgatggagagaagccggttcagctttttgtaaccagtcattctccgaattttgccagcattgccgacatcaaatgcttggcctgtctggtggatacgggaagcacggtcgaaaccttcttcccgcgcgacgttgccttcgagaaggggaagcgagagaagttggagcgttacctcgatgtgacgcgcgcggagctattttttgctcggcgcgtcatcttcgtagagggcgccgctgaattgatgctggtcagtgtgctggccgaaaaagccggatacaaactgcgcgagcatggtgtaagcctcatcagcgtggagggactgaacttcgactcgtttcttcccttgttcggcgaaagtgccttgaagatcccagcttccgtgataaccgacgcggaccccgtggacacgccaaccgatggaagcgaacccaaggcgctgtatccggctgccggcgatgccgtcaaggtatccgacaatacggccaagatgaaacagagcgaggatgcgctcgtcaagatttttcacggggtcaagacactggagtacgacctagccctgcatgaagataatcgctcggcgatgctcaaagcactcaaggaactgcatccaaaaatcggcgaagccgtcgagactacggtcaatgcggccattggagatgccgacaaagcccgccttctgttcagcggcatgtttgagcgcacgcagaacaacgtccagaaagggcgattcggacaggctctcgctcaaattctggccgagggagccgcatgcaccgtacccgagtacatccgcctagccattgaacacgcctgccagaagacaccggagaatccatga

SEQ ID NO: 74823 - DNA, 1746 bp, Burkholderia sp. MSh2
atgacggagctttcctcggaacagtccacaattatcgatgcgacgcttgcacccatgtctgtcatcgcgtgtgcgggcagcggaaaaacgctgacatcggttcgacggctcgcggaaatacgccgacaacttggcgaccatcgaggacgggttgcgttgctttcattctctaatgtggccgtggatactttccgacagaactatcaggttctgctcaaggaaatgtctgttggcatgggtggccaccgtgttgacatcgatacgctggatggattcatcacgcgccatgtgcttcacccacatgcccatcaaacgatgggcgcgacgcaggctgcctttctcgtcatgggtggcgagtcgtttctaaacggatttacgttcaagccagggaattatcccgtcagcatcacgagcatgcaggtcggcgcacgcacgtctggcgtctacttctattatgtgaacaacgatcaggtggtcgagctgaatcaaagcgacgcatccaagctcgtgcatcgactagggaagacgggcgcctacacgcacaatcttggtcgctactggtgctaccgaacgctgcaagaacagccggtcatcctgcgcgccttagctcgccggtatccacacattcttatcgacgaggcgcaggatattggcacgctgcaccaagctatcctcgaacaactcatcggcgccggcgtacgagtctcgctgatcggagaccccaaccaaggtatctacgaattcgctggcgcaaatggcgcgtttctctcgcagtatggcgggcgcactggggtcacggaccttggactgacccgaaactatcggtctgtaccgccgctcgtcaaactggcaaacaagctgtccgcacgcaatgatgtggccgatcgagaagcacctgataccacgcatggcgcgttcttcattccgtacaaaacggccgagcgcgataaagtcgtcacggccttccaagcggcggtgcttgcagcggaactgaaagttgaacgatccgcggtgttatgccgtggccgcgaccttgccgacaagctagccggcaacgattccccggccggtcaaggaacagtgaagggctttgctcaggcggccattgcccgcgacaagaaacaggactatctgggcgccttcaagggcgtagctacatgcgtcgttagcctccttgctgatccaccgaaggggttggtggcctcgattactcagcccgcacgataccccgaggcccaaagtctgcggcgtctcatttggcgctttgcgcgtaaccccgatacgggcttgccgtccacgacacttctggccgacacggaatggcatccacaactactcgccagggtgaaagcattgctcgccgtcttggagagcgatcacggtcttaagcctactgacaacatcggcatgaagctggcaaaaaagagcttacccaatgcaccgctagccgttgtttccgacctcgccgcacccagcgccgctcgggttcgcgtggatactgttcaccaggcaaagggcgaaagtctggatgcagtgctgtacatggcaaacaaggagcacgtttcagcgctgctgggcggagtcagttccgaggtcggacgcataggctacgtggccgttacccgtgcccgaaatctcttatggctgggcgtgccctccaatgcgctaccagacctacgccaaagcttgatttcgcatggttttcaagaggctggcatttccgctgtcccctccgtaaccagctga

SEQ ID NO: 74824 - DNA, 2316 bp, Sphingobium yanoikuyae
gtgcacatcgagtttgtcgagattgccaattttaggaagctgctgtccgcgcgtgtcgatctttctaccacaacaacgctgtttgtcggggcaaacaatagcggcaagacctcggcgatgcttgcaatgcggcggttcctctcgccgcgacgctgcccgtttgagattcacgacctgactctatgccactggccgaaccttattacgctcggtgaaagctggattgcagcacgcgatgcggatgaagtcgtcgatctgacgatcgcaccgtgggtgagttcgttgccgacgctcgatctctggcttcatgtcgagacgggcgagatgcaccatgtgcgcgatctcataccgacgctagactgggagggcggccgtctcggggtccggctacggtacgagcccaaagatctcgggctgctctacaaggatttcatgggcgccgtgaccgatgccgaggccatgaaggccgctgccatcgccgcggtcgcggtcgagcacccggacgtcgatccgcagcccgacccgcccaagctaacggtatggccgaccaacctgatcgactttctcagcaagcggctctctgcgcatttcacgatccgcgcctatacgctcgatccggcgctgcttgtcgacccggtcaaatcacaggcccaaccgcaagcactgcctctcgcctcgttgccgatcgagggcgatccgctgaagggtcttatccgggtccatgatatccccgcccagcgcggcttcggcgaagagcagtcgggggacgatgatgacgatacgccggtgtccgcatcgagcaaccggctctcggaccagctgcgcagctattatgcgaagcatctcgacccgaccaagggccccgaccctaaggatctcggtgctctgcaggcaattgaagctgcgcaggacgccttcgataagcggctgaccgaaagcttcacggcggcgttcagcgaggtcgagggcatgggctatcccggcgtcaccgatccccggcctcgagtctcgacgcggctcaaggcaattgacgggctcaaccactcagccgcggtcagctttgaagtcgatgtcatcgcagaggatggtgtgaccatgccgcttctacggctacccgaggctaacaacggcttaggctatcagaacctcatctcgatgatctttcggcttatgagcttccgcgacgcctggatgcgggtgggcaaggcctcaaagggcggtgtcattaatagcaccgaaccattgcacctcgtgctcgtcgaagaacccgaggcgcatctgcacgcccaggtgcaacaggtcttcatcaaaaaggcctatgcggtgttgcgcgcgcatgacgacctgatcggcaatgacaagctgcgcacccagctcgtcgtcagcacccattcgagccacgtcgcacacgagacgtcgttcgcctgcctgcgttacttccgcaggctgccggccggcatggtggcaaaagtgccggtctcgacggtcatcaacctctccgaggtattcgggaccagcaacgataccgagcggttcgtgacgcgctacctgcgtgctcagcatgccgatctgttcttcgccgacgcggccatcttggtcgagggtccggccgagcgcatgctgctgccgaacttcatccgcgcgcattacgacgagctcaaccaatgctacatcacgctgctcgagattggcggcagtcacgcgcatcgcttgaaatcgctgatcgatcatcttggcctacttacccttatcgttaccgacctcgacacgctcgacaaaacgggcggcgcatcggtgcagccggcaatgggtgttgatcagaaaaccaacaatgcgaccctcaagacctgggtgccgggcaccgatgacgtcgacacgctgctcgatgcaccagtcgcgtataagatccagtcgcagcctgaagatcagctctttgcggtgcgtgtcgcttatcagaccccgcttaccgtgacgctgccgggaaccgatgccccggagatcgctctgccctacacgttcgaggacgcgctggtgttcgagaatttggcgttctttgctgcgttgaagggcaccggtctcgtacgcaagttcagcgacgcaatcgaggcaggcggcggggccgccgcaatcggcgagcagatgtaccttgccctcaagaatggcaagaaggctgaattcgcccttgacgtgattgagaccgaaggattcaaagatcttgtcgttccgcgatacatcgctgaagggctcgagtggctgctactgcagctcaagaagaagcgcgtcgagatcctgcccaaggtggaggtagccgtgtga

SEQ ID NO: 74825 - DNA, 1905 bp, Sphingobium yanoikuyae
gtgagcaccgtgcctgacgatgatgtctttgacgctaaggccgacgagaccatccttgcctgccttgatctcgacaagcctaaaagcttcttcctctatgccggtgcggggtccggcaagacgcgatcgctggtcgaagcgatccgtatcgtgtgccgtgaacaggggcggcgtctctcgctcgccggacagaagattggtgtcatcacctataccaatgccgcctgcgacgagattaagcagcgtcttgagttcgatccccgcgtagaggtctcgaccatccacgccttcgcctggtcgctgatcggcggctacgacggtgacatccgcaaatgggtcgctgcccgaatgctgcaggacatcgcggaactggaaaaagcgcaggccaagggccgcgcgacgagcaaggccgcgatcgatcgtgcccgttcgatcgagagtaagcgccgacgccatgccgggctcgatgctattcagcggttcatctacagcccaaccggagacaaccgcacacgcgatgccctcaatcatgccgaggtgatcgcgatgacagcggagttcttgacggccaagcctggtctacgtcggctgttagttacgcgatttccaatcctgctgattgacgagagccaggacacaagccgacggctgatggatgcgctgctcgacgttcaagcggcgcatcgcgaaagcttcatcctgggcctgttcggtgacacgatgcagcgcatctatgccgatggaaagaccggccttgccgaagccattccagaagactgggcaaagccgcgtaaagagatgaatcaccgctgtccgacgcgggtcattgagcttatcaacaaggttcggcgtgacgatgacggccaagaacagcggccgcgcgccgatgcgcaaccgggggtagcccggctcttcctgcttccccatacgaccgcaaacaagtcagcggcggaagcagcgatcgcgcaacgaatggctgatattgctggagatccagcctgggcagacggttcggaagcgataaagacgctggcgcttgagcatatgatgtcggcgcgccggttcgggttcgagcagttcttcgaaccgctctatgccgtccagcgtatcaacaccgggctgctcgacgggactggtgctggcctgggcatctttacgcgtgagatcctgccgttggtcaaggccctacgagttggcgatcggttcgcgacggcggcaataatccgcaagacctcgccgctgcttgaccgtgacgcgctgagggatgccggcgaggcgcagcaggacctgctcgatcgagcgaaaggggcctgttcggggctgctggcgctggtcgacgggcaaccctcggcgagcctgcgtgacgtgttgcgctatgtcgccgagcaccgattgttcactgtgccggacgtgctgttgccctttgccgccgccgaccccgaccccgacccggtagacgggaacgacgcggacgaggacgaggaagaaatcgacattaagagtgagatcgccgcctggcggcaagcgcttgaggcgccgttcggtcagatcgacaaatatgaccgctatgtctgcggcttttcgcagttcgacacccatcagggcgtgaagggcttggagtttccaagggtgatggtcgtcatcagcgacgaggaggctcgcggcttcttattcaactatgacaagttgttcggcgcaaaggggaagagcaagaccgatctcgacaatgaggcggcaggcgaagagacgacaatcgatcgtacacggcgccttttctatgtgacgtgcagccgcgccgagcggagtttggcagtcgtctattacgctgagaatcccacagcatcgcgcgacgcgctgctgcagcagggttggttcgcagaagatgaaatcgagattgtgaactga

SEQ ID NO: 74826 - DNA, 1806 bp, Sphingobium yanoikuyae
atgcgggtagcgcggatcgtaattcagaattttcgcaccttcgcatcattggacgttaacgtcgctgatgacctgtgctgtattatcggcgagaacaacaccggcaaaaccgcgatcctgcgggcgatccaaatctgcctcgacaatatgctcccgtcgagtttccggtcactgctgcgcgaggacattcactccgccatcgatatcgctcagccaagccaagttctgatcggcatcgagttgaccgggttcgagggcagggtcaacgaagaggcgctggtcagcacatggaagaccgccgcagatcgcgcacgcatattttaccgtttccgcccgcgcccggctgttcgcgagcagcttgcgagtggtgaaatcgcacccggaacgctaacccttgaagactatcagtgggaaatccgcggaggcggtgatcctgcgatcgacctcaccaacattgcctgggatgacgaggggatcggcgagtccgtgcgcttcgccgacttgcaatcctatcttctcgtccatctgcccgcgctccgcgatgtagagaacgacctgcgcaatccccgccagtcaccgcttatccgcctgatcgaggccttcgagatcgatgcggcagagcaggatgccctgattgccatcctcgaccaagccaatgacgcaattgctaactcggagactatcgcacagatagcagcggcaatcgatgcgcggttcaaggatgtcgctggccccgcatttgagatggacgctaccctcggcctgtccgccgccaccttccgcgcgatcatccgcaatctgaaaatcattctgtcggacctgtcgctcacctcgttcgagcccggccgcaacggccttggcatgaacaacatcctctacatcgcgatcctaatggaatatctccagcggcggatcgcgctcaaccgctcggccggccagttaatcctgatcgaggagcccgaggcgcatctccatccgcagctgcaattctcactgatcgcggcgttgcgcgcgatcggcgtgcagaccatcctgaccagtcatagcacccaggtgacatcgcgggttccgctgagcagcattgtatcgctcaccaagcgcgaggacgcgaccatcgctgccggcaatctcgcgctcaatgcggcgctgaccgcgccagagatcgccgatctcgaacgctatctggatgcaaccaagagcgcattgctctacgctcgcaaggtcatgctggtcgaaggaccagccgaaatgttcctgatcccggcgctgatcgagcaggtctacggcgtgaagctcgagcgcctcgggatctcggttatcgcgatacatggtgtccatttcgacatctatgccaaactattccgcgccggttcgcttgaaaaaaaatgcgccatcgtggccgatgctgacatgaagccgtccgacgccgaggacttcgatccggaaaccgacgcgcccgatctggtggcactggaaggcgacttcgtgtccacattcgcgggcgccaccacttttgaacgtgaactggtatcggtcgggcgcctgccgatgctgattgaaaccgttcgtgctctcggcgcacctcagatacttgagcagatggagaatgggttcgcaacgctcgtgctcggcggactgggcctcgccgaggagacagcgctgcgcgtcgagcttggccgtatcacgctcaataccgccaagcgcttcggtaaagcgcgtttcgcgcagatagcagcgcgctacgctaatctcgcgaccgatctgccgccctatatcgaacaggcctatgagtggctcactgaatga

SEQ ID NO: 74827 - DNA, 1764 bp, Sphingobium yanoikuyae
atgatccggctgacacccgaacagcgcgaggcggtcgaacatgagggcaatctgctgctgacggcttgcccaggaagcggcaaaacgcgggtcattctcgccaagctgctgacgctggccgatcaggtcgtcggcacgccacagtttatcggctgcatcacctatactaatgcagcggtcgacgagatcgaggcccggttgcgcacctacggcaacaacgcaatcgcggaccgttgtgagatttccacgatccacgctttctgcctggaattcatcctgcgtccctatagttggttgattcccgaagtgccggcgtcgtttcaggtgctctcccgcgagaacagcctgttcgagcagatcgtgacggcggtcgaggacgccttcggtcgcatgcccgccgggcaggtgttcgaggactatgaatcgcttcgcatcgacgtgaacggcgaaccctgcggccaaggtatcgagaccggcatcgtcaccgatgaatccgccgcgctctattgggagcgggtacgcgcccacggatacctcgatttcgcgatgatcctctactattcatggaggattctggaacagcacccgttcgttggacgcggcattgcgagccgctttgcctggttgctgattgacgagttccaggacaccacagacatccagatcgccattttcggcgcgctccgacatttccttcacacccgcttctttcttgtaggcgaccagaaccagtcgatcatgcgattcgccggcgctcgcccagaacttgccgagcagtttggcgatcagatcgacgcgcaccgcgacacagccctgaccgggaacttccgatgtgggccggcgatagtcagcactgcatcagcactcatccccaccgtgccggggatgcagtcagcgggcgatgcggcccagctcgcggcacaagtgaactacgtccatgtcggccggccgatcgacgccataactgaccattttctgcccgccctgcaggatgccggcatcccgcttggcaaggcagcgatccttgcgccatggtggacgcatcttatccctgtcgcccgcgcgctccgcgaattcgatatcccggtcttcggtcctggggcgcgcccctacaagcgtcggcgcctgcttgccggacttgccgagcaacttggagcctgcgccgaggccggcaattacctcggaatcccgggtgtcgagcgggccctgtttcggctcattggtgacctcacagggaactcgcgctacgacatgttcagctatcaggggcgccgcgtgtcgctaggcctgatctatctcgctcgcgaacttgccgaccagcatcccggcggcgtcgcttggctccgcgtcatcgcccgcgaggctggcaactatctcgaacgcgaggaatggttgacgagcagcgccaaacagccgctgatcgactccgccgaggaaatgttgtccgatatgcaggccagcaaggttgatctcgcgaatctgctgatctccgatatgagcctgttcgccaatcccgagaatgcgctcaagctgatcacgctccacaactccaagggacgcgaattcgatggcgtcgctcttatttgtatgaacaacggcagcatcccgcatttctcgacatcgacgcaggaggactatgatgaagcacggcgcctgttttatgtaggcctgacccgcgccaagcgcatcctcctcgtcgcgtccgatcagtctcactggaagaacacgccgaccccgtttatcgcggaggctggccttggatga

SEQ ID NO: 74828 - DNA, 1950 bp, Sphingobium yanoikuyae
gtgaagttggtggagttaagactgtcgaatttccgctgcttcggaccagaagcgacgaaaatttcgctcgcaaatacgaccttcatcttgggccctaatggctcaggcaagacggcggtcttgcaggcgctcggaagaatgttcagtctcgaccccgcgcagcgtaagatccgcacgtcggattttcacatctcatcggatgaagacccggaggacgcaccttcgacgcgagatctgtggattgaggccgacttcgagttccccgagttagccgatgccgatgccgatgaggcagaggacggcacaatgccggccgtcgcaggcaacttctcccatctccagatggaaacagacgacgcgtcggttcgaattcgcttccgcctccaagccagcctcgacgaggacggggacatcgaagaaagcttcacccatgtgatgcaggtcgatgatgatggagttccaaccgtccaaggcagggtttccaagcaggaccgggccgcggtgcaggtccattacctgccagctcggcgcaatcccgcagaccatatctcttacgccgccaacgctttgctcggccgcgcacttcgtgccgccaactggtcggcggagcgccagacgatctcggctctcacggagcagatcagcgcagcgctcgtcggcaacgcgtcggttaaggggatcggtgatgaggtcaccaagctctgggaatcgcttcacaagggaaaattttacgccaatccgactctgtcgttcgctcagagcgaaatcgaaaatttgctgcggcatctcagcctgagcttcgcgcccggtcacggtacgccgcaggtcgacttctcccgactaagcgacggtcagcaatccctgctgtacattacgctcgttctcgcgatgcgggccatcggcaatgcagtgctagccggcgacaccaatgcattcgacatcgacaagctgcgcccaccgcttttcacactcgtggcggtcgaagagcccgagaacagcctgtccccgcactatcttggtcgcgttctacggacgctgagcgagttcgcggaagacggcgatgcacaagccgttatcgcgacccatgctccctcgctgctgcgccgcgtcgaaccggagagcatccgctacctgcgcctcgacgaggagcggcgcactacggtgtcccggatcactatgccaagcggggccgaagcgcacaaatatgtccgggaagcgatccaagcctttcccgagctctacttcgcgagactgctgatcctaggcgagggagacagcgaggaggtggtgttgccacgtttgctcgcggcgcgtggtatcctggccgacgatgcctcgatctcggtcgttccgctgggtggacggcacgtgaaccatttctggcgcctgctgagcgatctcggcattccattcgtaacgttgctggatctcgacctcgcgcgccaccagggtggctggggccggatcaaatacgcggcgaagcagctgctgcgattccaggaagacccggtggatttcgatgaggaaggtgcggacgcgattcccaagtgggacagcaagcaaggcctgatgctcaacgacgatggctggatcgccacgctggaaaagaatgcggtgttcttttcctctccgctcgacctcgacttcatgatgatcgaggcgtttcccgacgcctatggcctgaccgatgccgaactcgaggatccagacgacggcacgatcgacgccgtgctcggcaagtcacacgacgcgctcggcggtcaatatgacgatgcccagcagcaactgttcggggcgtatcaggaacgtttcaagctcggcagcaagccgagttggcacatccgggcgatggccaaactcgacgacgacgcgctgctcgaaagcatgcccgaggttctcgaccgaatgttcgaccgcatcgaggagaagctcgcggaattgccggaatga

SEQ ID NO: 74829 - DNA, 1650 bp, Sphingobium yanoikuyae
atgattcccatcgcgcgctgggcgccatccgatgggctggtcctggagcctaatgcgctcgatgcggcgaaggagacggctcgcaatctcgcgctcaccgcgggtcccggcgccggcaagaccgagatgctcgcccagcgcgccgacttcctgctgcgcaccgcgacctgccgctatccgcgccgcatcctcgccatctccttcaagatcgacgcggcccagaatctgcgagcacgagtccggcggcgctgcggagccgatcttggggcgcggctagacagctatacgtttcatgccttcgcgaagcgtctgatcgaccaattccgcccggtgctaaagggcgcgaatgcgctcgacccggattattcgatcggccagcggcgcgttcagcgaacatcgatcaccttcgccgacatggtgccgctcgcccagacgatcatcgagaatagtcgtatcgcccgcaacgccgttcggcagacctacagccatgtctttctggacgagttccaagactgcacagccgatcaatatgcgctcattaccgcctgcttcggcggatccacatgcctgctgaccgccgttggcgataccaagcagagtatcatgggctgggctggcgcgctcgaaggcattttccagacgttcgcggacgacttcactgcacacccgctcaatctctaccagaatttccgttccgcacccaccctgcggcgaatgcagaatgcaatggtgcgggtgatggacccgctcgccgccttggacgatgccgacatcgtcgggaacgaagggtcgatcgccatcctcaatttcgcggacgacgaagaagaggccgaaggcatcgcggcccgggttcagcagctcgctgataatgacggcgtttccctgtcggaaatcgctatcctcgtcagcaaacagcagcaactatattgccaaaagctgattgcggccttcgacgcctgcggcattgcctatcgggaagaggacgcaacccaaaatttggcttcggagcccgcggcgcgccttatcgtggactttcttctggtcacaagcagtccccggcagccggcagcgcatcgccgcctgctggatctcgtcgttttcaaccaaggcgtcgacgaggaacgcgagtatcagctgcgctcgaagtggaaccggctgctcggcgagacgcgcaaggcgatcgcgaccggcaagatcgatctgtcacacaagcctgatctcgaaaagctggtggatacgctgcttgccgcggtcggcagcgaagccatcgtagcgatgtcctcgacatatgcgcagggcgacatgctggcgacctgcatcgttgaaaccgtggatcgcgcgcacgagttgctatgcggcggggtagacccagccacagcgctctcgtctttctcgggggatcgtgcggtacgcatcatgtcgatccacaagagcaagggactcgaattcgacacggtgttcatgcttggcgtcgaggaggaaaccttctggggcaagcaggcggacgagcgttcggcgttcttcgttggcatatcccgcgctaagctccgcctgttcctcacggtctgcgaggagcgctccagacctgcgggcgcgggccgatggaccgtcgcgcggcgacctcatgaggagttcctaagctatgtttga

SEQ ID NO: 74830 - DNA, 1812 bp, Halomonas sp. KO116
atgtacctgtcacgtatcaagattgataattttcgcaacttccgagacctagatgtcgcgcttggcggcaacgtcgtcattgtcggcgaaaacagcgtcggaaagagtaatctgctctttggacttcgattgatcttcgatccctcgctgcccgatagcagccgtcaactcggtctcgctgacttctgggacgggctggaagaggttaccaacgagaccaccatcaccatctcggtggagatcaaagatttcgaggaggatctcgacatcctggcggtgctgaccgattaccgcctcgatgacgacccagacacagtccgtcttacctatcaattgcgtgctcagcctagcctcgaccactcccccgctagtgacgatgatttttcattcgtttgcttcggcggcgaagatgaagctaagcgcttcggccatgatcttcggcgccgcatcacgatggatctgctaccagcacttcgggacgccgagggcgatcttgccgcttggcgccggtcgccacttcgcccccttgttgaggacgcattcatcggcatagacaaggaggcgctcaaagaagttggagacaagatagcagaggcaagcgccgcggcgattgacttcgccgaggtgaagacgctcgaagccagcattgcagagctatttttaacaatggctggctcaaaacaggatgtgcatccgtctcttggattcagcgcgaccgacgccacacgcattaatcggcagatccgactgctaatcgatgaggggcggcgcggcgtcgccgatgccagcctcggttcggcaaatctcatttttctcacgctcaaactgctcgatcttcagcgcttaatcgcggccaacaaacgcgatcagtcattgcttgcgatcgaggagccggaagcgcacctccatccccaccttcaacgtttggtctataagcatctgtttgagacaatcgtcaatggcgaagacgatggcgacagggacgcctccgggccgctttcagtaattctgaccacccactcgccgcatatcgcaagcgtagcaccgctggggtctctcctgcttcttcggtcgcactcgaacgagggaacgaagggatattcaacggccgaagcggacttcactacaaccgacaccgaagatctcgagcgctatctcgatgtcacccgtgcagagatggtattcacacgcggagtcatcctagtcgaaggtgatgcggaacggtttctgatcccagcatttgccgaagatatggacatctcgctcgacgaacatggtgtgtctgtatgctcggtcgcaggaaccaacttcataccctatgtgaagctgctctgcgccttaggcatcccattctctgtcataactgactacgatgaggtcaacgagacccctcgcgcctacaatcgggcactcaagctcgttcggatcatcgatgaggccgctggcggtgacggcaccgacttattgatcaaagccatcaaggacaaagaaacttgggaagaaacattcgccgaaatccagaagttcggtatcttcgtgaactggagcacgctcgagaccgagctgttcgagggagactatgctcagaagatgatagataccctacgcgagcataattttagcgccaagcgaaagacgacccttgactcatgggaaaagaagccgaaggattataacgccgatgaactacttaagatgatcgagcagatgggcaagggtcggttcgcgcaaagattagcggcacgcacgcccaataagcccgtgcccgattatattgccgatgcgatcaaccatgtcatcaatcttgtctga

SEQ ID NO: 74831 - DNA, 1797 bp, Halomonas sp. KO116
atgtcatcaatcttgtctgaccgggcgttctatctcagggctgcaacggatctacgtcccaacaagaagcagtggcaggcttatgaatcaaccggtcattgtgtactgctggctggccctggcagcggcaagaccaagacgctgacggtcaagctcgctagaatgcttagcgaggatgtggaggagccgcgcggcatcgcctgtatcacctacaataacgaatgcgcgcgcgagcttgaaaaccgtttggaagcccttggcatcgcgcccagcaggcgtgtctttatcggaaccgtccactcattttcactcacacagattctgctgccctatgccaaggtggccggtataggcctgcccgatgagttcacagtggcgagccgtcagcaaactcgagcttgtttagccgctgcccacgccaagatcatcggagggccggaaaaccctcagaactgggacatgcggcttggccgtcatcggcgccggttccttaatcgcgcacggccagaatggaagacgctcgatcctcagctcactgggctcgtcgaagcgtatgaggccgagcttcgcgcacgcggactgatcgattttgacgacatgcccctccttgcggggcgtgcccttgtcactaataaatggcttcgaacggcgatggtggcaaaatttccgatcctagccgtcgacgagtaccaggacttgggcctcgcgctccatggcatggtgatgggcctttgctttagcgcgggcatgcggttgttcgcggtcggtgatgtcgaccagtcaatttatggctttaccggcgcggcgcccgaactactgcggcgactatccgagcgcgatgacgttgagacggtgcaactcggcctcaactaccgctgcggatcaaggatcgtcagcgcatccgaatatgcccttggggaggagcgaggctacagggcgcctgaagatgccgatgaagggacaattttctttcatccctgcacaggtggttatgccggacaggcgcggtatctcatggaggagctgatcccggaaatccgcgaacgtcggccaaacatcaatcttggcgaaatcgcagtgctttatccagcagcattcctcggagatgaggtcgccagttcagctgcggaacatggctattcggtgatacggactgacggcaacgcgctgtatccacgtggcagcaggctgatgcgatggctggagcaatgtgctatgtggtgctgcggaggctggcgatcaggaacgcctccactgtctcgagtggtaagcgaaggcactaggctattccacgaagcaataaccgatgaggatgagaggctcgccttccagcgcgacctcaccgccgtattatgggatcatcgggacgagacgcttggcctctacaattggcttgcggcgcttcgcgatgacatcattcaacctcgtttcgctatcgccagatcacttgctgatgaatacgctacactaaacgatttcctaacgcgtatcagccccactggtgatatcgatgactttccggtagccgaattcgcgggaatcggcagcggtctcgaccgtattaatctttcgacactgcatagctccaaagggcgcgagttcgatgtagtgattctgtttggtgcagaggaaggccggttaccgcgcaatcacgtttcagacaatgacgtacgcgaggcacgacgtctcttctatgttggcttcactcgcgcgaggcatgagatccatcttatgtacgggcagcacaacccctctcgcttcgtgacggaggtgcaaaggcatctcgaagaggaatga

SEQ ID NO: 74832 - DNA, 1992 bp, Epilithonimonas sp. FH1
atgaaaataagctctctaaaaattaagggatttcgatcgtttggatcctcaaacataatcattccaatcaacgaacatctagttggttttgtcggtcttaatagttcaggcaaaacaactgcacttgaagcaatgagaaaattatttggtcaatcattagctgatcgagaactcacaagaaaagattttcatataggcaaagacgaagaggttgacgaagtatatgaaagagaactttctatcgaagccagaatagacttttccaacgatgaaaaagaatctattcctcatttctttagtaatatggttatcgatgatgaaggtgaaaacccttacatacggatccgattagaggcaagttggaaaaaatctgaacttgtacctgatggagaaattgaaaccaagacctatttcattaaagttccagaaggcgaaaaggaatcagacgaaaacaagcccatctacccaagccactttaaaagtcttatacaaattatgtatgtgcctgctattagaaggcctgctgaacaactaaagtttgcttcaggcagtatattatttagagtcttaaaaaaaatcaaatgggacgatgcatttaaggcaaaatttgatgagaaagttgaggaaataaatgctgaatttaaagcattgtctgaattcaataccgttcaaacttcgattacaggattttggcaacagtttcacaaagacaatcgctacaaggatgctaccctttcattcggtggaagtgatttcgattctatccttaaaaaactagaaatatcttttagtccaacgggcgttcacaagccttacaaaattgatgaactaggcgaaggatatagatctcttttctacttaactcttgtatgtgccttattagatatagaagaaaaactggctgatgagcaagataaagaaaatattggaattaaccgtcctctactgacaattttagcaattgaagaaccagaaaatcatattgcaccacagctattaggaagagttattaaaattcttaaaacaattgcaggacaggaaaattctcaagtatttctttcttcacacacgccggcaattgtcaaaagattaaatcctgaaagtatcctgcattttaggatcactgaaaaatatgaaacagaggttaataaaattttacttcctgaaaaaacggatgaagcctataaatatgtgaaagaagcggtacacaattatccggagttgtactttgctaagcttgtagttattggagaaggcgacagtgaagaagtgattttcaatcggctgatggaagtaatggatgttgatttcgatgataatataatcacttttgctccattaggacataggtttgtaaatcatatctggaaattacttgagacattacatattccatatataaccctacttgaccttgatcttgaaagagaaggaggtggctggggaagaatcaaatacgccttaaaacaattactaaaaataggaattaaaaaagatgatttgctagagactgacgaaggaatactatctgatgtagagtttaatgctatgcattcttggaaagtttcacagaaagcaactctgaatggctggataaattttttaaagcaatacaatatttatttttcagctcctcttgaccttgattttttgatgcttaaacattatccagaattttacaaaaaagcaattcctaaaaatggtggtccgcaaattcctgaccaagccaaagaagcagaaaaattcgaagaaaaagtggaatcagctgtccatgcaacgcttaaatccagtcaggctactgcagcaacctacaccaaataccagaaggaattaatgatttggtacaactatcattttttgggaagaggaaaaccgaccactcatattcaggttttgtcatcgatgaccgatgaagatataaaggagaatctacctgaagttttcactcaaatattcgaaagaatttctactcttttaaaagctgaagaataa

SEQ ID NO: 74833 - DNA, 1845 bp, Epilithonimonas sp. FH1
atgaaaccaatcaaaaacgatgagtggattccaacctatggtctggagcttgaacaaaatgcctttgatgtagcgattgcgactgataataatttggtagttgcgggacctggggcaggaaaaacagaattgctagctcaaaaagcatgttttttattgcagacaaatacctgcaaatttccacatgaaatattggcaattagttttaaaagagacgctgcacataatttgaaagaaagagtaagattaagatgtggcgaagaattggctaagaggtttgattccctgacttttgattcgtttgctaaacaattgttcgacaggtttaatcaggctgtcccaaccaactataagattaaatcggaatatgatgttgtattggatgatcgtactattttagactattataaagcggaggatattacctattttagtagtgtaacaacagccgacatacttagtcttcatcacaacaaattaccacatacaaacttaaatctgggagaaaatatacgaaacaaggtttggaaaactatgatttggcaatcaaaattatcatttaaaatgatcatgcgattagctgaatatataatcaacattaatccaaaaattaaagagtacttacaggagacctatcattttgtatttttagatgaatttcaagatactactgaaattcaatatgatttctttaaaagttgttttttagatagtacaacaaaatttacagctgtcggtgatgataaacagaggattatgatgtgggctggcgcacaggaatctatttttgaagattttattgcagatacaactgcggaacgcatcccacttacaatgaactttcgatgtgcaccaagattagtaatgctgctgaaccatttaaccgaaaaattattgcaaaaaactgattttgcaacaccttccaaaaaatggcatcctgaacaaggtgagtgttccgtctgggtttttgaaaatcccaatttagaaaaacagatactttttactgaggtacaaaaatggatcaatgaagaaaagatagatcccagaaatatttgcattttagtcaagcagcaattagatcagtatgctggcgaattaatcaggtattttaatgagaatggtgtaaaagctagagatgaaaataaattacaggaccttttagtacaagaagtatcggtatacgtcattaatgtcttgtatgtcattttcaaaaaaaagtccatcgatgaaaaggataaagctttcaatttcttaagtcaactgcatacagaactagaagattctcaattattaaaattggaaatttcattttcgatttttgtaaagaaaatgaataacaattacaatgtagacgaaatgaatgaagaggtaatcaaaaagctttttgaagaggtcgtaaattttgcaggtaaagatctcatcagggcatcatttccctcgttaagaaatagtgattttttagataatgttttacaaaacctggaaaatgagtttataaaaaattatcaggaatcaaatgatattgttttggctttagacatgttggttggcaaagataccattccagttatgactatacataaaagcaaaggcctagaatatcacaccgtaattttcattggattagaagatggggcattttggtcattcgagagccaacctgatgaagacaaatgtgcattctttgttgctttgtcacgagccaaagaaagagttgtgttcacttttagcaagctgagggagggacgcttcggcttaaagacacagcgcattgataaaatcaaagttattttggaagaactggtaagttcaggaatagtattgattacagaaagaaaaaattag

SEQ ID NO: 74834 - DNA, 2079 bp, Elizabethkingia meningoseptica
atgtacatatctcagattaaaattaccaatttcaggaattttgaaaatactacagtcgattttaatgacggcatcaatgtagtaataggtcataacaatgccggaaaatcaaatttggtttccgctctttccttagttatggataattcaaagtcaaaacgtcttaatattgacgacttttacaaacttattccgaccgcacatttattgacttctcctccaaaagtaagcattgaaataacaatcaaaaaaggatcttatgaaacggaggatgacttagtaaccgtttcaacttggctaaccagattagaggaagattacgaagcaaaattaacatatgaattctttcttcccgaaaagcatgtcgagaattaccaaaccttagttagggaaattcctgagaatgaaaaccaaaataaaaatatttggaatacgattaagcatgatttcctaagactttatgtagtaaagatttggggaggaaatgttgtcaatcaatccacagcagacgtagactcattacaaaaatttgattttcaatttttagatgctataagggacgtcgagagagatatgctgacggggcgaaatactttgctgcgagatgtttttgattttttcatggattatgatatcaaaatccatccaacaaaaacagcacctgagaaacatatggatattaaagaaagaaaaattgagttttctgaaaaagctgaagaattagtaggtttgttacacaggagaattgcatcaggaaaggaagaaatattatcttatgcaaaagatacgggagcgtcatttaacaatgctgttccagattttgaaggagtaatatcagagacagagttgtatagtgttctaaagttaattgtagaatatgagacaggaataaaaattcctgcaacacgcaatggtcttggttacaacaatttaatttacatgtctcttcttttagcaaaaatgcaggtcaataatgacgttaattatttggatagcaatgcaaaaatattttcaatgctggctatcgaagagccagaagctcatctacatccggcaatgcaattcaagtttttaaaatttctcgatgaaaataaaactaaaagaaaagtaagacaaatctttgtcacaacacattcaacacatataacatccgccgttgggctagatgaaattatttgcctgcacaataatgaaggagaaactattgtggcatatcccggaaaaacatttcttaatgcggaaggtcaacctttagatcatagcaagaagtatgttgagagatttttggatgcaagtaagtcagatatgctttttagtcaaaaggtactatttgttgaaggacttgccgaacaaatccttgcgacggtattcgcaggttacgaagataaatctttagaagaccatcatgtaagtgtcattaatgttggaggaagatattttaaacattttctttatttattcgattctgaaaaagatttctcaatatcaaaacctgtcgtatgtatgactgacagggatcctgaaagaaaaaacagaaccgtagaaagatcaaattttcagaagtgttatccatttgaatataatagtgaagctgaaaccttcgattaccagcaaaattcttttagcaacgaatatcagccggagactcacccgaacattacagtatattctcaagattcggagttaggaaaaacattggaatatgaaatagcattttcaaatccatcattaaaactaattctaacggattctatgaaaaatagaaatgagctagaacgtctaatggatttgtacgatcacgaagattcaacacttgaaaatttctttgaaatcctacgtgaaagtgatgagaatgagagaataatttccggcattactctcaacacctcgcttgatttagatggtaagaaaagatcgataattgcagcaagatatcttaattccattggtaaaggcgaaaatgctttagaattggcagttgtgctaaaggataatttattaaaaaaaggtactgaagaatatgtagagttcaatgttcctcaatatattaaagatgcaatagaaaagttatgccagtag

SEQ ID NO: 74835 - DNA, 1686 bp, Elizabethkingia meningoseptica
atgccagtagaaatatcatcagattccttaatagagattaataaacattttaaagttaaggctggacctggtgctggtaaaacgcactggctggttgagcacattaaaaatgttacaagaaattccacactaatttccggcgcaaagaagattctttgcattacatataccaatattgcagctgaaacagttttaacaaggcttggaagctcggcaactcaggttgaagtattgacaattcacagtttcttttattcccatataattaaaccttatctatcattcattgctgaagaatatgattttgatgtcagctcgctagatggtcatacagatattatagtttctgattactcatttttgcaggagtggaaggcattaaccggtcaaaaaagaattaccgatgataatttaattacttacgcctttgaaagactcagatggttactagtagacgatgaattgattgtcagaacagattatcctttcagatttgggggttatcctattaaaaacagctcatattttgattacaaaaaaatgacttggcaaaggggtatacttcatcatgatgatgtattgttttttgcctatcagattatcaaaaagtttccttttgttattaaaataataaataagaagttcccttacgtatttattgatgaatttcaggatagcaaccctatacaggtaaacataatcgaaaagttatcaactggttctacaattggaatcatcggtgatgtagcgcaatccatatatgcatttcaaggtgcaacacctgcacttttcgatgggtttacattacctgaaatggagcattattttttaaaatttaatcgcagaagcactaatgaaatcattgatttcctaaatattatcaggcaagatcttcctcaagattatcatagaacggtttctatatcaaaaccagtactttacgtgggtgatatggtcgaagctctgagaagagctaaaacctcttgtcctgatgggtatgtatatacattatctagaaataatatcacttccaatgctatgaaatcagaaataaacggctctggaatggacgataagcttttacggaaaatcaagttagaagactcgactaaaaaaagggctgatctaataacagcgtgtattactgctgttgctctcgggcaacaatctaaatttaaagaagccataaaagttttagaaaacgtaataaattatagacgtaataggttagaaggaaaaaagaaagctttacattacttaacgatcttaatggcaaaattcaatgactataaagatctttctatgcttgaattctcagaatttatcagactgaatattaacgatagtattccaaaagcaacaaaaggaaaaggaaagattttttatgaaaacaacacattccaaagcgtctacttgtgtgtaaatatatctgaagatttaagctatcacagaacagtccataaggcaaaaggagatgaatttgataacgttctattaattttaaaagaagaaaaagatttaaaatttatgtatgaaccagatttatacaattatacgcaggaagaacatagaatttattatgttggagcaagtcgtgctaaagatcaactttttatttcagttccaacacttgatgttaatgttgaagacatcataaaagatatggtaaatattcaaagattttaa

SEQ ID NO: 74836 - DNA, 1224 bp, Tatumella ptyseos ATCC 33301
ttgctaaggctggctcaggacattcgcaacgaagaacagagccgcagtgatcaagctattttcgatgaattgaatacgttgctaagtgacgtgaataataaggtacgggacatcagctatgttgcacaggcaacagcagagctcaatgaagagttaagaaagctctcttataaccatgaacggctgcgcgttcaactcgataccggggctatcggcatcgagcagttcattgagaagctagagctgggagctagcagtagcgggaaaaagctcatgttgggcggtgacggtttcaataaccagatacttctcgccctttggagagcaaaaagcctacgggagcacgatgttagcagtgaagttgttatctattgcattgaggaacccgaggcacacctgtttccacatcagcaacgtaaattagcaacctatcttacggaaaatctgcctgggcagtcgatcgtaactacacactctcctcagattgctgttaatttcacgccagattccgttatccgtttattttctcgaaggggtgaaacctctgccgctagcaacggttgttcggcatgcattagtgatgcatgggatggtatggggtatcggatgagtatcatcccagcagaggcattttttgctaatgtggttttgcttgttgagggaccttcagaagtgattttttacactgagctggcaaaggcactcaaaatagatctcgactggcttaatgtaagcattatgtcagtggatggcgtacagtttgatgtttatacaaaaatattacaggctctgaacatccgctgggtagtgcgaacagataatgacgctgcgaaagttccacgacgtacagactggagctatacaggagtaaaccgggcacttgctttatgcgggttacctaaaggaatcaatgtcccaaatgaaattaaacataaggatctggtgaatgcttggggaaccgtttccccgcaggttaatccttacggcgtcttcctgtcattcaccgatcttgaaggggatttggctggtactttgactagctacatgatggaattttccggcaagactaatcctgatgatgcggttgactatttccgagagaaaaaagcgatcaggatgcgcgaatttttgaacgcttacaggacagttttgcctgaactatcagacaaggatatcgctcgaccacttttatatgctcagcggcttgctaaggaggaagtatga

SEQ ID NO: 74837 - DNA, 1623 bp, Tatumella ptyseos ATCC 33301
atgattttgacagcagagcaggttgatgcgatcagccactgcgggaacttggttgtcaccgcctgccctggaagcggtaaaacaaccgttctagtccataggatcattcgacatctagaattatgccgcgatttccagggggtcgtgtccatttcttttaccaacaagtcatctacagaacttaagacgcgatgtaaaacggtagttggcgaattgaaggccagctttttcggaactacagacaaatttatgctgcgtgaaattgttatgcaatttatcgcgcatctatggttccgtcctcatcaggagacagagctcgtccgctggtcggatctagagacacagactaaggctaaattggagcagtatttcttgcatgctgaaatggaaaataacatcagtgataccgggatggaggagctatgcaagttataccagagaggaacgatagtccttgagttgttacccatcatagcttgctatgttgtaatgcattcccctgcatgtcagcgatatctcaaggcaagatatactggtgggatctatgtggatgaatatcaagataccggattttttacccatcaattttttaaattactagcttcaatagggctgcagctaacggttgttggtgatgctgagcagtcaatttatctctattcacatcggggtagtgactcgcttaatgactttttacaatcaagtgatttctgccacaaaaggataactctgaatttcagaagccacccatcaattatcaactatgccagtcgtctgcaagacccaacatgtcacttgcagcaagcggatgaactgagagtgtacaggaaaaaaatcgagggaagccaaaagaacatcgctgaatggatagattctgttcttcccgcaatgaaagtgcatttttctataccatgtaatagcgagattgcaattctggtacggagcaacatgtgtgctgagctgattgctgacaacttgaaagccccaaatagggcttaccttgatgatcgtctctccaaaataggtggcaggacatcagaactaatcagagcgctgctgtcctatcgtttttctgacgagttgacggttcaacctctacttgatgaatttttgaacccgacctgcaagcgtcatttagttgtacagacgcgtatccttatgcggaagacacggagttgtactgatcaagctctcttggacgttatcaaagaaattgttttccgctgcttcggcgtcggaatggcggaagagcatatcaatggtattgaggacgcgctaacaattcagcgtgtgagaaataactatctcaaagttcatgaagatgaagtacaaattatgaccctgcacaagtctaaagggctggaatttgattttgtattccatcttgatctttatgactgggtaattcctattcgggaatttgttcagggaagttatgatgtgatatttcagaatgaacaacagtgccttaacctgcattatgtaggtgtgacaagggcgcgaaaagctgtaactctcctctattccgacagccgatacaatacaaatgggcaactaaaaaggggggcgccttctcagttccttaacagatctggtttggacggtttattcataaaaatgtaa

SEQ ID NO: 74838 - DNA, 2190 bp, Staphylococcus aureus subsp. aureus SK1585; identical to SEQ ID NO: 71904

SEQ ID NO: 74839 - DNA, 1794 bp, Staphylococcus aureus subsp. aureus SK1585; identical to SEQ ID NO: 71697

SEQ ID NO: 74840 - DNA, 2223 bp, Xenorhabdus bovienii str. oregonense
gtgaaactgactaaactgcaaattaaaaatttccgttcactaaaagatcttcatgttgaccttgaagagtacatctcaattatagtcggcaaaaataactcaggaaaaacatcactactcctagcgcttgaacgcttccttggtagcacaagtccacattttgaactagacgatttcaatatagattttcaaaaagacctcgttgaaatcattaacgacaagatatcccccactgagcctttgcagatatcgcttcggttgtttatcgagtatgaagacaacgataatcttgccaatgtcggaaataagataattatggatcttgatcccgaaaacaattgtatcgttctagactttctatatcaattatcttctgaaaaccttgatattctcaaacgagattatataactcaccgtgataaaaaagcagcgaaagctcaacccatacttgattttcttcgagaaaatcatagtaactactttaaacttgcgcgcagaagtgtccaattcgatcatttaaaacaaaaggttcaagaagattattacattgacctaatcaaagaaggagtccgattagaagacattatttccttcaagcgtattaatgctcgacggtctgtatcaaataaagactcagaccgaagcttgtcagcgatgtcagcaaaaatttattcaacaattttaaccaatgctggtgaggaagatgtttttgacagtttcaaggaaaccctaaacagcacagacggacagctaaatagcatctattccgatcttttcaaagacattattgatgatgtcaggaaatttggtggtatcagagagggtgatactcaaatccaaattaagtcaaccttgcagcatcgcgaactgctagaaggaaataccacagtaatgtatgggcaagggggagaggcttatgccttacccgaaaattttaatggtctaggttatctaaatctaattagcattatcttcgatatcaaaattatcctaaatgaatttaagcaaagaaaatcaccaaagcccgcagatataaatttgctatttatagaagaacctgaggctcacactcacccgcaaatgcaagcaacatttataaaaaatataaaaagtttgataggaagagttataactaatactgatggtatcacgaggccattgcagacaataatatctacccactcggctcatattgttactgaatctgatttcgaagatatcaagtatttcaagagagaggatggaggaacgtactccaaaaatcttaaggatctagagaaacgttatggtgatgttaaacataatgcgcattataaatttctgaaacagtatctgacaattcaccgttcgcagcttttctttgccgataaggcaattttagtagagggcgaaacagaacgaatattactaccagctatgatgcgaaaaaaggatcaattcgatgaaatgaaagcttgggaaacaagtactcaatctctaatacctttactttctcaaaacatatcagtagttgaagttggagcacactcgaaaattttcgaaattttcttagatttcattggaataaaaaccctaattattacggatattgattcagcagtggaaaagcctcgcctcactgaagacgggcaacctcaaaggaataaggaaggtaatcctatcgtagacctgtgtgcacatgtgatagataatgcaacgcacacaacaaaccactctcttcagttcttctttaatgtagattccaatctaacctattttctccaactaaagagtaatgaaaaaacagttcataagaacaaaactaccaaccgatgggaaaaaaatcccaatggacaggtcatgtgtgcctaccaagtttcagaaaccgatacagggggtataaactattatgctcgcagttttgaggatgctttctttcatattaatcggcaattcataaatgacacctgcaatcggaacggtcagattgacgaaacaaaatttccgagtctcactatgaaacatctaaaaatttatctcggagatggttcttcttttgacatggctgaaaaaggaattacaaaaaagccatcatttgctattgaaattctgcttaatagccaacctaccacatatattaaggtaaattctgccggagaatcgaaaaaattcgacttagaatttagtaattggaaaacaccattctacattgatgagggtcttacatggatcaaagcggattga

SEQ ID NO: 74841 - DNA, 1899 bp, Xenorhabdus bovienii str. oregonense
atggatcaaagcggattgaaattagaacctgaagtagtcgatatactcaaacatattgacgaaggaaataactttctcctaagcggaggtgctgggagtggtaaaacatattctttagttcaggtgataggagaacttctgaggattgaaccatgttcatttattgcatgtattacatatactaatgctgctgttaaagagatagaatcacgtatttccagtaatcggctgtcagtttgtactattcatgattttttatggaatgcaattaaatcctatcagaacgaactacgcaccgttctaatcaaattgatggagggagaagcgcctcagattaaaccaggtaatgcgattgtatctaatgatatgtttgataggaaattaatagaatacaaagagttcagaatgttagaacaagggataatttctcacgatgaaataataattcttgcacgaaatatttttagtaactatccgaaaattcaggatatcttaagagataaattccgctatattctagttgatgaatatcaagatgcatctccttacgttatagacattcttctagacctccttcctttaagctctcgtaaaggcgtatgcggtttttttggtgacagcatgcagtccatttatgatgagggagtaggaacaattcaaagttacattgataaaggtattgtaaaagaggttcaaaaaaagcagaaccgtcgtaatccgtggctcatttatgaactagcaaatcagcttcgttgtgatggtttaatacaaaatgcttctgacgatcaaaatgctcctaatatggacaaaggtataattaaggaaggtactatatgtttttattattcctctggagaaatcgataaattagatcatgtccgtgcacatctaaattggaactttgatgatgagccagaaactaaagagcttaacctaacccacaatctcatagcccctcaagctggttttagggatctgatggaaatatatgacaaagatggtgtattagcttttcgagatcgggtcgtaaaattcatcaaagaatgtgatgacttgaataaatataatgaattaacattcggtgaagtcattaataagctccaaaaagacaaaactggtaaggaactaacagctatcaacccaactccttggatgcaaacttttattaatgacaatcctgatttgtttgaaaaggcgaaaaagaataattttcatctatttcgacatatgtatgtcgacaaaagtcaacttattgatgataaaaagcaaagtgaagatgaaatccaacgaaaaggaacacagcgatgtgattttatcaagcatgtattcaaaatacaaaccatcatccatctttatgaacagagacgatataatgatttcttgcgaaaaacagagttccgtattaataatgctaatgataaagtactcttaaaaaagtatatagaaactatcctttcaatgaaagatcacccaatcattgatgttattaattttgctcataaacataatctttgcattaaagacgatagatttaactgtttctctcaaaaaaaagaatatctttttaataggctaatcaatgttaaatatgaatcttatcaaaaactttacgaatatctggaagggcgcacagcattttctactcaacataaaattaaaggacttgaatttgatcgagttctggttgttttagattcaggaggatggaataaatataattttaactatctttttgagcggaatggtactgaaactgttagactaagaacacaaaaattattttatgtctgctgcacacgtgcaaaagaaagtttagcagtttattttcgtaatccatctaatgcaacacttgaacaagccaaaaattggtttggtactgaaaatgttattaacatataa

SEQ ID NO: 74842 - DNA, 2010 bp, Xenorhabdus bovienii str. oregonense
ttgctggatatttggcttgatgtgccacgtgttcaaattcatcatgtagttcatgtcttgccaaatattgattgggccggtggtgccataggtgtccggttaaattttgaagttggggatgctgagcaattaaaggcggactatcttgagggacgattaaaagccaagaaaatagaaaatgaggctcccgaagagcaaaaaccatctattgcaccaaggaatctggtcgagttcctagaaaattctttctcaaagtatttggttcttaaagcatattcgttggatccagaacagattaagatgcctgatagtaaaggttttgcttgtatacaacctttgtctgtggacgcattggaaatagagggagacccttttcaagatttaataaatttacgcgaaataccagcaatgcgtgatttttcgattggtagtcccttatcatttggcggcgaagattcccagtctggtcgcttagttcaaacactttcagatcatgtccggaattattacgatcagcatattgatcaaactgatacggtgaatgtcgatgatatcagtgcctttagcgctctccagcgcgctgaaaaggcatttgataaacgtttgaagactaatttttcctcggtatttgaagaaataacaaaccttggtatacccggcataaataacccaagtattgttataaatacaaaatttaaatctttagatggacttagccatagctctgccgttcagtataaggtttctcaacctgaagatggtcacgaagaacgatatttaccagagtcttatgcgggactgggatatcagaatttaattgcaatggttttcttattgatgcgttttagacaagactggcttgagcctaaaacgaatcgaacagaagtagtaaagattgcaccacttcagctagttatgattgaagagcctgaagctcatctacattctcaagtgcagcaagtattcataaaaaaggcttatgatgttcttcgcaatcactctgaactgggcgatttagatacgtattctacccaactgctggtaactacacactcaagccatatagcacacgaagttgattttgcaaacctacgctattttcgacgccttccagtagaagttcaaggtcaatcccctacaacaactatcattaatttatctagtgtttttgggaaggacttaaaaactctgagttttgtgaaacggtatattaaggctacggattgtgatcttttcttcgcggatggtgctatttttgttgaaggtcaagctgagcgcattttgattccgcattttattcgttgccattttggtgatctatcacgccgttatatcagtgtgattgatgtcggaggggcaaatgcacgcagattcgagccattaatagaagcattgggattaacatcacttgttatcactgatttggatgcaagccttccaacggaagtggaaactaagaatggaaagaccactactcgcctaaagaaggctcaacctacatttggtgtaaatcaagtgactaccaaccctacattaaaggagtggtatcctaagcttacaaagatagatgatttactttccatggaagaatccaaacattacatatatttctctaatgaatatgatctatatgtcgcctatcaaagagcagttccaaatccaagggataaaaatgagcccaaattagtacctaggacttttgaagatgccttagtttacgccaattttgaagtacttgaaaatatatctggttctttaacaacaaagaaaattgctgaactagttaaaaataaagacaagttatcaaacaacgaacttgaatcggagttgtttggaattgtcaataaagcagaaaaagcggccttcgccatcgactgcttagttgagattaacgacggctcttcactttccccacctccatacattgaggagggattaaaatggttacaagagaaacttgaggagccaagtttattctctgttgagacaggagctgtagctaatggttag

SEQ ID NO: 74843 - DNA, 945 bp, Xenorhabdus bovienii str. oregonense
atggttagttcttttacaacgggaattccagatactgataattcagtggatgtaataattgcagagtgtctaaatccacaagcaccaaagtcttttttcttatatgcaggagctggctccggcaaaacttactcgcttgtgaagggacttgaattttttgaaaaggctcatggagccaaatttagaaaaatcggtaagaaaatagcggtaattacttacactaatgcggcttgtgatgaaattatcgagcgtgtaaagaataatccactttttcatattagcactattcatagtttttgttggcttcagataaaaacttttcacaatgacatccgaaattggttacaagctgcactgtctgatgaaattacggggcttcagaaaaaagaagcaaaggggagatccggtactcaggcatctcttatcaggcaacagagtattgttagtaaaagggagcgtttagattggctttcgaagccgcgcgaatttacatataatcctaatggcgacaacattggcaaaaccccattatcccattctgaggttctcaatattttcggcgattttttgatctcaaagcccgcttttcagcaaattattgtgaatcgctatccatttttgttgatcgatgagagtcaggatactaacaaacaccttattgaagctttctttgtggttgaggaacaacaccaaggtcgctttagtcttggtctcttcggcgacatgatgcaacggatttatggggatggaaaaatagatcttggtgaaaacctccctgatcgttgggcaaaaccaattaaacagatgaatcgtagaagctctagtcgcattgtgacgttagctaatgatattcgagcagaatacgggtcgtgtattcaatatgtgtattgtgagttttattgtgttgagccaattgctgcttataacactaaaatcaccttatga

SEQ ID NO: 74844 - DNA, 2154 bp, Xenorhabdus bovienii str. kraussei Quebec; identical to SEQ ID NO: 74060

SEQ ID NO: 74845 - DNA, 1944 bp, Xenorhabdus bovienii str. kraussei Quebec
atgtcagaagaattttacttagcggaaaccaaacctattgatcatgacaatagggttgatgaaggaatccaagagtgccttcgtataggttcagggaaaagttttatcacctttgcgggggcgggatcaggtaaaacctattctctaaaagaagctctagattttctgaaaaaagaacattctggtaactttattcgtcaaggaaagcaaattgctgttgtaacctttacgaacaacgcagccgatgaaatcatggatcggattgagcaaaatcccatctttgcggtttcaacaattcatagcttttgttggtctgctattgctggttttaatgaagacattcgcaagtggtatctggagaaaattcctgcggttcttgccgaagtagatgatttagaaaggcgtggtcgcgcaggtaaagcgtcagatgctcgaaagagaacaattaccctcctaaaggaaaaaatggattggttgactgaacctcgctcattcatttacgacccaaatggcgttaactctacaaagaatgcgttgtcgcatgcagatgttttaaaaattttctcaagttttttgactactaagccgatgatggcagaagtcattgtaaacaagttccctttcatatttatcgacgaaagtcaggatactaacaaagatgtaatccgtgcattctttgaactgcaatatgctaaatcaaacaaagttgtcatcggcttgtttggagatacgatgcagcgtatcttcggtgggggcgaatctgagctgggtaacactaagtccagcggttggatcactttcgacaaagaaatgaaccatcgctcagcgcgacgcatcgttgctttgggtaatcaaatccgtagtgaatatgataaacgtaaacagtttgcccgagatggggctgcaaacggttacgttcgatatttcttattgtcgaacgatgtttcaaacaaaaatgaaattgaagcaagaattcgtgaggttatggcagaagttacggatgacgcggactggacagatattcaatccaaagatacagctatcttgcttttggaacataaaatggctggacgtcgtcttggttttgatgatctttggaacaagcttgaaaaatcagacaagattaaagagcggatttctaacggtgaaagcaccgagctaaattttttctctgatattgtttttcctatggctgaggcgagtcgtaatgaaagacgaactgaattgatgtctatcctgagagaaaggaattcgccgcttttggaagccaatgtgcttgactctaacaaagatgatccgctctcacttgctcgaactgctgaacatgcgtttaaaaatgtggtttcaaataacaaagtcagttttcgcgcagttctggaagttctggctaagcataatctgctgagaattccggagaaattgctgtcatttgtagtggcctccgaagaaaggaaagttgaatcagagccagaacaaatgggagctatacaggaggttgaatcagaaactgaagaacgggatgacagcgagataactgcttgggctgaagctttggaaactgatttctttcaaattcgaaattataaggactacatcaatgagaattcaatttttctaacccatcaaggcgtgaaaggcaacgaattcaagcgtgttatggttgtcatggatgatgatgaagcaggtgggttcttattttcttacgagcagtattttggagcgaaggagctttctagttcaagcaaaaaaaagcaggatgcgggagaagagactggcttggatcgcactaggcgattgttttatgtcacgtctacacgggcgaaaaatagcctcgcccatgtgatttatacatccgatgtggccaagataaaggaaaaccttattaacaaaaaatttgcgcaagaaggtgagattattgagttttatggaaacaagtacgagtaa

SEQ ID NO: 74846 - DNA, 1881 bp, Xenorhabdus bovienii str. kraussei Becker Underwood
atgacaggattgatggcagacggcaaaaaaacttccgatttagcacaattcattgatgtactaaaaaacagacataagggacttcgcatgagtattttgattgatacaattcgaatagctggttttcgtggaattaagaatttagaagtctcactgtctcgaattataatacttatcggcccaaataatgcaggtaaaacttcgttaatcaaagcccttcagctaagtttaggtgattattctcgctatctttcggaagaggatttttatatttctccagatgaaagacgagtgaacgaaataattgttgatgtcagaattgtgccggcggatgcgaatggagatcgggttgcaaatttcgacattgaatggctaaccgaattcggggataagattcaatctgaagccaatggaaatcaatttgttgcgatcagaacacgctccgaacaaaatgtcactaaaggtggctttgatacgaaccgtaccaccttagagatctggcctccttttgaaacctggacaactattaaggttaaaggtacaaagcttggtagccgcttacagagcctaccgcttgtttctatggaggcgcaaagagatattcatcaggatttacgtgatcgctcatcattcatcgggaagatacttgctagtgttgagtacgacaaaaatgacatattggaacttgagtcactaatcaagcaggtcaatgatggtgctgtcaacaaaagcaaggaactcaaaagcctaaaatcccacctggaaaaactgaatcaatcgattggcggtactggcggtgcagaagtaactccctttccgaaaaaaattcgtgacctgtcaaagaatttttctgtctattctggtgaaaccgataccaattcgttttcgatggaatatcacggcatgggaacacgcagttgggcttcaatgttaacgattaagtctttcgtcgagattttgagtcacagacatattgccgaatctgagcctttattcccaattctgacagttgaagagccagaagcgcatttgcatccgaatgcacagaaaacactttatcaccaactctcagatacaaatggtcaattaattttaagtacgcattctccatttttggctgccatggctgacctttatcaaataagatcattggtaaaaacaaaaaatgggattgtggcacataaaatttctcacacaatgactgatgacgagaaaaaatcaatttcacgtagtatattagctaaaagtggtgaattgctgtttgctaagtgcatgcttttatgtgaaggagtcactgaggagcaggtgcttcccgcgatgtttgagatttatgcatcagctactccttggtctgtcggcctttcttgtgtcaatgttggtggaaaagatgcatatattcattttgcgttgttgccatttagcttcggtataccaatatgtattctcagtgataacgatattaatcctaactctgggactaaaacacaggatgatgtcacgcaacaaatagaaaaattatcgaagaaaatgggtctgccactgacaaatgatttttacgatatttatttccttgatgataaacatgattttgaaaaagaactgattgaccacggcttacgtcatgagatcattgatgcttttgttttacttgcaacaacaggaaataaaaataacgagaaatttagagaagcaaaatataatgaatttaatcaacttactgatgaaaaattattagaaaaaatgagtaaggaaaaagcatcttatgctggtttcttagcagatgtgcttctagcaaataaaagaaaaaaatcagttgatgatttagtaccacctaatgttcgagctagtttcgattgtataaaaggatggttagcatgttaa

SEQ ID NO: 74847 - DNA, 1896 bp, Xenorhabdus bovienii str. kraussei Becker Underwood
atgttaaatttatctaagggtcaagaggccgtagtccacgctgagatcggtctgcctatgcaggtacttgcagcagcaggatctggtaaaactagagtgctaactgaacgtgtacgttatttaatcgaaaacacacgcaaagatggtatcatcgcgctgacattttccaataaagcagccgaagaaatgcaaattcgtttagctgacctggatgtgcttagcgaacgatgctggatagctacaattcatgctgtagctcagcggattttagatcaatatggtcatactattggcttaccttctgaacttcatatttatgaacgcgatttagatcaaaaaactgtttttcttcaatctttaagagaaagtggcattggtatcgatgatttccttaatgctggagatgaaaaaacgcgaaaaaatcgtgatcgtattattcataattacttagaacaattctcagtagttaaaagagaacttttaacagaagaggaaataaaagaaaaatatacttctaatgagtcatttttaagtgtttttcaagcataccaaggtgccttagtgagaagtggtggcttagattttgatgatattttagtttacgcccatagaattttgatggagcaatcatggtgcgctaatatttatagagctaaatataaacatatatgtgtcgatgaggcacaagacttaaacaaagctcagtatgaatttatcaaagtgttgtgtggagaccaaattaagagtgtaatgatggtaggtgatcccaatcaaatgatttatggattcaatggttcatcgtccgattacttatgcaaattatttttacaggatttttctgctcaggttttcgaactgaaagaaaattatcgcagctcaaaggcggtaattagtttagctaataaattgaagccaggatcacaagtagaagctgattttgtactagatggacaatatgaaattcataaatgccaaaatgaagaggacgaagctacttggatttgtaataaggtgaatgaacttctttgtcagaaaataaatattgaaattgaaggcgatatatcgcttaccaatatggttgtgattgcccgaaatcgattcgttttccttaagctagaaaaggtgcttggtgaaaaaggcattccatactcgttgaagaaaagtgagcgtcaagcagaaccatcatctttatttggtagggtgcttgatcttgcaatacgagttcgtcttaatccaaaagattggattgacggtaaaaaactttgtactgctctgaagatatcagttccctctgtctggggtaacgataatttattacttgatatggctgccgccgttcgccactcagcgatttcattccctgatattcaagctgaccttcttgaagaaattcaaggattagacattgaaaagccaaacatacctagactatatgatcgttttaaaacaattattcaaggattgaatgatgttaattttcctaaagaagacaatgagcttgagcgttccttgcaagaactagatgacttcaggaattgctggactaccttcaaaaggaagggattaggtgaatccctcatgtcctttcgtaatgcgattgcattggggcaggttgcagaaaactatgatccaactggtctaacattaagtacagttcacacaatgaaagggcttgagaaagatatcgtttttctcatgggtatgtgtgagggagtatttccagattatcgagctaataccaggaaagaacttgaagaagagcttaatagcgcttttgtagctattacacgcgctaaacgctggatatttgtctcttatccgcttcaaagaattatgccatggggaagttcaaaatcacagaccgtttcacggtttgtaacgatgttgcaaaaatga

SEQ ID NO: 74848 - DNA, 2298 bp, Pseudomonas syringae
atgcaaattcagcatctggaaatcgcgaacttccgcaagctcctatccgtacgggtcgacctcgcagccgagaccacgctccttgtcggagccaacaacagtggcaaatcatctgcgatgctggccttgcgcaagttcctactttcgaaagcatcgatttttagattgcaagatcttactctgagccatctcgccacaatcgatgccattggtgaagcttgggaggctgcagatgatagcttccccatcccagtcgcaaatgaatgggctgactggttgccaacactagatatttggcttgaagcagctcagggcgaacttcatcacatccgagatctcataccgaacttcgcttggaaaggcggccatgtcggtatgcggttccggctggaaccggatgatatgccaacgctgttcgtcgattaccgcaaagaacgagcacgagtgaaggagcttcagcaggaaattcaaaaacaggcagtgctaggtacacagccaccatcgcttccgctctggccgcaaagcctgcatgactacctaaatcggcggattggtaaaaccttcaagatccgatggtaccgacttgatccaggccagctacgagcaccaaatcctgcgactcgtaaagctaaccggcaaccgcttgcggccactgctacgccacttgaacgcaaccccctaacagacctgattcgagtccacgagatcaatgctcaacgcggctttggtgacagcgctgacgaaggagtcctagagggaggacatggatcgggcaggaagctctcggaacaattgcgagcgtactacagtaggcatctcgatcctggcgatagcccagatatttcagatttagaggcactcagagcaattgaggcagctcaaactgcctttgacacgcgcttgagcacgagcttcgcgcctgcgctcaaggaagttgccggcttgggctatccaaataactccgacccgtccattcgagtttccacccgccttgcccctaccgacgggatgaaccacgaagcagcggtgctgtttgaattggattccgttggaggagcccctggagcaccgcctcttaggcttccggaaacgtccaacgggctcggataccagaacctcatctcaatgatattccgattgatggcatttcgagatgaatggctgaagaagtacagaagtcctgaagagcaaagtgctactggtgttgagcctatacatttggttctgatagaagagccggaggctcacctgcacgtccaagttcagcaagcatttataaaacacgcctaccatgtgctttgcagcgacccattgttagcgaagtatccgaacctcagaacacagctgatggtcagttcacactccagccacgtagctcatgaaattgactacgaaaacttgagatacttccgccggcttccgtccggcatggccgggatatcaatcccagtctctaccgtctccaacctgagtacagtgttcggcgagtccaatcaaacgaaggaatttgttacccgttatcttcgggcccaacatgccgacctgttctttgcagatgcggtaatccttgttgaaggggccgctgagcgtatgatgcttcctcattttttgcggcagcactttcgtttcctagaccagtgctacataaccattttggatattgggggaagtcacgcgcatcggctccggccccttatcgatgcattgggcattgtgactctggtgataactgacttggacgcgggtctcctacaggtcggcaaacctgtcgagaggaagaaaggccaaaccactaacaacccaaccgtgcgccattggatgcgcgcagcaggccttggacatgatgtggactcattactagatctgtccttcggcagtaaagcacagcaaattgacgatctgttttcgatcaggatcgcttatcagacgcccattactgtccgcttacccaaaactgggctagatgtcgaagcattaccaaatacctttgaagacagcctcgtcctgagcaatacagagcattttgctaacaaagcggggcgcgggctgatgcgatcctttgccaaggcgctacgtgaagcagaaacatccttagagcttggcaccgagctattcaccaaactcaaggatggtgataaggctgagttcgcactacacgttctcggcgactctaatttcgcgacgttgaaggtgcctacttacatccatgaaggcttggcgtggttgcagtccaagctcgaaagaaaaagcaaagagctactgatcatcccttcagcgattctggaggtgacgccatga

SEQ ID NO: 74849 - DNA, 1872 bp, Pseudomonas syringae
atgagccggcagccggaagctgctacggatgatgttccagatgccgatcagatcattcaggaatgtctgaatctcgaccatcccaagagttttttcctatatgccggcgctggctctggaaaaacccactcattggtcgaggccgtgaaaaacctgaagagtagggagcggcaacggctgacgtttgaagggcgtcaaatcgcgatcatcacctatacaaatgctgcatccgatgaaatttcccgccgtcttgaacacgatccattggtggtcgtatcaactatccacgcgttctcttggcggatgattcaaggctttaataccgacattcgtgagtggcttagggccaaactcacgcgagatattggcgagcttaatgagaagctcggaaaggcccgaggacaaaacaagacatttctagcgaatcaagcttcaagggatagcaaagctcgtcgccttgattccctggatgagatatcaacattcatttacagccctaccggcgacaatcgcggtaggcaagccctaaatcatagtgaagtcattcaaatggccgctgcttttattcagcagcctccattgctgaacgttatggcggatctgcatccggtacttttgatcgatgagagccaagatacctatggccctcttatggatgcttttctgcgagcacaatccctcatccctgaccgtttctgtctcgggcttctcggagatactatgcaacgcatctacaacgacgggaaggtgcgcttggaggaagcaatccctccagattgggccgtgcccgaaaagcgcatgaaccgtcgctgcccaacacgcgttgttgatctaatcaacgtaatccgcgcgggcgtagacagtcatcagcagaaaccaaagccggacgctgtagaaggcacggttcgaatgttttgcacccaacatataccaggtcaagatttcgagttggaggaagacatcgcacaccgcatggcagccattaccggcgacgctcagtgggcaactggtaaagatggaagaaaatccctgattcttgaacacaagatggccggacgccgaatggggttcgagggtgtgttcacaccgttgcatagagttgaacacctgcggacggggctactggatggaacactgccaatcttgaaactgttttttgaacgagtagcccctattcttcaagctgccaagacgaatagtttcagcctcatggaggcggtgcggcttcagtctccacttctcaaccctaaatccatgaaagaggcgcctgaccaattagccttgcttgagaaagcaggagaatctactgagtcactgtgcgaactattcaatgacaacgctccctcgataggtgacgtgactcatctcctactccgaacaggactattagatctccctgataagcttgtagcagctttgttgctgggcgccaccactgatgaccctcctgacacatcggatcgtgacgcactagaaacccatgcataccaaattctactggggcgcccctattcagaaatggctggatttgctggctatactgatgggctttctcccttcgatacgcaccaaggtgtgaaggggctagaattccccagagtcatggtcatccttagtgatgaagaagcaggtggtttcctgttcagttacgacaaactgctgggcgtcaaaccagcttctgacagtgatgtaaaaaatcaacgcgagggcaatgatgattccttggctcgcactcgtcgcctgctgtacgtcacttgcagccgggccgaagagtctctcgcgattgtggtgtacaccgcacatcccgacaaagctaagcagcaagttatcgacgcaggatggctcaaggcagaagagatcgagattctgtga

SEQ ID NO: 74850 - DNA, 1917 bp, Pseudomonas syringae
atgtatttacgtactttagatattcacggtttcaaatgcttcggcgagcctttcacgattgaattccacgatggtctcaatgttttagtaggcgagaacggagccggtaagacaggtgtcgtcgcagccgttcgccagctctttaatgactctgaatcgggcaaacgtctgatcaatgagcgagattttcatcgcggatttcacgaggaagcaacaacggcgcaaagaattgatattcaagccacattttctgacctggatgagaatgacgccatagctttcagggattggtgcggcaacgaagatgaggcaaaactcacatttactgcgctcaatttggaatcgcgggggcggttcaaaagccagctttacggcggttatgcacgagctacagcgctggaaaccgagacccttgaccttattcactgcatctacttaccgccactgcgtgatgcagaaacaaaactccgggatgggcgtcagtcccgtctagcccgacttctgaaggcgctctgccgcaaggaacttgatacagctcgtaaggagggtaaaccgcatccgttggaggagcgagttggtgcgttcaaccaagagctttccgcgagcgacgactacgcaatcaagcaagcgaatgaacgaattgggaatagcttgaggacagcattagggatgcacctgtcccagaacactctcattcagttctcggaagtgagcttttcgcgcatcgttgaaggtctacgtttactttactttccgaacctatcagcggccgacgctacgcagttccggtctctagaagaaaacagtcttggctacaacaacctgctgtacattgcttctattctggctgagcttacgttagaggttgaggaggagcgcggggaagaaacctacttgcggcttctgttgattgaagagcccgaagcccatcttcatcctcagcttcagatacgtctcctgaaacacctcagcactgtggccaaagaaaaaagtatccaggtaattgttaccacccattccacggtcatttcatccgcagtttcagttgatgaaatcattcatctctccaacaaatgcaacccggtcgcgatacctctgcggacgtgtggacttccagaaccaagccggaaattcattgaccggtggctcgacgtcactaaatccaacctgcttttttcgaaaggctctatcttggttgaaggcatagcagaggcgatggttatcccagagctggcgcgtagggtgcttgctcactacggcgacgggggaaacacactggaagattacggtgtatccgtcataaacctaggcgggatctacttcaaacatttcatgcagctgttttgcgacgtgactgatgagagcgcaggggagaacgtgccggtacgctgtgcgggtttgaccgacaaggatccacccaaaacgatcaaagttgatgttgacggtggggaacacgtggtaattgagtacatgccgaacgacgacgatttgagggatggtgagaaccatgctctcgcctacatcgccaaaattggacagtctcagttcggtcgcctttacgcaggtaattacaaaaccttcgagtacgatatcgctatggagggagcaaacctgcgaatgatgctctccgtagcggccgatctctggcctgcccaggatggagcggtcgcgccagagctgcgagaaagagcgaagcttgcctttgacgatatggaaagtcccgagcgagcaggacacgcgtctgagctgctctatcgcatagattccaccagtattggaaaaggaatctatgcgcaggcttttgccgaagagcttgagaagcaggaacacgaattcgtcgtaccagcctacatccgtgatgcgattctttgggcttgcggacttgaggagcccctgctcaatgataaagctaactga

SEQ ID NO: 74851 - DNA, 1755 bp, Pseudomonas syringae
atgataaagctaactgacgagcagaaagcctatatcggcgcccccatcgacaagcatgtttatctcaatgcttgtccaggcagtggcaagacagaggtcgtcgcggccatggtggccaaggttgtagatgagtggactggcttccctggcggaattgcggttttaaccttctccaacagcgcaacggacgaacttaaaaacagattggttcgctatctaggagagccgctggggtttcctcatctagtgtccaccttcgatagctttgtccactcccgaatggtcgcaagcatcgcaagcgaggttactgagtttccagcgaaggatggggacagtcggatcaggatcttggaaaacaaggccgacatattccacactcgaaaaaaaatctgtggccgttcggtctccgcctgtaagtataactacgacttagagaccaaaagtttcacgttctcgaccggcgagcggactcgagataaacagctcaatgacgctccaatcactaatgttgccctggaagatctgatcaagacgaagaagcgcttttgggcagcaggttttgcgacatacaaagatatggacatgattgccctggcggcgctcaagaagccctcccttaagagctattttcagcgccttgcgaagcgatttccactggtcattgtcgacgagtgccaagacctgtcagcagagcaactggcgatggtacggaggctccatgtccttggcgttaaattccattttataggcgacttgaaccaatcgatctacgggttcagaaaatctaatccagacaatgtgaaggtactccttgccgagctccgtttcgtagagctgccactcacagcgaattggagaagtgggcaatccatcgtcgatctctgtagtgatttgctgcgaatcaaacggatttctggcaatccagaaattgcatctgttaaaccgcttttgctgcaatatgcgaaatgtccttcagagcttattccgaaaatcattgagctcaccaatggatatggagaggtcgtcgttgtcgctcgtgggcacagcaccttgcaacggtttcgcagaggcgacagtttcaagggcgttgaagtgctggcactggcatgcgttgctgccagtaatgggagcaataaggagttgaacgtcgcggtagcactattcgctggatggttcgcagataggctgtccctgcaagtcacgacatcaggccctcactgcccgttagcgatcgagtccaagcttgcttggaggaaattcattcaccaatgcttaaagcacttggttgccgccggcgctgctgatacgaatctgacgtggaaggagtgggcggcagtagtaaaaaaaactatgcgtaacttgcccgatcaggctttcgtgttggatgaaatcagcggtgatcttgagccgcttagggtgctggaacttcgatcccccgcgaagcagggcgatatagcactttccgtccgccttagccaagcggttgctcaacaacctgtcgcagacgccctacgctacgagaccatccatcaagtcaagggcgagactcacgatgcaacggtggtcgtgtcatcgcttcaaaaaggcattcacctttctcattggaaagagtggctggccaaccctacatccgaaggcgcgaggttcgcttacgtggcaagttcacgcccacgccacatgcttatctgggcagtgaagaatctgaaagccgatgagataaaaacgcttactgggttagggtttgaactcgtctga

SEQ ID NO: 74852 - DNA, 1953 bp, Pseudomonas syringae
atgaagattaccaaaatttctgctgttaatttccgagctctccagaatgtgacactagagttgcgggacagcctatctctgcttattggcagaaataatagcggcaaaacttcactgcttgtattgtttgagaagttttatgagcctggggtgtcgttcaattatcatgactttccgttagcggtgcgtaaagatttagcggcaattgaccacaaaactgacatgttgccgctatctataagtatgagggttgagatcgaatatgatgaaaaagacagcttgaggcatctgtcagaattcatgttggatcttgacagcgagattaacaatgtcaagattctatttgagtgcgttgtaaataaggacttgttgctgagggatattgagcagttcgagggggaacgagaaaggtttttgaggaaaaacctcgataggtatttgcaggtcaacgtatacgcatatgctgatgaggacgatctgttacttgaaaatcgaagtaggttggtaaaaaaggaaatagccgcagttagagatctgatcaactttcagataattcatgctaagcgagatgttgctagtagcgaaggcggaaagaaaatgctttctaagttaactacgcaatatttcaataaggcaaacaaggatgtaacagatttcgatccgataaataacttgcttcttaaaattgatgagagtcttgaaagtagttacaaggattttttcgagcctttcctgaaaacctcaaaggcatttctggggattgaggatattaaggtcgtatctaatctcgagtccaatgaagtgctggagaatagttcgcaagtagtttatggtgaccgttctgagtttctcccggaaacatttaatggtctcgggcacatgaatattctttatctcctactaagcgtagagattaagaaggagtcatttgctaagacaggtaaaaacataaatctattattcatagaggaacctgaggcgcatacacaccctcagatgcaatatgtttttgctaatcagataaaaagtatattgaacgacattgaaaatatccaggcggtaattactactcattcctctcatattgtatctcaatgcgatttcaaagatattagatatttgcaaaactcagatggttgtacaagggtaaagaatttctattcggaattgaaagccaaatacggtaaggacgaggattcatttaaatttctagagcagtacctgaccctcaactcttgtgagcttttctttgcaagcaaagttatatttattgagggtgttactgaacgtatgttgtggccatacttcgtagagttatttgataggtcgaaggttcaaagtaaagatcatatttcgttattctcccagaatgtcacaattttggaagtcggtgctaatgctaaggctttcaagcatttccttgattttttagaaattaagactctggtcatcactgatatcgatacaaccaaaaaaactattgatactaaaaaggcaaacccgagaactatctatccgtcctttaaagttgcaggtgcagatcataccagtaatgctacgctgaaatactattatgacgcgcccgatttctctgaggaggctaagttttccagctggtttgaaaagttagtcgcacacgaactaaagcattcgtatcctaaagttcatattgcttatcagaaaaaagaagaagggtaccacgctaggagttttgaggatgcttttgtgcatctaaatagggacgtaatcaaaaagaaaattgataatatcaatgggctgaaaaatacgcacgaatttgatggcgcgcttgatgcgtatgatctgattgaaacagttttagataagaagtctgcgttcgcgtcttctctgttgtacctagcactgacggatgatgaagtcacttggcgtattccagcttatatcggggaggcgttggaatggatatcggaatga

SEQ ID NO: 74853 - DNA, 1995 bp, Pseudomonas syringae
atggatatcggaatgactccttttgagaatattatatcttgcctggaaagaggtgaaagctttgtcctgcaaggaggtgctggaagtggaaaaacagaaaccctgaaaaaattgttggattacatatctaaacacatgccggaaaaaagagtggcatgtataacacatacaaatttggctgcggatgaaatcaaggctcgtgcaggagagttgcatgctattagcacgattcattcgtttctgaacgggatcatcaactcctttcgtatagatttgcataaagtaatacatgagcttttcctattgccagaatttagagtagggcaagccatggatgacgacaaggagtataagaagcgcgagcatgaacgttataaaaaggcctacggaaaatatgcagataaagcataccttattctcaagataaaagaggccaaggtcttggggaaaccaatgtatgacaaagatcctcaagcggcaaatactgtattaaatgagaaaataaaacaccttaatgcaagggtgcttgagcatattaagaaagcttcacctcaaaaggtttgttataacgagaccgcattcgatagttttcgcgatttaagctttggtcatgacgggcttgttaagttggcagtctcgttaatgtgcgaaagaaaaaaattaagaaagatattggctgataagtatgattatatatttgtcgatgagtatcaagatacttctcctgatatagtcaaggcgttttttgattatgtcgtaaaagaccagaatatagtattcgggttctttggtgactcgatgcagggtatatatgaggatggcgtcggagatgtagagaattatgtgcaagcaggtgcgatagagaagataaacaaagaggataattacaggtgctcggaacaggttgtcaagctcattaataacctaagggacgatgggctggaacaaagtgttgcattcaaaactcgggagaatggagatttagaaaccctggcggaccgccagggtagagtcaagctcgtttatgcaatttgcgacgataagcctacccagcacagcccacgcgaagagaaagattcataccttaaaaagcttaataaattgattgaaacggcgcggggtgtcgatagctataagatgttgatgttgacaaataaggctgttgcttctgaagctggattcagtcagttgtatgaaatatttaactctagatttggacaagcaacaaatgagaatttagagaaagtattggcaatatgccatttttctgagctatatgagttgcacgaagattatggaaataaaagatatgcaaaagtcattcgtttcgtaaaaaaatctggcttcgtattggattcggttttccacaaagatgaattgttggtcgcgttcaaaagtgtttttgatttgaactctccagcgcatggtgcgatacatgaatcgtttaaattgaagctattgaagcaatcggattcgtatgaacggttcgtgagaagaagagaagaatttttcgaggctgctatggggaattccagatactctgctttcaaagatcactacgtgtctgggtttgatagtcttagtaaattaaacaaagctggctttgatattgatgagtatgagtttggtgatttggagcgtgatgtaaagcgagagctattttataatgatttttttggaggaaaaataactctgggtgaagtgtttaagtattatgattatttgtcagagaaaacaaatttcataactatgcacaagacgaaaggttcggggatcgaaaacgttttggtggtagcagacgagtttttttggagggactacaagtttggtaatgttttttcggctggggatataacagccgagaatagaaagattatgtatgttgcttgctctcgggctatcaagaatttgacgtgtgtgcggataatgagcactgaagaatcctcaactatcaaagattatttcaatgagatagagtgtgtaagtttagattga

SEQ ID NO: 74854 - DNA, 1140 bp, Hyalangium minutum
atgcgattcacccacatcggcttggagaattggcgcaacttccttgaggtcgctgtacctcttgagggccgcgtctttcttgtggggccgaatgcagctgggaagtccaatttcctcgacgccatccgcttcttgcgcgatgtcgcggatgtccagggtggttttcagcgtgctgtctcctctcgccgaggcgtgtcccagatccgctccctgcacgcacgccggtacccgaatgtcgcggtggaggtgatggtcgatctctccgacggcaagccgtggggataccggctggagttcactcaggacaaccaacgcaggcctgtggtcaagcgggagatcgtcacacacggtgatgacacactgctgtcccggcccaacagcgaggacaagcgcgaccctgagctcttgacccaaacgcacttggagcaagtcaatacgaaccggcggtttcgcgagctggcggatttcttcgccaaagtgcggtatctgcaccttgttcctcaactggtgcgtgagcccgatcgctcagctgggcgggtgaatgatgcatttggtggagatttcttggagcagcttgcgagagcgccctccaagacactcaagtcacgattgaagcgaatcactcatgcgcttcgggtagcagttccccaacttcaagagctggatttgaagagggacgagcgaggggttccgcacttgttggggcggtataagcactggcgtcccaatgcagggtggcagaacgagacacagctctccgatgggacgctgcggctcctcgggttgctgtgggtctttctcgacggcacagcccccctgctgttggaggaaccggagctgtctcttcacaccgcagttgtccgccatatcccgcagatactcgctcgcttgagccggaagagtgaccggcaggtgctcgtgagcacccatagcgccgatatgttgtcggatccggggatcggtgcagaggaggttctggtactagagcctctcaaagaagggacgcggatcgaagtggccaaggatgtcgagcagatccgttcccttcttgaaggaggaatgtccatggccgaggcagtcatcccaaggacagcacccgtgggagcagagcaacttccactctttggggatgcgctgtga

SEQ ID NO: 74855 - DNA, 2325 bp, Hyalangium minutum
gtgaatccgcacgaagccgccctgctcgaagacctgaacccgcctcagaaggaggccgtcctccatggggacggtccgctgctcgtcctgtcgggggccggcagtggcaagacgcgcgtcattactcgccgcgtcgcccacctggtgacggtccgccgcgtgttcccctggcgcatcctcgccgtcaccttcaccaacaaggccgcccgcgagatgcgcgagcgtctgacacagctgctcggcgctcaggcccatgagctcgtggtcagcacgttccactcgtccgccgccatgattctccgccgcgaggccgaggccgtgggcctgactcgcagcttcgtcatctatgacgatggggatcagctcgggctcgtgaagcgcgccatgcgcgatgcccgcgtggagccgctgctgcagccgcgcgagattctccaccgcatcgatcaggagaagaacgccgcccgcctgcccgaggacatgcaggtggacatcgacgacatacgcggcatggtggtgaagaagacgtatcaggcctatcagcgcctgctgcgcgccgccaacgccgtggactttggcgatctgctcctgctgctggtgaccctgttccgcaagcggccggatgtgctggccaagtaccggcagcgcttctctcatgtgctcgtggacgagttccaagacaccaaccctgtccagtatgagctgctgcgcctgctagcgcctccgccgggcgccaacctcgtggtggtgggcgatgatgaccagtccatctaccggtggcgcggcgccagcgtggacaacatcctcggcttccctcagcagtacccgggggcccgggtcgtcaagctggagcagaactaccgctcggacaagaacatcctcgaggccgcgcacgccgtcatctctcacaaccggcggcgcatgcccaagaagctctggagcgagcggcccccgggcgcgaacctcgatctgctcatcaaccgcgatgagcgcgccgaggcccaggaggtcgcccggcgcgttctggcgctccagcgcgagggcttcatcaagtactccagcatggccgtcttctacagggccaacgcgcagagccgcgtgctcgaagaggccatgcgcctggcccgtgtgccgtacaccctggtcagtggccgcagcttctatgaccgcgccgaggttcgcgatgccgccgcgtatctgcgcctcatggtcaacccgcgctcggatgcggacctgctgcgcgtcatcaacaccccggcccgtggcatcggcgacaccaccgtggagcggctctccgactacgccgatgctcagggcatcagcctgtatgaggccatcgagcggccggagaagattcccgcgctcaatgcggcggccgcgcggcggctgggtgggtttcatgtgctggtgtcttccctgaacgcgtttgcccagaaggcccaggatgccgcgggcgccgtggacgagatgttgaaggagaccaagctcgtcgagtccctcatggccgagggcagcgatgagtccatcactcgcgcggagaaccttcgcgagttcttgggcgcggcgcaggagttcgacctgaaccgtgcggctgctgccgtggctgccgcagcggctcagcccgcagagggcgccgagcctccgcctcccgaactggatgcggctccgcttaccgcggatgtgcctccgcttcaggcgttcctggagcagatcagtctggtcggtgaggcggatgcggaggtgggggagggccgggtggcgctcatgacgctgcatgccgccaagggcctggagttcgatgctgtgttcctcaccggcatggaggacggggtcttcccgcactcgcgctcgctggccgtcgaggatcccgaggacagtgaggagatggccgaggagcggcgcctctgctacgtgggctttacccgtgctcgaaagcggctgttcatcagtttcgcgcagtgccgctctctcttcggtgagcttcgctacaacccgccctctcgcttcctgcgggacgtgccgcaaggactcttcggcatcgagcaggaggttcaggaagccccgcgtcccatgccctcggctgtggctccgcgccgccgctcgtatgacgaggacgatgggccgcgcgtggatcgctcctactcgcaggccgccgatggcgaggggatgggcggggacgtgcggggcatgcgcgtgcgccacgagcagttcggtgtgggccgcatcatctccgccgacggctcgggccccaatgcgaaggtgacggtcgagttcggcggtggcgtgggcctcaagcgtgtcatcgcccggttcctcatgccgggctga

SEQ ID NO: 74856 - DNA, 2046 bp, Flavobacterium reichenbachii
atgaaaattaaaactcttgaaataaaaaattttagattattaaaaaatgtaaccctttctttggaagaccacaccacggttattgttggacgaaataactcaggtaaaacctctttgactgaaatttttcgaagacttataggagataagaatccatcattttcaatttatgattttagtctctctgcaatgcagggttttgtgaaagcacttcattttaaacttgaaggaagagatgatgatgaaataagagcagaaattccatatattgaaattcgaatcaccattgaatatccagtcgatcttgaggatctgggaatattaggtgattttattatagatcttgatcctgcaagtaatgtagcgattatagctgttaaatatgctctgaaaaatggcaaaattgaatctcttttcgaaggagtagcagatatggatgaaggaagcctaaagatttttatgaaatctctcaaggaaaggattcctagtctttttgaaacccatataacagctgttgatcctacagatcctgaaaatacagctccaattgagtattccaaatttaggtctgtattaggtgccagctttataaatgctcagagaggacttgatgatgttactcattctgaaaaagatgtgctgggaaaggttttagcgcagctttttaaaacttctcaatcgaatgctgctcccgacgacatgaaaagtaattcagcagaattaaaagttatagttgacgatattcaaaataaggtcgatactgattttaatacccagttaaacaaacttttgccagcactcggtctgtttggttatcctgggctttctgatcctaatctgagtactgaaacgaccatagacatatctaatattctagagagtcatacaaaaatccgatatggtcagggtaataatctttttctgccggaaacatataatggattgggatcaaggaatttaatttatattttattccagctctttgagttttttcgaagatatcaaagcagacagatttcgaatagtttagatattatttttattgaagagcctgaagcacatctgcatccgcagatgcagcagatttttattagaaaattatatgagattgcaaatgagttttcaaagactttgaacgatgggaagccttggccagttcaatttgttgtcacaacacattctacacatatggctaacgaggctgaattcgaagcaattcgttattttttaacttcaagcggggcggaaagacacactgtagtaaaagatttaagaaaggaatttaggactgatgatcttaaggaagataaagaatttttacataaatatttaaccctcacaaaatgtgacttatattttgcagataaagccattctttttgaaggtccggcagaaaggttaatgatgcctctgcttatagctaaaagagatgagctggatttaaacaaaccacagcttggtttgcagtatgttacagccattgaggtaggcggagcttttgcacatcatttctataaatttttagattttcttgaactgcaatgtttggttatcactgatttagattcggtgctgatgacaaagggagagaaaactacttacccaggttcattagtgcaaaatggctcgcatacttcaaatgcaggtataaaaaattggtttgccaaaggtacagaaggacattatctgcttccagattgtcttgctcagacagcagaaactaaagtttcaggatcgagaagaattgcttttcaaattgctgaggaaggaaagacagcgattggaagaagctttgaggaagcatttattttggcgaacagagagcattttggaatttcggaaattagtgaaaatgatgctgaggtaagtgctgaaaaatttgctccagaaaacaagaagaaaactgaatttgctttaaaatattcactggaaaacacgaaatggaatgctcctaaatatattcttgacggtcttgattggcttgcagttaagcctgtttcgcctgaaatgtatattgctgaagatgttaaacaaccaacaaaataa

SEQ ID NO: 74857 - DNA, 1758 bp, Flavobacterium reichenbachii
atggcagaaagtttagaaataagtcctgctgaaaatgcatcaattgaatgtttgagcagagtttttaaggctattgatgaaaaaaagcattttcttgttgaagcaggtgcaggtgcaggaaaaacttatactttaattaaagctttaaaacatcttattagtaagtatgatgtagaatatttaaagacaagcaggaaaattgcctgtatcacatatactaatgtggctaaagacgaaattcgttccagaacagataatcatcctatagttttagccgacaccatacacgccttcgcatgggaagccattcaaaattttcaaaaaggacttcgtgataggatggtagaattgggtgatagatggcaggaaaggattgcagaggctggaggaattacatcgcaaaaggttgtatatagtttaggatatccaaaaataacagcgaccgagatatctttacatcacaatgatgttatcaaattatttacatctcttttgtatgacgataagtttaaaaagattttttcaagcaggtatccgataattctaattgatgaatatcaagacacaaataaaggcttagcggatgcgttagtgaccaattttatagaagaagagtctaatctaattttaggtttttttggggatcactggcagaagatttatggaacggagtcttgcggttttattgaggcaacggaaggaaaaatggaagttatcggcaaacaggccaattttcggtcagataaaaatattgtctcagttctaaataaaatgagacctgaacttaagcagtttgagtataatccagaatctgaaggagaaatagttgtttttcatagcaataactggaaaggggaacgtagaacaggaggacattggagtggtgacttgccagaagacattgcacatgattatttggaatggaccaaggaagaattaaataaaggagattggaatattagttccgaaacaacaaaaattctaatgttaactaacaatgtactggcctccgaacaaggctatcagaatgttgcaaatgcattttctgataacgatgattatctaaaaaagaataatgattatatggcatttcttatagatacggtagaaataggttgtgaagcattcctaaataaaaagtacggagaaatgattcaggcatttaatgcaggaacacccaagatccgaaagcatgcagacaagaaagtttggtttgatgatatgactaaacttcttacgctcagtaatggcggaactatcggggaagtattagatttattaaaaacaacaagtaaaccaaaattaccgaagaagattgaagagaaagagcagcgttttacacaaattaaagctgttgaggaaaaagactgggaagaagaggataggagttttgcttccaaaatcaactcgattagatcaattccgtattctgaaattgcaaatgtatcaaactacattgatgataaaacattgtattctacaaaacacggtgtgaaaggtgctgaatttgaaaatgtaattatagttttaggcagaggatggaaccagtataattggaatcaatttttagaatggatgaatgctggaattccagaaggaaggcaagattcatttgaaagaaatagaaatctattttatgtcgcttgttcaagaccgcaaaagagactgtgcctgctttttacacaggaactttccgaaaatgcatttcaaagtctgaataagttgtttggaaatgttgttaaggaagcatgcagctaa

SEQ ID NO: 74858 - DNA, 2064 bp, Flavobacterium hydatis
atgtatatagcacgaataaaaatcagcaattttagaaattttacagatcagacagtactattcaatgagggagtaaatgtaattattggtcataacaatgcaggaaaaaccaatctgcttaaagcgctttcattagttcttgacagtaatgcctccaaacgattagaaacagatgattttaataaaaatgttgaattcagtcagttgcaggccgctccgccaaaaatcagcatctcccttacaatcaaaaaaggcagtcacacagaactggatgacctggttacagttggaaattggctgacagtgcttgatactaaatacgaggcactacttacttatgagtttttcctgcctgaaaaggatattcccgattatttagcagcaatgaaaagtattacagatactgatcctataaaagcacgagaaacagcctggaaaataattaaacatgatttcataaggttatttgtagcgagaatatggggcggcaatctagtcaatcggactgctgctgatcatgaatcacttcaaaaatttgattttcagtttttggacgcaataagggatgttgaaaaagacatgctgacgggtagaaatacacttcttcgggaagtatttgatttttttatggattacgggataaaaaatgaacctgaggtaactaaatctaaaagtaaaaaacttgcagaaattaagcagcttaaacaggatttctccttacaggctgaccaactgataagtacccttcatacaagaatgaaagaaggtaaagatcaaatattatcctatgcaaataaaaccggggcttcatttgatgcgccacctaattttgagggaagtatgagtgatattgaaatgtattctgtactaaagctcattgttgaatatgaaagcggcattaaaattccggcaacacataatggacttggatataacaatcttatatatatgtctttattgcttgcgaaaatgcaggtcaattctaatggggattatatgggaagcaattctaaagtctttgcaacattggctattgaggagcccgaagcccacctgcatcctgctatgcaatataaatttctaaaattccttcgagaaaataaaaaagaaaataaggtaaggcagatttttgtgacgtctcattctaccaatattacctccgccgtatccttggatgagattatatgcctacacaatgacaaaggcgtaacaacggtaggttatcctggaaaagtatttccggatgatggtaaaagtaaaaagtatgtacagcgctttttagatgctacgaagtcagatatgttattcgcaaaaagtatcgtattggtagaaggtttggcagaacagcttcttatgtccgtatttgctcaatatgaggggacaccccttgaagagaaccatactgctgttataaatgtcggaggaagattctttgaacatttcttatatctttttgataccgataaaccgtttacgattccaaaaaaaatagtttgtattaccgatagggatcctgaaagaaaagagttgccgtcaggcaggtttaaaaaatgctatccatatgaggtagatattgatactgctagctatgcttatcaaaacaatccttcatcaggtttgtatccggaaggaagtcataagaacattgctttttttacacaagacgcaacctatgggaaaacattggaatatgaccttatcctgagcaatactgtttcagaattgctaattactgacggtatgtcaaacagcagtgaaattttaaaattaatgaagttgtatgcagataaaaaaccgattaatgaatttttggatatcctgaggtctagtgatgaaaacaataggattatggctggaataagtgcttcggtatggccggatgaagaaaaaaagaaagctattatagcggcacgttacctaaattctgtaggtaaaggggaaaatgcgctgaacctttctgttcagcttattgaaaatctagacgagaaaggaaaggccggatatcaggattttattgtaccggattacattaagaaagcaattacatatatatgcaaaccataa

SEQ ID NO: 74859 - DNA, 1692 bp, Flavobacterium hydatis
atgcaaaccataacatctcaagatatacttcctgatattgaacatcattttcgcatatcagccggccctggtgctggaaagacgcattggttgaccgagcatataagaaatatactgcataagtctgttcgaatggccgcaacacgcaggatagcttgtattacctacacaaacattgctgttgaaaccatactaaagaggctgggtacttcagtaacaagagttgaggtctccacaattcacagctttttgtatgaaaatataataaagccttatgtgtttcttgtagcagatgagtatggtttagatgtttctcaaatggatggacatgatgataccattctttcaaattatggctttctttcggattggaaagcaaaaacatcgcaggtttatcttcgagacgacaaagagatagctaaggctttcagtaagatacaatggaaatttaagaataaagaggaattggaagctaaaccaagccggccttacgctgttaatggaaccaatataaaaactgcctcttatatggtttacaagagaatggcttgggaaaaaggtattatgcatcatgatgatgtattattttttagctatcagatcatcaagaaacatccatttatattggaagttttaagagccaattttccttatatattcatagatgaattccaggatagcagcccgatacaagtgaaaatatttcaagcagtgggacaaaaagaaagcatcatcggaatcataggagatactgcgcagtctatttatgtatttcagggatctgatccggctgaatttaagaaatttaaattaaaagggatgaaggattatgtaatggaagataatcgaagaagtaccaatgaaattattgatgtactgaacataacaagaacggatataaaacaaaaaaaatatcggaatatagaaggaaatctcccgtttattttgattggtgaaaggagtagtgcattggcatttgcccaatcccactgtggaacccaacctgtctattcactctcaagacataatattacagcaaatgcaatgaaaaaagaaatctcaggtgctttcaattctaaactttttgatgaactttccgaaaaagataaacctggtagtggtaataaatatcggagtagtgctgtagcaagctgtcttaaggctgtggagtatgcgcgagtaggtaaattcaaagattctattaaagaaatggaaagacaattcaaatacgaatctgatccttttaaaagaaaaagtattgccttaaatcatatcgtaactttacttgaacactatgaggggtactccaaggggacattatacgatttttttcttttggtaaaggggcaaattaaaaccaatattacaaatttaggatccggtgttgccaaagaattttatgtgggacatagttatcagaatatggcattatgcgtgaaaattcctgaagatatcagtcagcataaaacaattcataaagccaaaggagacgaatttgataatgtgttggtaattactttagaagaaagtgatttagattttctaatcactcccgattttgctaaagaagtgcatcgtcttcattatgtggcagcaagcagggctagagagaagctgtttatttcagtgcctgccttaagcttggcaaaccaaaacactttagaaaaatattttactattaaaactatttaa

SEQ ID NO: 74860 - DNA, 2181 bp, Chryseobacterium sp. JM1
atgaaaattgattttgtaaaaattaaaaactttagaaaacttcagaattgcaaaatagagttttcagatgaggaaacaatactagttggagctaataatagtggcaaaacaacagctatagaagctctgatggctttcttgaaagaaaagaaatttgaaatacaagattttaccataacgaactggaatgtattaaataagcttgcagaagtttggataactaaatctaacttagctgaagaagataaaagccttaacttattagacccatatttaccagcgctagatttgtggataaatgtaaatatttcagaattaagatatataagtcatttaatccctactctagattggactggaggccttttgggaatcaggctcatactacaacctaaaaatatggaaactctagttgaagaatacactattgctaggcaaagaattattaaattgaaggctgattctggaaaatctatagatctttggcccaaaaatttttggcaattttgtgaaaggaggttagactcttactttgaaattaagacttatatactcgatccagaaagacccaatgacgaacaaataattacagaaaacaattttgagctagatggaaatcctcttaaaggcttaattaaggtggatgtaataaatgctcaaagaggatttggtgatcctaaatcacccgaatatcaaaacaccccaactctatcctctcaattacgttcttattatgaaaagcatcttaatcctaacataaatcctacagagaatgatttaaatgcattagagtctttaaatgatgctcaaaaaatttttgatagtaatttacaaaccaatttcaaaaaagctattgatgaacttcatgatttaaattatcccgggtttggaaatcctgaaattacattatcttctctcattaaagcaactgatggattaaatcatgagtctgctgttatatataatattgataaagcattatctctcccagaaaagtacaatggattaggttatcaaaacttaatttcgatggcttttaagttaattagctaccgtgatgaatggatgaagaaagggaagaaggctgatgaaaataatgatataattgaaccattacatttagttttgatagaagaaccagaggctcatttacatgctcaggtacaacaagtttttattaaagaggcttataaaatcttaagaaaacatgatgaattgggtaaaaagaatgaatttactactcaagtagtaatcagtacccactctagttacattgctcatcagaaatttgaaagtttaagatactttaaaagaaatatagcatcaattcctatttctgaagttcttagtataaaatcagtttttgactcagcaaaacccaaagagaaagaaacagaaaagtttgtaattagatatctaaatacaactcataatgatctgtttttcgctgatgctgcaatattagtagaagggccagcagaaagaattcttctccctcacttcataaaaaataatcatgtaacacttgacaaatgttatataactattttagaaattggaggaagccacgctcatagactaaaacctctaatagaaaaattaggtttaactacattaattattactgatttagattctaaagaaaaatattctgatatttcaaaaattcctccaaaaaatagttataaaaaatgcatgcctcaaaaaggagcagatcaaattacagataatgaaactttaaaaagctggaatccaaaaataaaagaaattgacaatttattagaattaacttttgaaaataaacttttagctgattatccgataagaatagcttatcaaacggagattgacatatctggtacaaaagtttatccttatacctttgaagatgcactagttttggaaaatattgaaacattcaagacaataacagaaacaacaggattattgaaaaaaatggtgaaagcggctaatgaaggtgatccaaatgcctctgcacaacaagcatatttagcaattaatggtgaaggagtaaaaaaagcggaatttgcacttgatgtgttatattttgaggatcctacatctcttaaaacaccaacttatatcagggaagggttgaactggctacaaagtatattagaaattgaaaaaaagattgaaactgaaacaagcacattatga

SEQ ID NO: 74861 - DNA, 1893 bp, Chryseobacterium sp. JM1
atgataactgagaataatgatattgacaaacacatcgatgatgaaattttcgaatgcatcaatccttcaaatcttaaaagtttttttctctttgcaggtgcgggatctggaaaaacaggtacgttagtaaatgttttgaaaaagttcaaaaaagaatatggcaatgattttaaattaaaaaataaaaaaattgcaatcattacttatacaaatgcagcagcagatgaaattaatcatagactaaaatttgattcaattttcacggttagtacaatacacagcttttgttgggaattaattaaaaacttcactactgacataaaaaaatggttaaccatagatttaaatgattctatagtagatttggaagaaaaaatttcgagagctagagaccctaataataaaacagctatttcgaaccaaagaagaaaagaatctaaaacaaaaagactagattcattaactactatttcaaaatttgtttataatcctaatggggataatataacaaaatcttccttaaatcattccgaagtaatagctatagtatccaattttataacatcaaaagatttgtttaagcaattaattataaataagtttccaatagtcttaattgatgaaagtcaggatactaaaaaagaattaattcaagccttattttcacttcaatcacaaaataaaacaaaattctcattaggtttatttggagatacaatgcaacgaatttacagcgatggtaaggaaaaactaggagcagatttgcctgaagattggttaaaactcacaaaagtaatgaatcatcgttcccttctaagaattgttgagcttaacaataaaattaggcaagaaattgatggtcaaatacaattcgcaagaattgaaaatacaggtggtgtggttagattttttatcataccaagagatgcagataaagaaaaggaagaaaaatttattaaagaaaaaatgtcactattaaccagtgatagaaaatggatagataaaaattcagctaaaagtaaattggatatttctgtaaaaacgttgactttagaacatcatatggcagctacaaggatgggatttggatctttttttaaccctctttataatgtagataaattgaagacaactatgcttgatggcagctcttcttcaattaattttttcacaaatataattctgcctttatatcttgctcatatatcaaataacaaatttgaaattgcaaatattgtcaaaggacaatcaccattatttgataaaaaaaatattattaatgaaagcgataagctcacaataatacaatactcaaaaacaagtattgataaacttttaaagctatgggaaaacaataatatcccaagcttaatagatattcttaaagaggttgatgagacaaaaattttcaatattccatcagaattaaaattagctatagaacgttcatcctttactgattcagaagaagaagaagatgatgatgatgcactattattagcttgggacttagcattgagagccaaatttgatcaaattgtgaaatatcagtcgtatatttctgaaaactctccatttggtacacatcaaggtgttaaagggttagaattcgaaagggttatggctataattgatgacgttgaagctagaggcaatatatttagttacgataagctatttggtacaaaagctttaacaaaaaatgataatgatagtatatcggaaggtaaagaaactggcatagacaggacatcaagacttttttatgttgcatgtagtagggcaaaaaaaagtctagcacttgccgcttacactgatgaaccagaaacattaaaggcaaaactaatagaattagattggtttacagacgaagaaattgaaattctaaaataa

SEQ ID NO: 74862 - DNA, 2082 bp, Chryseobacterium vrystaatense
atgaaaataactaaaatttcagtcaccaattttcgtttattagatgatatttcaataaatatagaagatgatataacattaattgttggaaaaaataacacaggaaaaacttctctttttgaaatcattaacttatttctaggaggaaaatataaaatttcctttcatgatttttctcaaaatagttatgaaatttttgaaaattgctacaaaaaatttaacgatgaattacttgttgaagtcgacgaagttgaacgaaatcgactggaaaaagaaattatcctaaatattcccagaattacactagaaataaaaattgagtataataaaaatgaagattctctaataaatataagcgactttatatctgacttagacgattcaaaaacagaagcaacaatactcttcaaacatgaacctagtgatacaattaatctttttaaaacatttcataacagagtaaatcaagacataagattaattgaatggctaaatgaaaatattactggatattattccacacgcctttttggaggagataatttaatagaagataatgttttaagtagaatttcaaaagttttatattttgaaagtattcaagcatctagaaaattagacgatgttaagacagatagaaatagatcattagcagttggtttttcagattattatcaaaatgttcatggtgatcaggatgctgatgttgaagcgcttaaaagtactttaaaaaacgtatctactgaattggatgaaaaatatgaaaaagtccttgaaaaaattctagaaaaacttaaatcattcggtgtcgacaaggaaataaatattcctgaaataatactgaaatctaaatttgacccagagaacatcataaaaaataatataaaatatttttacaaaaatggtgatattgaacttcctgaaaactacaacggattaggatatagtaatctaatttttttggtcttaaaaattgtttcttttatcgaacattttaagaaaaataaagcgaagcatgagactgaaatcttaacaattcttcttgaggaaccagaggcacatttacatccgcagatgcaacaagtatttgttgaacaagtgagagaaactattgaaaaaactttatcagaagacaaagtacaagtgcaattaattattagtactcattcttctcatatgattgctgaggcaggtctaaatgtgaaaagaagttttgagagaatcagatatttcaacaaatttaaaaaaaacaataaaaatattgtcgaggttaaggattttaatgactttaagcatagagaaaccaataaagatacctttagatttttgaaacaatatttaaacttaaacaaatgtgatttattttttgcagataaggtaattatggttgaaggtatcaccgaaaaactattgatgcctttgtttataaagaaagttgctaaagaactggaaaatgaatatgtttcaattattgaagtaggtggagcttatactcataaattcaaagagttttttaaattcttaaatacaaaagttcttgttataactgatatagattctgttgattctatcactggtaaatcctgtcatgtattaaaagctgatgcaaatacaagtaattcaacattatctatatggcttcctaagaaaacgaaaatttcagagctactagcattaacttatgaagaaaaattagatgaatcaacaactattagagtagctttccaaattgctgaagataatgaaacttttgttgcaagaagcctggaaaatgcaattgttaattgcaatcaagtattttttaaaggtaaatattctactgaagacggtgtagagttaaatgtgcataaatctttttcttatcaaaaacttaaaaatttggatgacttaatttatatggatacggaaaaagatcaatcagaagtagatccatcttctaaacaaaaaacagatttcactttcgatttgatgacttttgatgaaaatttaactaagcttgaatggaaagtcccaaaatatattaaagaaggcttggaatggttagcaaaaaatgatcacattgaaattacaaaaattgactag

SEQ ID NO: 74863 - DNA, 1044 bp, Chryseobacterium vrystaatense
atggcagcatttgacgaagtaaaagaatgtattgagaaaaaatcaagttttgttgttgaagctggtgctggttcaggtaaaacatatttattaatccaaacattaaatcatttaattgatttacaaggtgataatttgagattaaataatcaaagtattatctgtattacatatactaatgtagcaaagaatgaaattatcaaaagaattgaattcaatgatttggttaatgtctatacgattcacgaatttttatggcaatctataaaacaattccaaaaacaacttaaaattgaattatgtaagctcaacgaaataagatatcataaagatgttgataatgataaaacgtctaagtatattaaaaacttaaaaggccgaattaataatattgaaacagtattttataatgattcctctttccgtgattttgaaaatggagaattacatcatgatgatgttattgaattgtcaaaaatgctttttgaaaattactctttgttaacatcaatcgttgcacaaaaatatccgtatatttttatagacgaataccaagatacatctttagatacagtacaaactttaatagactttttattaaaaagaaatgaaaaatggattgtattaggtttctatggggattctcatcaaaaaatttatgatacaggtgttggaaatctggaaaactattacacagaagaaaataaaactttagtcttaattaaaaaggaagaaaattatagatcttcaaaagaagttgtaaagttgttaaatagctttagaacaaatattgaacagaagcctcaaaaagaaatacaaggttcagttaaatttctttattggaaaaatcatcctgaaaaaggagaaaagcaaaaagttactgaatttgaaaattcattaaaaggtcacaaaaatgatttctatgataaagtagtaaataaattaatagagcaaggttgggtttttaatgcagaatcagacaagattcttgttttagcaaatagtcgtatagcagaaagagcagggttttccaatctttattaa

SEQ ID NO: 74864 - DNA, 2055 bp, Chryseobacterium piperi
atgagaattaaacaaatacaagtgagaaattttagacttctcgataatttttctgtcaatattgaagatgatattacccttatagttggtaaaaacaatactggtaaaacttcactatttgaagcgattaatgtttttacaaaagtttcccaagaaatttcctttgaggatttttcgttaagtagttatctgaaatttaaaaagatagttaattttattactaaaattgattttaacaacatttctgaaaaaagaaaggaaatttttgaaaagataatccaaaaccaaactcccaaagttcaactttttattgaatttgaatatgatatagaaaaagattctcttgttaatttaagtgaatttataactgatttaaatgaaaaaagaaatgatgcaactgttttaataagttttgaatctctcaattcattaggtttattctcttcttttttaaatagagaaagaaaagaaatagaattaatttcttggttaaaagagaatctgaaaaaatattatcaacttacatgtcatgccattgacaaagattcaaattttaaaaaagatattggtttaaattttaaatctaaaattgaaaaaattgtttcatttgaaggtatcaaagcttcaagaactttagacgatacaaaatcggataaaaataaaacattagctactggattttctcattactatcgtgaaagagataaaactaaagaagatgttaaaaagctagaagatactttaacgaaagtttctgttgacttgaaaaatgaatatgagaaagttcttagagaggtaatacatgatttgaatcattttggagcttcgacacctatatccatacctaaaattgaaattgattcagagtttaattcagaagctgtaataaaaaataatatcaaatattattataaacatgatgatattaacctgcctgagagttataacggcctaggttatagtaatcttattttcatggtgttagagttgacaagttttattgaaagatttaaaaattcaagtgaagaaaaaaagtctgagtttttgactattttgattgaggaacctgaagcacatatgcatcctcaaatgcagcaggtttttattaaacaaattacaaataaaattaatgacgctaagtcgaatggtatcaacattcaacttataattacaacacattcatctcatatcatagcggaagcagggattgatataaaaaagggctttgatagaattagatattttaataagattaatggtaatcttgaagtaaatgattttaacaacttcaaacataaaaaaagtgatactgaaacatttcgttttttaaaacaatatcttaatcttcataaatgtgatattttttttgctgataaagttattatggtagaaggtattactgagaaaatgcttttacctcttatgattaataaagttgcacccgaactaaataagaagtacatatcaattttagaagtaggtggagcatatacccataaatttaaagagttactaaattttataaaagtaaaaactttagttataacagatattgattctgttcatatagatgataatagaaaagcatgtagggtaaatacatcaaattctgttacgtcgaatgctactttaaaaaattggttaccaaaaaaagatgcaattgcagatttaatttcaacaagactggaagaaaaatttgatgggaaatttattcgagtctgttatcaaattgccgaaaataccgaaaatcaatatacagctagaagtttggaagaagccataattaatcgaaatttaaatttctttaaaaataaatacaatgatttggataaagataaaaaagtagttgaagttgatgtaaaatcgaaatttgagttattaaaaaaaataaattttgaagagcaattggatttgtatgaattatctccaaaaaaaggagaaaaatcacaattcgcatttgatctcatgacttttaaagctggaattgaagactttagttgggaagttcctaaatatataggagaaggtttagaatggttagaaaaagatgaatga

SEQ ID NO: 74865 - DNA, 1893 bp, Chryseobacterium piperi
atgaatgagatgacagcaatagagcaaattatagagaatattgataataaaaaaagttttgtattagaagctggcgctggttcaggaaaaacttatactctaattcaaactctgaactatttacttgaaaataaaggtgaagatttaaaatataatcatcaaaaaatagtttgtataacctacactaatgttgcaaaaaatgaggttattgaacgtttagagaatcatcctttagtaatagtttcaactattcatgaatttttgtgggattgtataaaatcatatgaaaagcagttgaaaattgaattatgtaagttaaatgagattaggtatcaaatagatatagatttaggtatagatgaatcacggtatatccccaatttagtagataggttagatagaattgattcagtttcttataatgatacagcatttagggattttgaaaaagggcaactccatcatgatgatgttattattttatcaaaaatgatgttttttgcttatccactactcactaatattttatcacaaaaatttccttatttactaattgatgaatatcaggatacagcaaaagaaacgattaacgcattagtagattcattgctcgaaaataataaagataaaattattttaggcttctatggggattctcatcaaaagatttacaataatggtgttggtgatttagctaattatactcatcctgattctcacaagctatatttggttaagaaggaggagaattatcgttcttctatagcagtggtaaatctattaaataaattcagaaccaatatagaacaaaaggctcaaaccgatgttgaaggaagtgcaaaatttatttattgcgaatataggccaattaaaaccagaattaatagaaataatagggaagtagatgatgaaagtcgatccgcctacaatgcagagattgatttacaaaaaaaagaaaattttgataaagttgtgaatttattagtaactagagaaaattggatttttgataaattagataataaaaaaaatgacaaaatactagtattagtcaatagtgctgttgctaaacgaaatgatttctctaatttatacagaatttatagtagaagatatattagaagtgttggggatgaattaaataaaaggagaaatgccttaattcaatatttcgtcggttatactgataaaaaaatatctcaggaaagagaaactggaattgaacatttggtgaagttttgggaggagtgtaattataatgaagtgttgcgctttcttaaaagatatagctctttatttgttgatgggtatttagaacataaacataagaaaatcataactgatattttagatgagttaatagtaattagaaaaactaaatctgtaaaagaagttatggaatttgttgaaagtagaaaattgataagaagatctgacgctgttaaaaaatttatcgaacaagtcgggcttgattttgataagttagaagaagggtcagagaagagtaggtttgtaaataacaaaattttatatgattcattgttaggcctatcttataaggaaataatcaacttttttgaatttacacaaaatcatactgttttttctacaaaacatggaacaaaaggggaagagtatagaaatgtattgacagttattgatgataaagaatgggtaaatgaagctgaaggatataattttgaaggttttttcgataatactgatgttaatgaagaaagaaagttgagaactagaaatcttttttatgttgaatgttctagagcaaaagaaaatttaattgttttagcactttctcccatgggagaatcagcattaaataatattgaaaaatggtttggtaaaaataatgttatcaaactagataatttttga

SEQ ID NO: 74866 - DNA, 1839 bp, Comamonas testosteroni TK102
atgcacctggccaaactggtcgtcaagaacttccgcaagctcgctcatgcggagcttatattccaacctgggctgaacgtcctagttggagggaacaacgtcggcaagacggcggtcgtggacgcgctgagggctctattggcaggccacgacgagccatatccccgcgtcagtgaggaagatattcaccgaccgcctggcggagtacccgctggcgacatcgtctttgagtacgtcttcagcggtttggatcttgacgacgaggcagacttcctcgcggccctggtgcccgacaacaagggcaagctggaagcgcacattactattcgctattccgagccggacaaagccggtaggctccgagcgaagcgctggtgcggcgagcacgaagacgtcagtctcacggcagacatgatggagaacttgcgcggcgtatacccgcccccacttcgcgatgcgtcacaagggttgaaaccgggacggtccagccagttggcgaggctgctgcagcttcttgcgaccgaggccggcatcgagggcatcaacaaggcgcttcaggaactggacagcgagctcaagaaacatttgcctatcgtgagcacgtacgaggcgatcaacacccgctaccaatcgatgctggggccacagttgatgcagttgctagatgtaggtctgagcgcgagcgacttcaaaagtctgaagtccaggctgtccttgcttgttgatgccttcgagattgagcaaaacggcctgggcttcaacaacctgatctttatggcagtggtgctgagcgagcttacgaagaatcctgactcgtgctatcgcgggctgattgttgaggagccggaggctcatctgcacccgcagttgcaggcggtgctactgcaacacctcgaatccatcaaggccgtcgaaggcgaaaagcctgtccagctattcgtgacgagccattcaccgaacttcgccagcattgccgacctgaacagtctggtgtgcttggttgacacgggcaggtccgtcgtaactttcttcccccgcgacgtcgagttcaagaagggcaaacgcgagaagcttgaacgttatctggacgtcacacgcgccgagttgttttttgcgcgtcgagtcatctttgtcgaaggtgcagccgagctgatgatggtcgacgcgctggccaaacgtatcggatgcgatctgcgccagcatggcgtgagcttgatcagcgtagaagggttgaacttcgattcgttccttccgctgtttggtgacaaggcattgaagattccagttgctatcttgacagatgccgatcccgttgaaccaaagccggcgaagaagtcggaagatgctgccggtccggaagctgttgcagcaccgatggatgcgtccgctgtcgacgccggaagtccgccagaggatgaggacgaggatcccgagcccgtttacccggcagcaggcgaagtgatcaccgtatctgccaacacagccaagatgaaagcctgtgaggattcatatgtgaaagtgttccacggtctcaagacctttgaatatgacttggccctcgagtctgccaacagagagccgatgctggcagcgctgaaggagatgcatccaaagattgcggccaccttaaccgcagccgtcaacgcggcggcggacgacgcggccaaggctaagacattgttttgcggcatgttcgaacgaccaaaaaacaacgtgcaaaagggcagcttcgctcaagcgctggcacaggttattgcagacccaaagttgcccttcaccgtgccgacctacatccaggatgcaatcaagcatgcctgccaagcagctggcaagccatga

SEQ ID NO: 74867 - DNA, 1731 bp, Comamonas testosteroni TK102
atgagcgcgctgacaccagagcagcaggcagtcgtcgatgcccctatggagcctctgtgcgtgattgcatgcgcaggtagcggaaaaaccaagacggcagtgcagcgcctcgtccagatgcgccggaaccttggaaacacgcgcgggcgcgtcgcgctgctttcgttctccaacgtggccgttgacacattccgtaaggcctacgatgtgctagctcgcgacctcccgactggcgttggccgtgaccgggttgagatcgacacgctggacggattcattaccagcaacattctccgccctcacggacatcgcacaatgggggcatctcaggccgcctatctcgtgaccggcagcgagacgttccttagcggctttacattcaagacaccgtcgtttccgatgcgcatcacggagttgcacgtcgcattcgtcaaaggccaggagtgcttctattacagacgcaatgatgagcttgagttggtggccaacgctgcagcccgcgatctcatcggccgccttggcaagactggtgcatacacccacgatctcgggcgctattgggtgtaccgagcattgaaggagcgcccggagcttctgaaggtagtggttcgccgctacccacacattttgattgatgaggctcaggacatcggttcggtgcaccaagcgatcctactgttactgatcgacgcaggtgcgtgcgtgactctcatcggcgaccctaatcaaggtatctacgattttgcaggtgcagacggaaaatttctgagtgaataccacgaacgcccgggcgtactgcagtattccttgaaacgcaattttcgatcggtgcctcggattgtcagcctcgccaatgggttgtgtgggcgcgatgatgtagctgagcgaggtgcacctgctacaccgcacggcgcctacttcactgggtataagcgtgaccagcacgtcaagttgatcactgctttccagggtgcgctagcggttgcgggggccgatttaaagcgatcagccgtactctgccgcggtcgcggtttgaccgaagcaatccgcggtgatgctgcccctgctggtcaagggtcggtgaaggtttttgcgactgccgccgtactacgtgatcagaaaaatgatttccaaaatgccttccagcgtgtggcgattggggtcgctgcactgctggataagccgccacatggccttgttagctgcattactcaggcgggcgcctcaccagcccagttccctagagcgcgcgcgttgcggcgcgagatctggatcttcacgcgcgatgcaaaagcggggttgccatctgcctttctgaccgcagacacacaatggcactcccagctcgtggccaacgtcaggatattgctcaacaagcttcagaccgagtttgggttgacgcccgccgccaacatcggcctcaagttgaaaaagaccggcctgccaaacgctgctctgttgggcaccaaggatttagccgatgaaaaggcggcgccactacgcattgacactgtgcaccaggccaaaggagaaagcctagacgctgtcctctacatgactctcaaggaccacgcccaggaactacttgctggcgtaggcacggaagtcggtcgcattggatacgtcgcatccactcgtgccagagacctcctatgggtagcggtaccgagcaacgcgctgaacgatctgcggcccttgtttgaggcgaaggggtttcaggaggttgactaa

SEQ ID NO: 74868 - DNA, 2337 bp, Comamonas testosteroni TK102
atgcatttgaagaagttggccgtccggaatttcaggcggctgcgaaacgttgtaattgatcttgcttccgacatctctatttttgtcggtgccaacaacagcggcaagacatcagtcgggcacgcactccagttattcactggcagtggccgcttcaacattcacgactttagtgccgaactttgggccgacatcgttgcgtttggtgagggcgatggcgaggcgagccttcccacgatggaaatcgacgtttggttcgaaatcggtccggacgatgttcaccgcgtcatcgatcttcttcccagccttgcttgggaaggcaagctggtggggatgcgtgttgcctacgcgcccaccaatcctgcggcgacgcatgcacgctatgtcgaagtgcgccagcgcgtgctcgatgcggtcgctaagggtgaagacggagcacccgccttcgatccctcgccacgtaacctgcgggagttccttcgcgacaggctacatgacgaatatgagctgcgctatttcgtactcgatcccgcgcggttcgatgcgaagatggtcgcagaggctggctatgacccagccactctcaccggacgcgaccggagcggccgtgagatcttgaacggccttctccacattgacttcttgaacgcacagcgccatctctcggacggcccaggtggctctcgcgccgaggatctctcccgtgtactcagtcgcttctacgggcgcaacctcgaacagaaaggcgaagatatcgaagcgttgcgcgccctcgcagcatccgaagtctcgcttaatgagcatctcgaacgagtgttcgaaccgacgctcaagagcttgtcgaagctcggctatccgggcctctcaaacccgcgcatgatgatccgctcggccctcgaccctgcccagatcatgagcggtcgagatggcgcgatcgttcactatgcgttgggagccgatgacgggaagcccgacccgcctaccttgcccgatcggtataacggtcttggcttcaaaaacctcatcttcatggtcgttgagctgctcgacctccacgctcaatggctggcgatcgaggaaaaccgtccgccggtccacctgatcttcatcgaggagcccgaagcgcacctccatgcccagcttcaacaggccttcatacgcaaggtgatggacatcctagcgctcaagggcgaggaccgcacgcactatacgagccaggtcgtcgtcacgacccattcgactcatatcctttacgaacgaggcttccggccgatccgctattttcgtcgaagccgtgcacagaatgtgtcgacctccgatgtgctcaacctctcggttttctacgacagcaccgatccggacatccgaagcttcctcgagcgctatttgaaactcgcgcactgcgatctgttcttcgccgatggcgccgtgctggtcgaaggcaatgtcgaacggctgctattgccgcagatgatcgccaatgccgcgccgcggctgcaatcgacctatctcaccgtcctagagatcggcggagcgttcggctaccgattcaaaacgctgatcgagtttctcggactgacaacgctcatcatcaccgatctcgacagcgtgttcggtccactggggcaggatggcgagggtgcggcacccgctggtcaaccggaagccgcggaaccagccgccgagaacgcgcaggctgccggcgctgacgctgaggacattgacgatgacgaggacgatttgcctgtggctgcggagaagcccgggaaggcgtgcatagccggtcatccgggcgcggcgacgtccaatcagactttgctccaatggctaccgaaatgcgacacggtcgccgccctgtgggaggcgacggctgagcagaagatccaggcgaggacggacgacaatgacgctttggtacgcgttgcctatcagtgccggaccgatgtcacttggggcggagaaaccctggcgctagccgggcgcacgctggaggaagcattcgcactcgaaaatcttgaatggtgtcaggacaagaaccgtaagccgcttcagctccgcatcgccaaggccgacgagaagaacctgaccacgcttgcggaacgcatccacaagcgcgtgcaggctaagagcttcagcaagaccgacttcgcgctcgccttgttagccgaagatccgagcagttggtctgtcccaacctatatcgccgagggcctgagctggcttgagaccgagattgcgccgccggaaccggacgaggaccagccgcatgagggccagccgcatgaggacgcgccccagggggcaccagtcgccgccggcgacgaggtagcggcatga

SEQ ID NO: 74869 - DNA, 1791 bp, Comamonas testosteroni TK102; identical to SEQ ID NO: 72917

SEQ ID NO: 74870 - DNA, 1821 bp, Comamonas testosteroni TK102
atgaaggttgtgcggctgactatctcgaactttcgcggcatcaagtcggctgagctcctgttcgacggacacaccctgatggtgggctccaacaatgtcggcaagagcacgctctgcgaagccctcgacctggtcttgggccccgaccgactcaaccgcttccctccggtcgatgagttcgacttctacaacgccgaatacctggcacctgccgcagcagaaggcgcggagcgggtgccgactccgcttcggatcgaggcggtcctcattgagcccggtgccgaaatcggagccaagtgcggcggcaacatcgagttttggcatgtacccgaacaaagactgctcgggccgggagaggccgacgccgccaatccgccccatgccgtcccctgccttcggatcgagaccatcggccaatataaccccgaggaagacgagttcgaggcacgcacctacttctcccatagtcccgacgctccccccggagagctgaccaagcttccaaggccgatcaagcggctgtttggtttcctctacctgagggcgcttcggactggctcgcgggcgctgagcttggagcgagggtcacttctcgacatcatcctgcggaccaagggcgtgcgcaccagcctgtgggagaagaccatcgagcgcctgcgtggcctcgacatagaaaccgacgcggccgagatcgcgccggttctgcgatccgtggagaggcggttggcccgctacatcgcattggagtcgcccggcaacgccaccaagctgcatgtctcggagctcacgcgtgagcatctgcgcaagacgatgacgttcttcttggcgctgtcggtggaccaaggacacgtcccattcccccacgccggtacgggcaccatcaacacgctggtgctcgcgctgctctccttcatcgccgacctcaagcccgacacggtcatcttcgccatggaggagcccgagatcgcggtgccgccgcacacccagcgacgcatcgcccaatacctgctgaccaagacgacgcaggcctttgtgacttcccactcgccattcgtgatcgagaagttcgagccatccaagacactgctgctggctcgcaatgccggcgtggtcacggcgcgaaaggtctccgacgccaccggcctcaaagacaacgactacaagcgcttctctcgctctggcctgtctgaatgcatgctgggacgagcagtcatcgtcgtcgaaggcgttaccgagttgcatgcgatgcccgtcgttgctcggcgcatggaagagagcgattccaacttgcagccgctggacatcgcgggtgtggccttcttcgacgctgatggcgagtcgaacatgccaaagttcggaaagttcttcaagacgctagagctacgtaccttcgctttctacgaccttgactacaaaaagaagcgcaagaccgagcaggcgcaggctctggcggacaacttcgaaatcaatgtcgagcacgcctacaagggcttcgaagacctcgtcgtggcggaggtgcccgtggatcggctgtggtccttcctgtcgggcttaaaagccaatgatgagaacggcaacgtcgccatccccgatgcgcgcccgaacgacgacgcggtcaaggccatcgccaaagaagccctcggcggcaacaagggcgccggctggtcggcgcgcctgttcgaggagtgcgagctccacgagctgccggtcacggtgacgaagtttctggcgtcagtgttcgcactgttcccacctccaccaccgatcgacgacggcgatggagcaccacccgaaccagccgccgctgctgccgctccatga

SEQ ID NO: 74871 - DNA, 1761 bp, Comamonas testosteroni TK102
atgaacgagccgtgcaaactgcgtgaaagcgtcatagcttgcgaaggccatgccttggtcatcggcggtcccggcagcggcaagacgacgctcgcgctgcgcaaggcggtcaagcggattcgcgacggcatgcttccgggtcagtctgccctgttcctgagcttctcgcgggcggcagtggcgcgcatcttggatgccgccaagcttgagtccaccaaagccgaacaggagcagctctccatccagacgttccattcgttcttctgggacatcctcaaaccccatgcctacctgcttggggcaccgcataggctctcgatcttgctgccacacgacgagaaggccctgtcgggcggcctcggcgacgaagacgatggctgggacgagtggctcgtcgagcgtgagcggctgtttcgcgaagaggggcggatcgcgttcgatctgttcgcggccaatgcgacagctctgttggctcgcagctcgcatcttttggcgtcgatcgcccatcggcatcccatcatcatcgtggacgaggcccaggacaccggcccatacgcgtggcagtgcatccagatgctcgcgccacacacgcaggtgctgtgcctggcagacctcgagcagcaaatcttcgactacctgccaggcgtcggcccggagcgcgtgatcgccatccgggaggcattgaagccgcacgagatcgaccttgggacgcagaaccaccgcagctcggactccgaaatcttggcgttcggcaatgacatcctgacggccaagccacgcggcgcgccttacaagggcgtttccgcccttgcctaccgccccgagaagccaccgccgaactggaatcatctgctgcgccgagccctcggagagctcttgaaatcaattcgggctcagagcgacaagacggtggagacgatcgcgatactagtcaccaacaaccgcagtgcgttgaagatgtccaacgccctcaacgcgttgggggccaatgtcgggaagccggttcggcacaagctgctgttcgacgaggccgaagcgctgctgtcagcccgtttcgcggcctttctgctggaacccaaggacctcgccaaattggaggccgatgtcgtcaccagcatggaaatgatcgccgcagcgagacgcgcgacgggacagggcaggaaggaagtcgccaaactcttggagcaggccaacaaaatcaagggtggcaaggtcttgaacatcaacatcgccaacgcgctgcgcggcctaatctcaggcttggcagtcaacgatttcagcggcgatcccgccgaggactggctcacggtcaaacatgagctgcgggcgaccaatcaagacgaactcacgcgggtcgctgcgcagttagacttcttggtggcattccgtcggggacatcgcatctcggctgccctctctgatgaatggcttcgagatggcgcctacaccaatgcccgcaccgccctcgacttggctctcgcacaggagcaaatcctcgacggcgtggagccgccgatgggcttacaagtcatgaatttccacaaggccaagggcaagcagttcgatggagtcatcctcgtccgcgaagctcgccggaccggccccgccgttgaatcatctttcgtttggcgaggtgacactgctccgtatcccaaaagccgacgtgtgcttcgagtcggcatcacgcgagcaaaagttcacacgctcatcctcgatccgctttggccgcaatgccccctgctcaaggggcacaagctctaa

SEQ ID NO: 74872 - DNA, 1752 bp, Comamonas testosteroni TK102
atgtacctgcacgaactccgaattcaaggcttcagacgctttcatgacctcaagcttcagttcaagaagggtttgaacgtgctcatcgggccaaacaacggtggcaaaactgcagttgttgatgcactgcgcgtgctgctttcagccagtgacgaaggaagccttcgactgactgagctggaccttcaccaaccggaggcaggaagccgcagcacggaggccaagttcaacttcatattccgtggcctttcagagcaagaacatgccgatttcatcacggccttaaggccgattgccgcaggagacaactccggagagcgatacgaagcttggttcacagttcagtactccaaggcagattctgagagccgtctaaagctccgtcggtgggtcggagagcatgaagagaaccccctaacgactgagatgcttgaagagctccgggcggtttatcttcagcctcttcgtgacccggcctctggacttaaacccggtcggtatagccaattagcgaagctactgcaccgcctgtccaaacaacccgaacgcgatgcgttggagctgcatctcaagcaaatcgaccaggacctaaaaccacttcctccactgtctacgaccaacacagtcattggagagcggcacgcagcaatgcttggaaaagaactggcgcagcttctggaccttgagctcagcccaagcgacttcgcccgcttcgcatcacgtatcgggatgtctgttggcggcatggaagttgagcaaaacggacttggcttcaacaacctgatattcatggctgttgtactaagcgagctggcccttaacaatgctgtttcctactgcggcctcatcgtggaagagcccgaagctcatttacatccgcagctccaggccgtgctgctcgactaccttaagactgttgagaagcccgaacaggggcaacgtccagtacaagtgttcgtcactagccattctccgaacttcgcggccttggcagacttagattccatttgctgcatttatgacagtccaaccgggcctgccgtctttgcgcctcgcgacgtcaagtttgaaacaggacaaaaggagaagctacaacgctatctcaatgtcacgcgggcagagctattctttgcgcgaaggctcattcttgtagagggcacggcagaactgttcttacttgacgcattggcaggcaaggcaagcattgatttgcgcaagcactcggtcagcatcatcagcaccgatggtttgaactttgactgcttcttgccgctgtttggcaagaatgctatgcagattcccgtggcagttatcacagatgcagacccaccagcggacgtatttccgagaaaggctcaagcgctacagctatcggaaaatgctgaaaagctacagaagctggaggacgatttcgtcaagctcttctttgcacacaagactctcgaatacgacttggcgctaaaccgaagctctcgtgaccaaatgctgtctacattgaagcagatgcatccgaaaatatgtgcggatatcgagttaggcatcatctttggtggcaagcctcatgagcttgccaaagaagtcttcagcggcatgttcgtaagtcgcagcgttaaaaaagggagcttcgcgcaactccttgcattcgaaatcgctaactcagaggagaacgtcgtactcccacgctatctgaaaaaggcgctgatgttcgtgactaccgctacgccaaagaacaatgacgacgatgtcctttga

SEQ ID NO: 74873 - DNA, 1734 bp, Comamonas testosteroni TK102
atgtcctttgagcccaccgctgaacagacggccatcattgaagcggacttagtgtccatggctatcgtggcatgcccggggagtggaaagacggcaacggcagtacgacggctggctgaactccgtaagcgtctcaacgacacgaagggccgagcggcccttctctcgttctcaaatgtagccgtagaaacctttcgcgccgagtatcagaagcttcaagggacgactgtcaccgacagcaaggttgccatacagacggtcgactcgtttattaccaactacattctcaagccacactgtgcccgcgtaatgaaatcgcgacgcatgccgttcctttgtttaggcgacgaaccgtttcttagtgcctacaagattggtgaaggcaaagagacaaccggagtagcagacataattctgaacagagtcagcggagagacgcgcttctatcggaaggttggtaagtcggacccaatagcgctcaccccagcaatgtcgaagctggcgttgaaaaagctaaacgagttcgctgctacaggtgggtatacgcatacgcacgggagagcctgggcgagatggcttctggcgcgcgaacctcatattgcaaaggcgttggcacttcgatttccccaaattcttgtcgacgaagcccaagacgtaggaaccttcgagggggaaatccttgacctgcttatcaaagctggaagcgatgtttcgttgattggcgactttcatcaaagcatctacagcttcaactttgcgacaggcgattacctccgtgccttcagcgaaagagatgaagttgtaaagtttgaactcacacaaaatcgcaggtcactaccggcaatcgtcaatgttgccaatgccttagctcgaacgaagacgacacctcatcgaacaacctcaaaactccactctggagctttctattggcgatacgaggaggacaaagctcgggagctgatgtctacatggtcaagtgctctacaggccaaaggctacgcattagccgatgccgcagtactgtgtcgcagctccgacatgctaagcgagctaacctcagccagtgtcaatctgggtacatcagcggtcaaacacctggcgtccgccgcgctggagcgagacaggaacggtgacattgcaaagaccttccatcactgcgttcaagcggcaattcatttagtcgacgtgccaaatactttcgctcaacaggtaaagtcacctgagcggggaagcgacatagctcaactgcgacgattgctctgggacctgattcgagacaatgcgtccggaattcctccctccacacttgaggcgcgaggagagtggctcacaaagttaaggacaaaccttgcatcttggctggacatcgttgaggaaaaaaccaagttcactcgagccgcaacatggactgctcgggtgactgccaggcgtcttcccgaaacaggacccttactcggaggagacctgggtcaaaacgattggaacggcctgcgcttgggcacagttcactcagctaagggtgagggaatccctgcagttatgtacctcaccagcaagaagcacctgacagcactgcttaaagggacttccaaggaagatggtcgcataggttttgttgcagccacacgcgctcgagacttgctcgtcgtcgccatcccattagatacaaagcctagcgttatcaaaaagcttcacaatttggggttcatggactgggatagacctggaaggtaa

SEQ ID NO: 74874 - DNA, 2097 bp, Flavobacterium psychrophilum; identical to SEQ ID NO: 71912

SEQ ID NO: 74875 - DNA, 1902 bp, Flavobacterium psychrophilum; identical to SEQ ID NO: 71913

SEQ ID NO: 74876 - DNA, 1896 bp, Sphingomonas paucimobilis NBRC 13935; identical to SEQ ID NO: 72384

SEQ ID NO: 74877 - DNA, 1824 bp, Sphingomonas paucimobilis NBRC 13935; identical to SEQ ID NO: 72385

SEQ ID NO: 74878 - DNA, 2295 bp, Haematobacter massiliensis
atgtacctacattcctatcgactgagaaatttccgacggcttcgggacgtgcatgtcgagcttgcgtccgacatctccattttcgttggggcgaataatagcggaaaaacctccgcgacgcaggcaatgcagatgttccttgccggcggtaaagattctttctcactgtacgattttagctcgcacgcttggccgctgctcgacgagattggcgaacgagagggggaggtcgccgaggctgagttcccaaccgtctcgctcgatctttggttcgaggtgggagccgatgacctttatcttgtcatccccattctgccttcgacgtcttgggccgggacgcttgttggcatccgcgtcgaactcgcgcccagaaacatcaccgaattgatccagcgttatcgcaccgctcgcgatgatggtcgagccaaagcggcggcgctagtcggcggcgcaggcgattatgtgccttggccaaaatcgctgtcggcttacctgcttaaagaactgagacacgagtatgagctgcgatattacgtcctcgaccacaggcaatttgatgcgaaatttcaggcggtggagggatatcagccgctgccgttgggtaacgagcccggcggcagtgctgtactaaaatcgctcatcaaggtagactttctcaatgcacagcggcaccttgcggacccttcaactgcttccggaagcggccgttcggaggatttgtcgaagcgtctgagccgcttctatcaacgcaatctcgatcaacgtcaggacgatcatcaggcgctcaaagcgctgtttgagtctgaggtgggcctcgacaagcatctcgcggaagttttcaaaggcacattggagcggttggggcgtttgggttatcccggcctcaataacccaaggctagaaatcaagtcagccctgaaccccgcgtccatcatgacacaggatgcgcgcgtccactacatcgtgggcgaagccgcgcagacggtcatgctgcccgacacctacaatggcctcggcttcaaaaacctgatctatatggtggtcgaagtgctcgaccttcaggaacgctggaaagccgaagaggagaagcgtgcgcctctccatctcatattcatcgaggagccagaagcacaccttcacgcgcagctccagcaggttttcattcgcaacattctcgacttgctggtcattccgggcgaggcgggaggatcattcgtcacacaagcggtcattacgacccactcgccgcacatcctgtacgaacgcggctttcagccgatccgctacttccggcgcgatttggtcggaaacgatcaagtcactgaagtgctcaacctctccgcgtactatgcgaaggaaaccgaacaccgcgatttcctgcaaaggtatctcaaacttacccactgcgatttgttcttctctgacgccgctgtgctcgtggagggcaatgtcgagcgattgctgctcccgatcatgatatcaaagacggcgacatcgttgcgatcctcctgcatttgcattctggaggtgggcggtgccttcggccataaattcaaatcgctgatcgaattcctcgggatcgtcacgctgatcatcaccgacgtagacagcgttaccttgttgcctgctgatcatgacggcgatgatgacgacgatgacgagctggagatcgaagtcgaggcccttgaggtggacgctgccaacgatgtcgatgaactacttggtggcgatgctccggccgcacaagctggcgatgccgccgatcctgcccccgcccgacgttacggaaaaaagtgcttgcccggtgtcgccggggcaatcacgtctaaccagactctcgtgaaatggcttccggccaagctgtcgatcgacgagcttttcgcagcactggagcaggagaaagaaacgccggcggatgtaacgccccgtgtccgcgtggcgtatcagacgcccgttccagtcgcatggaatggtcagaacgtagagctggctggtcggacgttggaagaatcgttcggactggaaaacgccgaatggtgccagagcgcagagcagagaagattgggtctacgcctccgcggtgcactagcggacccggcggcgttggcggccggccttcacaaaagggtcagcggcgataagttcgacaagaccaagttcgcgcttggagtgcttacggctcgaccggaagagtggcaggttccgaagtacatccgtgaaggtctggtttggcttaaggcgcaggtcgatctcgaagttgaggccgaactggaaggcggtgtagtcggtgagtag

SEQ ID NO: 74879 - DNA, 1932 bp, Haematobacter massiliensis
gtgagtagccgcgcgcaacagcccgacacacaggccgacgtagatcttcggcagtgcttggaatctcagccgccgaccagttttaacatggtcgccggcgcgggttcgggcaaaaccacttcgctgatcaaggggctcgcctcgatccttgccatccatggcgagcgtttgcgactacgcaggcagcgcgtggcctgcataacctatacagagatcgccgccggagagatttgggctgacgtgggaaacaatcctctcgtccacgtctccacgattcatagttttctttggtccatcgcacgcggcttccaacaagatatcgccgcttgggttgcaaataggatcgacgagcggatcacggaattacagcacgatgccgccaattttgacccacgcgttcagcagaaaacgcgagacaagaacgcccgcgatataacgcgctacgagcagcagcgtgaggctatcactcaagttcgtagtttcacttatggaacaggaagtgactacgccaaaggcatcctcggccacgatgacatcattaagatggcttcgcagttgatgattcaacggccgcttttccgaactctcgtcgcacaacaatttccgtttgttttcgtggatgagagccaagatacctttcccgttatcgtcgaagcgttgatggcggttcagcagcaggagcaggcccgcatctgcctcgggttcttcggcgacccgatgcagcgcatctatcccaccggcatcggcacagttcccaaacccgatgattggcgggcgatccccaagccggaaaatttccgctcgcccacctcgatattgaacctcgcaaacgccattcggcgtgaaggtgacgatctggttcagattggtggccgaaaggaaaaaagtggtgaccaggaagtgtcggtgatcggaacggcgcgattgtttgtcttgccgactgatgctcatcgcgacgaacgcgtggctcaggttcgggcgtggatttcgaacgcaaacgatgacgagttgtggcagcccgccgacgagaacgacccagtgaaaatgctggtgatcgtgcatcgcatggcggcgaagcgattggggttcggcgatctgtatgcggcgctcaacgataaagcgcctgaggccttcaagaatggctttctggacgcgtccgcgtggccgctgcgcccgtttgtgtcgtttctactgccgcttgcggaggccgttcgggacgcgcgagacttcgagacgatgcggctgcttcggcttcattcgccgttgctagcaaaggccaaccttcaaggcgtgaacatcgccgagcggctcaatgaacttcaggcggtgagcaatcaggtcggtgagctgatgggacctcagtcgcaggccaccattcgtgacgtgctgacgcttgccaaggaaagtcgcttggtggagttcgacccgcgcctgtccgcgtaccttgaggatgttgctgtgaacgaggcagaagtcgaggccgatgacaatttagacgaaggcgaggaaggcctttcaaacgagatcaattcaatggccgcgttcctagcctgtccggctaagcagcttcgaccctatcaggcctacgtcaacgaggaatcgcctttttccacgcagcagggcgtgaaaggggccgagttcgatcgtgtgcttgtcgtcctcgatgacgacgaaggcacgcactttcaattctcctacgagaaataccttggattgaaagagctttctgcgcgagacaaaaagactttgcaggacggcggcgaaacaggcgtcgaacggacgcggagacttttctacgtttgctgcacacgagcgcggcaaaacctagtggttatccttttcgtggctgatcctgcagcggcgattgcgcatattcgcgggctcggactctttccagaagcggatatcctctcgcaggatgcactcgcttga

SEQ ID NO: 74880 - DNA, 1482 bp, Haematobacter massiliensis
ttgcgtaagctcggatatccgggtcttgccaaccctaccctagaaatccgtgctgctctcaaactcgaaaggctgatgggagatcagcaggcaaaggttcactatttacttgaggaagcgaccgcagaagtcgaggcactcgtcctgcccgatagctacaatgggcttggtttcaagaaccttatctacatgggcgtggaattgcttgatctccattcagcgtgggcgacaacagaagaaggcgaggaagacaagaggcagccgatccatctgatctttgttgaagaaccagaagctcacatgcacgctcagctccagcaggcctttgttcgtaagctgacagatcttattcccccgagaggcgaagacggttttgcctcacagttcgtcatcacaacccattctccacacatactttacgagcgtggcttcaagccgatccggtacttccggcggtctgttgaaacgggagccaagcaaagcaccgacgtgttcaatctctcgatcttctacgagcagaatgaaccggatcgggactttctcgaacgatacatgaagctcacccactgcgacttgttctttgcggatggggcaatcctcgtcgaaggaaatgtcgagcgcttagtgctcccgctgatgattgccacgggtgccaagaagctcggagcagcttatttgagcatccttgaggtcggtggcgctttcgcgttccgcttccggaagctcgtcgagttcctgggaattccgacacttatcatcaccgatctcgacagcgtccatccaacgccacctacgccggaacctctaccagaggagggtgatacagaagccttcgccgaaggggcagaggatgatgaagaagttgaggacgacggggacattgatgacagtgaagaggacgccggtgcggacagcaaagtcgctcccaaaccaggtacgaaatgccctgctggcacgcccggggcagtgactgcgaaccagaccctgcgccagtggcttccgggcaagaccctcatcgacgagttgctcaccgctgtagaagctgatcggcttcaagcaccatctgcggacgggggcgcccacgtgatggcgacgtaccagatgccggtgatggtgacgtggggcgaaaccacccttgagcttaaaagtcgcacgctcgaagaggcgttcgcctacgagaacctcgcttggtgccagaaaaaggaaaaccgggacgttggcctccgctgggccaagtcagccgacatgacgctagaagtgttggctgcgaagatccacaaacggatcaaaggagagtggttcaagaaaaccaatttcgccctcggccttctggcaagtactgacggaggatgggtcgttcctacctatatccagaacgggctgaactggcttgcgctgcacgtttccgtgggggatgacctgccggaagagaagcctgctgatgctgacgtcccaagcgaagtcgcggagccgccgcaatga

SEQ ID NO: 74881 - DNA, 1884 bp, Haematobacter massiliensis
atgacgagccgcactggcaagccggatacgcaagcagacatcgaactccgcgaacttctcgatgatgataattcgaccggtttcgtgatggtggccggagcgggctccggaaaaaccacgtcgattgtaaaggcgctcgatcatctccgcaaaacgcggggtgcgcatctccgtcagcgcgcccagaaagtagcctgcatcacatacaccgaagttgctgtcgatgagatttggggcgatgtcggcaatgatccactttttcacgtctcgacgatccacagctttctctgggctgctctgaaaccttttcaggccgacattgccctgtgggtcgacaggcgcattgaccagaggatcgccgacacggaagccaagatcgcggctttcaccaagcgtacgcacgagaagactcgtcttcaggccgccgctgacgtcgagcggtatcgcgaccaaaagcaagagatcaaatctgtaaaaagcttcaactacagcgtcggcagcaactatccaaaaggcgtgctgggtcacgacgacgtgatccggctctcgaccgaactcatacagggtcagccgctaatcgctaaagtcgtcgggcaaaagtttccgtttatcttcgtcgatgagagtcaggacactgcgcctgatgtcgtctccgcgcttaaggcgatatgtgcagcgcttggatcaaagttctgcctcggcttcatcggagatccgatgcagaagatctacacgtccggcgcaggagtgatcgctccgctagccggttggaaggtgatcgaaaaaccggaaaacttccggtgtccaacatccgtcctgacggtcatcaacaacattcgggctgcgggcgacgcgctagtacagacgggggggaaaaccaagctggtcgggggcaagcgtgttcccgtggtcgggactgccaaactgctcgttgtgcccaaggatgatcgagtggcgcgactggcggccgtgagagattggctcgccaagaaacatgacgatcctctctggcttagtgacgcaccggaagcggatgtgaaggtacttgtcatcgctcaccggatggcggcggagcgcctgggcttcggtgccctatacgacgcgtatcacgataaaacgtccgagactctgaaggaaggttttgacgaaggcactcactggtccgtgctttcgttcctaaggttgctcatgcccctagtaatcgctcaagccaaaggtgaccagttcgaggtaatgagtctccttcgccgtcatgcgccgtcgctccagcgtaaccaagcaggaagtagcacactgcctgccgtactgaaagagttggattccaaagcaaaggtactggctgagacctgcgcaataggttcaagcgtgccggttttcgaagccctgtctcatctgaaacacgcgaggatgttcgggcttgatgatcgcttgttgagtgcaatggccgaatacgacgccgcgaaacaaattacggattcgggcgatgccgctgctgtccaaaaactacttcacctgccaatgagcgagctgtggggctatcggacctatatcgaagaacaatcacccttcgaaacgcatcaaggagtgaaaggggcggagtttacccgcgttatcacgattatcgacgacgaagagggccggcataaccagttctcttacggcaagctctttggaattacgcctccctccgataccgacaacgtgaacgcgaaggaaggaaaggagactacgtacgatcggactcgtcggcttctctacgtttgttgctctcgggctggacaagatcttgcgatcgtcttcgttgcagacgacccggcaggcgctcacgcagccatagccaatctgggtatcttcccgccggaggatgtccacaatcttgcctag

SEQ ID NO: 74882 - DNA, 1989 bp, Bifidobacterium kashiwanohense JCM 15439 = DSM 21854
atgcaattatcaaagataaaaattaaaaactacagattgcttattgatgctgaattggaagtcgattctagaacaaccttaattgtaggcagaaacaacacagccaaaacatcctgtttttcatgcattggaaaggtattgaatggggaagccgtatctttcgatgactatccactattaagaagaaaagatttctacacaaaaatcgctctgttcatggagaaaaagctcacttatgaagacctttgtaagcatattgaaattatctctatagacttcctggtggactattcgttggatgatctagatgataatttgggagcattgtcgccatttatcatcgatgttgatgtggacacaacaaccgctctaattcgtgcagagtatcgcctaaaaactgacgaaaaaaccctgtggtcgctcttggaaagcagctattataaggatggtgcctattcgccgagcgaagaagcccataaagtgcttgctgataatttcggcaaattgtttgaattaaccgtatatgccatcaatccgaataatccagaagacaaacaggtaaaaagccaaaaggaattatatgatctgttcccattccatgcaattcctgctgaacgagttcttggcgaagatgacgcacataatagttctctcggattattaatctccggcttctttgatacaagcgaagcggaactggatccagatgttgccacagaaataaaacgattacgctcaatagtggaaaaagccaataaagacgttcaaaaacagagtgatgaaatcctaagttctgttgtaaacaattctattggttttggttatcccaacatagaggaattaaagctcggagttacaacgcagctcagcatcgacgatcagatcaagaatcagactaagctgtcttatatatccggcacagcaaacgaaagtttgccaagttctcataatggtcttggttacaaaaatctgatcaaaatggagttcctccttgctgcatttgccaaggatattgagaaacgtggtgttgcatgtgtgccacttctctttattgaggagcctgaatctcacatgcatccacaaatgcagacggctttcgctgcgtatttggaaaaatttcttggcaagctctctgatgtgaaaattcaaactttcctaacctcgcattccgctcatatagctaatactatggagttttcaaaagttcggtatacgcaaaagtctaataccggtgtaatttacaaaaacttgaacacctttgctcaagaccatcctaataatgtagattttattcggaagtatttaaccctgaccaaatgcgatttgttctttgccgataaagccatttttgttgagggagcatccgaacggttgctattgcctgacatgattgagaaatgcgaaaaatctggagagtttagtcactgtaaatatcctttatctgcgcagtattatgccttaattgaaatcggtggagcttatgcacataaattcattccatttattgattttttaggagtaccgtgcctaatccttacggatttggactctgtagcaaacagtaaaggaaaaaatgggaaggcggtaaaaaaatccgttattgttagtcaaggggaaactacgtctaacgaaacgataaaatggtggattcgtagaaataaggggatttctgagaataatacttcaaaaatcaacctttcggagattaaagctataacagcagatgacaaaaccagagggaaatgccatatcgagttccaaactactgaaaatggattgtgtggacattctttggaagaagccatacgcaatgtcaatcgaaagcattataatttaagtgataaaataagcgaggatgagcttgaatttaaaggtaagagtaaaacggattttgcacttgatttaatttacaaatactctgattattgcgttcctgattacataaaatccgggttaaaatggctaaatgaccaaagagttcttgagtaa

SEQ ID NO: 74883 - DNA, 1743 bp, Bifidobacterium kashiwanohense JCM 15439 = DSM 21854
atgagtaaagagtgtattggcgtaaattatggtcttgcaaaagcagaagccgataaggttgatgcacggattatcgaagcgcttaaatcaggacacagtttccgtgttgaagctggtgcgggttctggaaaaacgtactctctgaatcgagttattgaatggatacaagcaaataaatggtctgcctataaccgaaagaaacaaaatgtgatctgtattacatatacaaatgcggctgtggatgtaattgcagaaagacttgcaaaagattcatttattcttccctctacagttcactcgtttgcatggaatgcaatcaaacagtatcagggtgttttgatcgaagctgtcacaacaaatcccgattatctgccagacgaaggtgactttaatcaggtcaccgaagttgcatatactttggggcatcgctacaaggaaaatggtgttcagtacctctatcatgacgacgttctaaagctcttctgccaacttcttgataacgctaaatttcgccgggtatttgcagataaataccctttgatattgattgatgaatatcaggactcctataagccgattattgatcgctttattaattttttcatagcaaaaagtactggaccgcagttcggctttttcggcgatgcttggcaaaccatctatcagtcaaacaaagcctgtggagaaattaaacacgaaaaaatcgaggtaataaagaagggatcaaatttccgatctgcgccaaggattgttcaacttttaaataatatccgtcctgaattgccgcaaaaatcagccattgatggatttgacggtgaagttttagtgattacgtgtgatgattattcgggagctcgtcgcacagaacgtaatttcaaaaatgaattgccggctgccgagtttaaggcaagactgaacactatcgtaacaaaaattgagcagaacacacctgctgatgaagatcttaaagttctgatgattacgcacaaagttcttgcttctcaacaaggctacgagcaacttttggatatactgaatgatgcgttgcgcaacaaggaagatccttttcttattttctttgctgatacgatagaatcgatatatcatgcgcttgatacttcgaacacccagttgctttttgacacgctcggaatcaagcggtatccaattacaaaaaaatccgaaaaaaccaaatggaaaacgctgtatgagcaactaacagaagttcgcacacaaaaagctattgatgttttgaagactatcattgatagtcaactgatacccattccgcctaaagtggatggatggtaccgactttatatggatgctccagaaacaatgtatgcatcaaaggccacaattcagcagtttttacagctagattatgcacaatttattgctgttagggattttctatatccagacgcacaattttcaacagaacatggcgtaaagggcgaagaatacgataatgttgtttttgttatcagcaggggatggaaccagtaccaatttgaaacctatgcgccaatgataacaggtcatgcttctattcctaaaggcaaagaagcatcgtatgagcgaaaccggaatcttttctatgtttgttgttcaaggccaaaaaagcggttgttcttttttgtcaccgtgccgatagattcttcattcagaacttttttggtaaaactaaccggtgaagagagtattctaacctatcgacaatttatggaagcatctaattag

SEQ ID NO: 74884 - DNA, 1785 bp, Klebsiella pneumoniae; identical to SEQ ID NO: 72734

SEQ ID NO: 74885 - DNA, 1818 bp, Klebsiella pneumoniae
atgccgtcacgtagtgtcagtgcagcctacttagctcaggctgccgagctggccgggaatccgggccagttatccgcgtatcactcccagggacactgcgtggtgctcgcggggccggggagtggtaagacaaagacgcttgtgctgaagctggcacgaatcctagctgaggatgttcaagctccacgtggtgcggcatgtatcacatatagccaagaatgcgcacgcgagctaacccgtcgtctcgaagcgctggggcttagagaggcaccgaatctctttattggaaccgttcatgggttctgcttgcgccatctgttgatgccctatgggcgactggccgatctgccaatcccatttccgctgtcagtagcgtctcagcgcgagagcgaacggttacttcgacaatctggtgaccgtctctttggcgcaaaccatccctataaggctattgatctcggacggcatcgccgttcggtgttgaatcgcaacagcgttgcctggcgtacagaggaggaactcgctgcatgggccgaggcctacgaagctgcattgcggcagcaagggctaatagactacgacgatatggtgatatttggtcagcgtctgataattgagcatgattgggttctgcccctagtacaggcgaaatttccgatccttgcggtagatgaatatcaagatttgggcgtggcactccatcgtatggtcaaacgtctggctttcgagggaggcgtacgcttatttgcagtgggtgatgcagaccaatctatttacggtttcactggtgccgatggtgcgttactactagaactggcaggcaggagagacgttgaaacagtccgactccagttgaactatagatcaggagcggacatcgtgaatgcatcggagatggtgttgggtgaggttcgtggttatcgcgcaaacgacccaaaccgccagacaaccattgcgttccagctgtgtccggatggcttgggggatcaggctgtctatgctgtcgagcagattattcctgctgcgttggctgctaagccgggccgaacacttggtgatatcgccattctgtacaaggactaccgtgccggcgatgttgtggccgatgcggtgacagctagcggttttgattacattcgtgtggataccgcagcaccttatcgtaaagttgccttgacgagctgggtggaggattgcgcagcatggtgtgctggcggttggcgtatcgggcgccctcaactgcgcggacttatagaccgttatctggcatttcatcgggcaaggctggatgatgcatgcgcccggagtaaggggcaggagttaaccaggctactttgggcacttcgtgccgaccaacattctgcatccgattttgtcgcgtcgttgcgcaacggtctcgttgattccctgctggcaactgaaccaacgctttctgatcaggctgagcaactagatcgcatgactgcagcacttgccgaaggcggtgcgttagcgatgttggatatcacgagcctaggtggtcgtgacggttcacctgagcacctcaatttgctgacacttcactcagccaaaggttgcgaatatgacgtggttatcatggtcggcttagatctggggaatttgccgtggcgtaatgagacgccagagaagctgcgtgaaagccgacgtcttttctatgtggggctgacccgcgcacgggacgaggtgcatatgctgtattccggttttgttgatggtcgctacggccctatgcgtctagggcgttccccatttctggatgaactggaggagcgaatgagaggggcaggtttaaggtag

SEQ ID NO: 74886 - DNA, 1785 bp, Pseudomonas sp. 1-7; identical to SEQ ID NO: 73772

SEQ ID NO: 74887 - DNA, 1821 bp, Pseudomonas sp. 1-7
atgccgtcgtctagtgtcagctccgcctacctggcgcaggccgcagacctagccggcaatcccggccaacaggcggcatacgactcgcaagggcactgcgtggtgctcgccggaccggggagaggcaagacgaagaccttggtgctgaagctcgcacgcatcttggccgaggacgtccgcgcccctcgtggagccgcatgcattacctacagccaggaatgcgcgcgcgaactgactcgccgcctcgaaggcttgggattgcgagaggcaccaaacctgttcattggcacggtgcatggcttttgcctgcgccatctgctgatgccctacgggcgcttggccaaactgccgattccgtttccattggcggtggcaacgcagcgggtgagcgaccgtttgctgaggcagtcgggggacgcgctcttcgggcccaatcatccgtacaaggccatcgatctggggcggcaccgacgctctgttctcgaccgaaacagcgtcatgtggcgcagcgaggaggagcttgccgcttgggcgatcgcctacgaagcggcgttgcgtaacgagggattaatcgactacgacgacatggtcgtcttcggccagcggctgattgtcgagcacgactgggtgctgccattggtccaggcgaagtttccggtgctcgccgtcgacgagtaccaggacttgggcgtcgcgctgcatcggatcgtcaagcgcctggcgttcgatggcggtgttcgcttattcgcggtaggcgatgcggatcagtcaatctatggtttcacgggggccgacggcggcttgctcacggaactggccgcacgcgacgatattgagcgggtccagcttcagctcaattatcgatcaggtaccagaatcgttaacgcctcggagctggcgttgggcgaagcccgcggttatcgggcgaacgacccgacgcgtcaggcgtccatcgcgttcgtgctgcgtcctgggggcttagcggatcaggccgcgcatgccattgcgcagatcattccggcggctctggcggccaagcccggtcggacgcttggtgatatcgcaatcctctacaaggactaccgcgcaggcgacgtcgttgccgaggtggcgacggccagcggactcgactacatccgggtcgacaatgccgcgccttatcgcaaggtgggcctgacgagttgggtcgaggactgcgcagcctggtgcgcaggcggctggcgcatcgggcggccgcagttgcgtggtttgatcgaacgttatctggctttccgccgtgcgcatctggacgagagccaggccaaacgcgaggggcaagtgctgaccgcgcttttatggtccctgcgccaggatgttcaacctgcgcgtgagttcgttgcagcgcttcggaccggtatcctcgatgacctgctggacgcagagagcgcgctcgccgaccagaaggagcagttggaccgtatgacggcggcactcgcggaaggtggcgcattggcctccctggatatcgtgagcctcggggggcgagatgggtcgccagcgcacctcaatctattgaccttacattcggccaagggctgcgagtacgacgtggtcatcatggtcggtctcgatcttgggaacctgccgtggcgcaatgagagtcccgagaaattgcgcgaaagtcgtcgcctcttctacgtgggcctgacccgcgcccgtgacgaggtccacatgctctattcgggctttgtcgatggtcgattcggcccgatgcggcttggacgctccccgttcttggacgagttggagaatcggatgcggaccgccggcttgcagcagtag

SEQ ID NO: 74888 - DNA, 2313 bp, Serratia sp. Ag1
atgcacattaagcatgttgagatcggcaattttcgcaagctaaaaaccgtccgtatcgatttcacccccaagacaactgtttttgtcggtgcgaacaatagcggaaaaacttctgctatggttgcacttcgccggttcttgatcgagcggtctgagttttccattaacgatttcactttgtctcattggtcgaagattgatgcaggtgcgttgaagtgggagtctgcgactgatggagaagagctggagccaattgagtgggacagtttcactccgttcttggatgtttggcttgatgtgtcggcgaaggaactgcattacgttcaaaaaattcttccaacgctcgattgggatgggacgagtatcggtgttcgccttcgatttgaaccaaaagatactcatgcgctgcaatttgagtacctgacggcaaaacgtgctgctgctgaagtaatggcaaaggcctgtgatggtaataaatctgaggaaaaattagatgtagtatcaacgtttgcactttggccgcgttcgatgatggagttcttggctcagcggttgcgatcaacattcgaggtccgtgcctatctgctcgaccccgcaaaactgaaagtgcccgagaacggtaaggcatgccctcaagtgcttcctgataatagcgaccctattaatggtggggatcctttccatggacttattcgcatcgacgaaattagcgcacagcgcggatttggtcacgccggtcaatctggaggagcgcgtaacaacgattcacaagatgattttgctgaaccccgggtcagcaagaggttatcgagccaactacgtaattactacactcaacatctagacccctttgatacaccggaacccaaagatcttgaggcattgttagcgctacatgaggcccaaacagccttcggcaaacggctggcagattgtttctccgatgccctggcagagcttgaggacattgggtaccctggtgtcacagatcctaaactgactatcacaactaatattaagccaatcgatgggctaaatcacagctccgccgtgcagtatgaggtcccgactcatcttgcaggaacttcgggggctcatcgtcttcctgaggattcaaacggacttggttaccaaaatcttgtgtccatagtctttgctctcatggggtttcgcgacaaatggatgaaggtggggaaggctggaaaatcgaaaacctcggaagaggctcttattccgccgctccatcttgttttgatcgaggagccagaggcgcatttacatgcgcaagttcagcaagtttttatcaagcaagcctatggggtactgcgaaagcacgacaaactgaaagaatctccaaaccttcaaacccagcttgttgtcagtacacactcaagccatctcgctcatgaggctgactttgcgtcgttgcgctatttccgtcggttaccggctccaacagaggtaggtgccgtacctttgacctccgttgtcaatctgtcggagatcttcgacggcttggacaaaaccgagcgctttgttaagcgatatctgaaggcgactcattgcgacctcttttttgctgatggcgcaatacttgtcgaggggccagcggaacgtattctggtcccacattttgttcgtgaacgagaggtttacgcttatctgaagcggagctatatcacatggcttgagattggcgggagtcatgcgcacaggttgaagaagctgatcgagcatttggggctcagcaccttgattatcacggatattgatgcaaaagacagtattacgaatgcagcagtggtaccgaaacgtggtgctgggcaacgagccagaaatgagacggtaaagacttggattccaaatgaagagtcacttgatgtacttctcgacatgaagagtgaaaagaaggttctctcagaaccgagtggctacgcagttcgtgttgcatatcaaacgcctatcactgtgaaattcaagtcaaaggacgcggttgaggctttggcaaatacatttgaagatgcactcgtctatgagaatatggaattattcacaaagcttgatggtcatggacttattgcaaagtttcgtgatgcgcttacaagttcagccgatctcgccgaactgggagtgaaggtttctgatgccttgaaaaacgggacgaaggctgaattcgcacttgacatcctctttagcgaagaggtcgatcagttgaaagtgcccatttatatccacgaaggtttggcatggcttgctgaacaactgaagcgtaaagaggataatattatcgggaaggttggagcgaaagcatga

SEQ ID NO: 74889 - DNA, 1875 bp, Serratia sp. Ag1
atgagtgttctcaaacctctggagtcagacgatgagatcgacgcaccggttgatgtagagataaggaaatgtctagaccttgccaccccgcaaagttttttcctttttgctggagctggttctggaaagacgaagtcgctcgtatcggcacttcaatatgtgcgcgacacatttggtgaaacgctgagactgaaagggcagcgtgttgccgtaattacttacacaaatgctgccagcgaagagatcaagcgacgcctgtcctttgatccaactattgacgtatctacgatacatagttttgcatggtcactgattgatgggttcaatcgcgatatccgcgagtggctccgcatggatatcgaaacaggcatcatgcagcttcaggcagatgaggctaaagggagaaaaggtaccactgcgtcagcaacccgtatcagcaaaattgcttcgaagaacaaacgtcttcagaatctgaatagcgttaaacgctttgtatatagcccaacaggtgaaaaccgtgggcgggattctctgaatcatgctgaggtgatccaactcacttcttacttcttaagaacgaagcctgccatgcaaagtatattggtgggccgttatccgatccttctaatcgacgagagccaggataccaacaagcaactgatagacgctttatttaccgtccaggcacagcataaggagaggtttgttctcggtcttctcggcgatatgatgcagcgcatctatagtgatggcaaggacggactcggtagtgatctgcctgctgattgggcaacaccagggaaacagatgaaccaccgttgtcctaaacgtgtcgtgacgttgatcaacaaggtgcgcaatgcaacagacaagcaggtgcaacggccacgagctgacagtatcgaaggtagtgttcgactcttcattcttccaagtgatatagccgacaaatctgcagcagaacaagcgatcgggttgcacatggccaaagttaccggtgatgagatgtggcaaaacctcgagctctgcaagaacctcatactggagcatcgaatggctgcaaaccgtatgggctttctggaactgtttgtgccactgtatgaagtagatagctggcgtaccaatttgctaaacggttctttgcctgtgattcgattcttttctgatgaagtcctaccgcttgtcaaagcaaagttcaatgaagatcgcttcgctatggcacgaattgtcagaaatttctcgcctttgctgagtccagatactttacgcaaagccgacgaccaacagtcacagctcaagttggcgttggcagcaatagatcatctcagcgaactttttaaagacggtgctgatccgtcgcttggcgacgtgcttcgctccgtggcaagctgcaacttattttttattcccgaatctctgttgccaaatgtgtcaggcaataaagtggccagcagtgaaaacccggctaccgacaagagtaatgttgatcgacaggccgagcgtgcggaagcaatcgaaaaatttttacttgcaccgttcacacaggttgaacggtttatgtcctacgtgtctggcaaagcacacttcgatacacatcaaggtgttaaaggacttgagttcgaccgggttatggtcatcatggatgataaggaagcccggggcttcatgttcaagtatgaaaacctcttcggtggtaaaagcatagaggatgcgtcgattgaaggtgtacgacgactgttctatgtgacatgtagcagagcacgacagagtcttgctcttgtagcttatacggagtcaccggatcgcgttcgtaatttcgttgtgaatgaaggctggttcaatgccgaggaaattattatgggcgtgcctgaataa

SEQ ID NO: 74890 - DNA, 2313 bp, Serratia sp. Ag2; identical to SEQ ID NO: 74888

SEQ ID NO: 74891 - DNA, 1875 bp, Serratia sp. Ag2; identical to SEQ ID NO: 74889

SEQ ID NO: 74892 - DNA, 2190 bp, Staphylococcus aureus
atgtttatatctactcttcaaattcgaaattttagaaattatgaatccgaaatctttcgattcgataatgagacaaatactattataggtgagaatgattcagggaaaaccaatgctcttactgcattgagaatcttattagatgatagttattactatagtagtaaaacactgaaagaatcagatttttttcatggaattcaaaatgggtggcaagggcattggattattatctctgcgacatttgaaggaatcagcgaagaagaatttgacaatgagatttgtgcttccatttctttaaattctgaaagtcaaacaatcttagaagaattgatttcaaatgcagataaaggtgtaggtagtatttctctatttattagacctaacaaagctattagaaagcaattatttgatatttccactgaattagactctcatcaatttaacgaatttagaaattctattcgtctatccgactatgaattttactacacatctaaatcaaatctaaatttctgtatcaatgaaaattatgataaattggtaggaagactcaatgacaatatagctagtaatcctgaagaagacgatgaagttcttttgggctcaagaattgacatgtcagatattttcaagcatatttcggttgtttatgttgacgctcttcgagatgttcttagagaaatgaaaaacaatcgaaaccctgtcaaaagaatcatggaaacaattgaatcaaaaatatcatcagataatgttgagtcattaaaaacaattatacagcaattaaatgagactattaccagtgttcctgaaattaggaaaattggcgaaaatattaatcggcaactaaatagcataattggttcagtgtattctcctaatcttcttctttcctcaactatgtcagatgatatgggttctttagcaaaatttctttcaatgaagccagaacaaaatatcgacttagacttactagggttaggacatctaaatatgatttatttagctttgaaaatagtcgaatttgaagcgtgtcgttcaagagaactacttaatattatgttgattgaagaaccagaagctcatattcatcatcatattcaaaaaactctgttcgaaggattaaatcttcaaaaaaactatactcagattctcatgaccacacattctgtacatttagctgaagtgtctgaaatatctcggatgaatgtattaaaatcgtttaatggcaaatctatcgttatgaatccagcaaataatctgaactcatttgctaaagaaaagttaaaaaagaacaatctaaatctaataaacgcagtagagagatatttagatgttaaaagaaatggattgcttttttctaaaggtgttatcttagttgaaggagatgctgaagaaatacttattcctcaaatagtaaaaaaattatttggtataaacttagacgaacttggaataggtttgattaatgttggtagtacttcgtttgaatatatcgctagcttgtttgacgatgatagaatacagagaaagtgtgctattgtaactgatttagatgaacaggcaatcccatcagaacatcgattgtataaaagcactgcacaagagaaaggtcaagcaagaaaagaaaaattatcctccctttttaatgaaaacaattgggttaattgtttttatgctaatacaacatttgaaattgagtttttagatgtgaataaagaaaatattctaacttatgtcagtccaattatagatgacgcattcaaagataaaaaaacaataactgcttataaagaagaaatacaaagtgaacaatatttagaaagaaatttagcgatgttaaaactagccaatcatgttggtaaggggtggtttgcaattgagttaggtgaaaaaattgactttttaatcaaaattcctaagtatattcttaatgctattgcttttgcatgtcaggaaatagtagatctctcaatttataaaaaaattctactccatacaatcgacttgtacgaggaaactacagaattgtcagctttatcagctagtttaaaaacaagtgatacagctgatttgaatatagcaataatttctttattagagtactttggtaaagatgaggatgttgtgtatctaatcaatcagatagaaaattacacaaaaatactttatgctgaggtttcaaaatga

SEQ ID NO: 74893 - DNA, 1794 bp, Staphylococcus aureus; identical to SEQ ID NO: 71697

SEQ ID NO: 74894 - DNA, 2190 bp, Staphylococcus aureus; identical to SEQ ID NO: 71982

SEQ ID NO: 74895 - DNA, 1794 bp, Staphylococcus aureus; identical to SEQ ID NO: 71697

SEQ ID NO: 74896 - DNA, 2103 bp, Paenibacillus macerans
atgcatatatccagtctgaaaatcaggaactttagaaacttcaagagagctaactttatttttaaggaaggcgttaatacaataataggtgccaatggatcgggaaaaacaaatgccttgtttgcacttagactcataatagacgatagtttaccaagatcgtctacaaacctgctcgatacggattttaaccgttctcttttgaattggcgtgggcattggattgtcattagtctgcatttcgataacctctctaatgatgattcgtctcaagccctcgtttttcagggtacgcatacaactgaaaatagcggttcattaaatctttactttaggccaaagtacgaagttcgtaaaagattatttgaaatgagtcaggaatttgtggaagatgaacagtttttagagtacctctcatctataaaaattaatcagtacgaatcagttttatatgggagaggattagctgactttagtcaggatgatgtatatacaacgttagttggtgacttctctagttacaattttcctaatccagatgaagaagataatagtctccttggcacacctgctaaccaatatgtatttaaaaatgattttgcttgtacatatgctaaagccctaagagacgtaataggggatttgaaaaacccacgaacatcaccgttgcttagaatgctaagtaacttaaacattaatgaaacaagcactgaaactgtcagtagaacgataaaagatttaaattggcatataactaacttaccagaaattagagaattggcagatggagtttctcagtcattacataaaacagttggttacacttatgcgcctagaatcgaaatcaactcaaacttatctgatgatttcaaaaatactttaagagcattaaatataaaagctggtgaatttgcaggtgaagactatattggtgatttatatgaaatgagcctgggtggggctaacttgctttacttagctctgaaactcgaggagtataatcgacttgaccatgaacaaaataaagcagctcatttcttgctaatagaagaacccgaagctcacttacacaaccatatccaaaaaaccttatttcaaaaatatcatgaccatgaaaacacccaaattatattaacgactcattcaagtcatatttcttcatcgtgttcactcgattccgtaaatattctatatgttgaggacaattgctgtgaagtttcacaacctagtagtggattggatgtcgacgatgtaaaaagaattgaacgttttttagatgccacaagatcgacattgctatttgcaaagtctgcgattttggttgagggcgatgctgaattaatactcattcctgaaatggtaaagaaggcatttggaattacgttggatgaaataggagttagtctaattaatgttgggagtacacaatttacaaatttagcaatcctgttctctaaagaacgaattagaagaagatgtgctatagtcacggacaatgatatttcaatcgtaccattaaatgacgaaacgtatgcggataaagaatttcaaaaaaaatgcaaacaatcgcaagagtctggagaagaacgaagaaaaaaacttgatgagttttgccaggacaatagttttatttcggtattttatgcaactaatacatttgaagtggaattacttaaggaaggaaatagaaacgttatagaaaatgttataagaaaagatatttacaaacgaaaaacggatcaagatagttctgttgaaaaaataaatagcccggatctgagtgtttacgggaaagaaattctgcgtttagcaaataaagaaggtaaaggatggttagcattagctattgcagctaggtcagataagaatgttgtatttcctgagtatttactagaagcgttagcattcgttgccactttacaaaaagatcaaattacatcggttattaaacatcatttggggaatgggtataaaagctttattagcacagttaagatgctttacggagagaaaccaactgagacggagattattgaatcattttgttcacttcataaagatagtatggtaactaagtttatcactttgatggggaggggatag

SEQ ID NO: 74897 - DNA, 1755 bp, Paenibacillus macerans
ttgattctccttaatacattaagcactgaacaaagggaaatcgtcgaatttaatgataacttgctagttattgcttgtcccggtagtgggaaaacaagaacgcttgtagccaaattaatctatgaggggatgaaactaaagaaaaatgagaaagtcgctgcaataacgtatacaaatttagctgctgaagaaatagagcttaggcttgaggctaactttgtcgataatcaattttattggggtggaacgatacattctttttgtacaaattggataattaagcccttttctcatgttctcgatgaattaaaatatggatactcctttttggacgaagacgatgttcaagaaattactgataatattatggataccctaaatttaagaaatatagattttaatactcgacgtaatcaaaatggagattttataagcattaatgatgaaaacgatttaatacttaaagaatacgaccgcaagctaaagaaagaaagacttgttgattttgacttaatattattttattcctataagatattaaagaaaaacacctcgatagcgaagaacttatcgactatatttaaatggattcttattgatgagtatcaagatactcaagaattgcagtacttaataattggtgaaataataaaagctggttataatgaaacgaaactgttaattgtaggagacccgaaccaaggaatttatcagacattaggtggggtttcaaaaacaaaacaagaaattgttgaatgtataggtggctatcaaattaatgagaaaagtttaaatggtaattataggtctactcaacaaattattaatatctataaaaattttcaaatttatggagattcaatagaagcaaagggcaagaataaagataatacttcacttatttcttttaatagagatgtaaaagtagagagtttagcccagtatatcagaaacctaatttatgaattacataatagtaaaggtataccgtataatgaaatagctgtgatagctccacgatggcaagaattaataaatatggcaagatcaataaaacaattagatccaaatttacctttagatgctgctggactatctccactttacagagatgataataatttattttatcatcttgcaaaactactcttatccactccagcaccagataaggtaatattgcgcatgagatgggcaaatgttctactcgagtctttggaagaaaaattaccgcaaatatctgactcaaatctcagtccgcaaaaaattttaaaagtaatcaactcattttcttcttccagtgtattggggatagagtacttaaaagaaggtttttcgtatttctttaacaggataaatatcgacattaatttgttttcaaatttggtgttggaactgaatgaatttgagaaaaagtgcatcaaaaggcagacaagaaatggtataggggattcgattgctatatataagaatggatttgcaaaatcgggaggaataacatttatcaccactcataaatgtaaaggacttgaattcgatacggtaattggattttgtttattatggggataccttcctcattggaccaacatattctcacatgaaacagatgaaaatgaaatatcaagaaagttactttacgtcctctcatcaagagcaaagaataatctgtttttgattgcagagtcaggtagaagaacaactcgaggcacaccttacaacgcaaatcgtcatttaattgaggtctttcgttag

SEQ ID NO: 74898 - DNA, 1767 bp, Bacillus paralicheniformis
ttgaagatatcaaatattaaggtaaataattaccgaaacttaagaacagtcgatttagataccaataacgttgtgattttaattggggataataatagtggtaagagtaatcttcttagagcaataacgcttccttttatgaatcatgatattggagcggttaataaaaacctcggttggcaagacattaatagtgcatcaaagcaagactattattctttcatagaagaaaatttagaagaaattaaaagcagtgtatgtgaacttgataaatttattgaccatataccttctgtaagcgttgaagtaacacttactccccaaaaaattgcagaagaatattatgttcgcaattggataaataatttagacgatgatacaccctcattcactataaaatatgaatataaagttgaagatcctcaagatttacttcgccacatctcagatatattaaaagatgttgattccatagatgatttaaaaatgaatttactaccaattgagttttataaacatcaaacaatcatccccacaaccaatgaaaaggtttcttatacggacctggcttacttcaaatataatgcactagctgctgaaagagatgatttttcaaataaagcttcacagctaggctctaaatcattagtatctctcttacatagtaagatgaatacagatgacaaaaagaaagtggaaaaatcatatgagacttttttcaatgacttaaagaacattagtagcttagaagaagtatttaattggcaggaatcatctgacttggaaaatgctaaagatttttttgggaagattactttgctaccgaatgttccttcaatgagttctttattaaataatgttcgtttaggttatggcgatgaatatttaaattcgcagggcttaggatatcgaaacttaatctatttatttgtcatgttgaattctttaagcatagaaagtgatgtagctttaaatatattaacaatagaagaacccgaagctcatttaagtgtaagcaatgaacaccttttagctagttttataaatacaacgatgagtaacaatcaccaactacaactatttatttcaacacatagctcagagtttcttaataagcttgaattaaagaatgtagcaatagtggcagaaggaaaaacttatgctctaaagaatgaactcgaaggtgatcaattagattacttggctaaaaaacctaacttggactttctcaagtttctctattcaagaaagtgcattctagtagaaggacctactgaggaaatgcttatcaaatcttaccttagtacacaaacgaaacagttaaatgatattgaagtaatctctttacataagggctttaaaaatatgcttgatatatggcttaaagtgaatcaaaatacaaatcataaaatcggtataattagagattttgacaatcaaattaaggcaaaagaagatcatgagacttataatcatcatcccaacatttatataacaactacacaagagtataccctagaacctgaattcgtaaacacaagtaataattttcaaaagctaaaaaagtacttttctaccaagtatggctgggaagatattgacactaacgaaaaactttcagataagtggatgggagcaaagatggatactatgttacacttttgtcaagacatagaaactgaagaattaaaagatgtggtaatgccaaatcacattagcgaggtcattcattttttaaaaacaggagaaaaaatgtgtatattgtag

SEQ ID NO: 74899 - DNA, 1377 bp, Bacillus paralicheniformis
gtgtatattgtagtggctggggctggtgcaggaaaaacaacctcaatggctgatctcgtgatatcaaggcttaaagagattactgataataaaataatatacgttatcacttacactaatgctgcgagagatagaataaaagaaaagattacagagaaagaagggaacatccctagacaactaaaggttgaaactatacattcatttttgttaaaagaagtgatttatccttttaatcacttaatttataaaaacctttataaatctgcttcacagatcccccttccttctaaacctgcctataaagcaacaaagaaaaaggaactaagagaggaacatataatacatgtagaagatgtaacaaagacagccaaatatcttctttgtggcaaaagcaatgataccgtaaagataaaactcaggcgtgataatgctttaaaaatgttgtctagatacttagattcaatatatgtagatgaagcacaagatatggataaagagctttcagaagtattaaccatgtttgcgcattttgatatcaatgttaatttaataggtgatcctaagcaagaccttagaaatagaggagcttttcggaaaattatttcgggtgatttaactgttgaatacaaaccagagaaccaccgctgtcctagtacacatgttgatttttctaatagtttcattccaacagaagaacagcaaacttccacaaatgaaggaggcaccttacaatacttattagagtcaaattgcagcattcaagaagaaattgaaagtggtttgtatgatttggcttatatttatcaaaagaacactagatttaagactcatcgagtagataaaaataaatcagaaaacttattattttacgaactaaagtccttagcacttaaagcatcttctattaaagagaaaaacttagatctagtggcttatgtacttttaaaaaagacagctaacgctatgaaaaataacaaagctactgaatatatctttgctgaacttgagcacgatctttcaatagttctaaattataaagataaaggaaaaattagatctgctgtggattcatataggaatatattaacagtagaacctgggacattagtagattctattgatgctatcaaaggattagaaggctataattgtttgtttataatttccactgagcttgctccgtatttatttaaaaaagttgttgatcacaataaaatgatgaactatttatatgtaggacttactcgctctaaacgggatttaactataatggttacaactgaggtagaaaaaaagtatggccataaatacatccatgaaaaatttaatgaactaggcatagaagagctaaaaacctatactagagctttttaa

SEQ ID NO: 74900 - DNA, 2127 bp, Bacillus megaterium
atgtatatttctgatttagagatcacaaactttaggaattttaaaaatgctaatttcaaatttgaaccaggggtaaatactttaatcggagagaatagttctggaaaatctaatgccctatatgcaataagattacttttagatgatacattgccgattaatgcttcaaaatttttagaatcagattttaatcaaaatattattgattggaaaggtcattggatcgtattaaaacttacttttaaagatttagattcgagcgaagctgccagttttttagcacatcattctgaggacgtaactactgatgaatcaataggtacttatgcactctattatcgcccaaataaatctgtgagaaaacgtttatttgaatttacacaacaatcaagacatattgaagatctggatgaaatattaaaagatataactgtgaatgattatgaaacagtttttacctgcagagtaaatgcagattttaatgatgaacaaatgtataaagagctagttggagattttgaggaaggaattttcccagatccagaagacgataatgctaatattttaggaaatatttcaccacatattacgctgataaaaaaagaggtttcatgtacttttgtaaaagctttaagaaatgtaatatctgaattaaaacaaaggaaaagtagtcctttattacaactcttacgtggtacagcaaaggatattgaaattgaagaagctgatgcaattaaggaacaaataaaagcgttgaatgaaaatataagtgaattaaatgaaatagatatattaacgaaaaaaattaaagcttctttaaataaaactttaggttatacatattcacctaatgtaaatatcaagtctgaattacctgaggaaatggaaactttgcttcactcattaactttatgggttggagacgatgtaaatagcaatcaagggaaattagatgacgtaagcttagggggcgcaaacttaatttatattaccttaaaacttttagaatatgagctttatcaagatcaagaagaaaaagcagctcacttcttattgattgaggagcctgaggcgcatattcatacacacgttcaaaaaactttatttgataaatatcattttgagaacactcaggttattataactactcattctactcatatttcttcagcaagtaagattgattcagtaaatattttaattaaagaacctggattttcaaaagtctgtcaaccgagtaagggattagatggtgacacttgtaaaagaatagaaagatatttagatgcaacaaggtcaacattattatttgctaaaggagtcatattagttgagggagatgctgaacttatattaataccagctatgtttaaagctgtgtttggtcttagcctcgatgaaataggtgtaagtgtaataaatatgagtagtacagtatttaaccatattgcaagcttgtttgatgatcaaaggattcatagaaggtgtgctattattacagactttgatgaagcaatagatgtccttcctgaaaatcctaatgatgataataaggaacaaaagaaaatgcgtgattcacaaactgctggtcaagaaagagcagaagttttgaatgctatctattctaataatccatgggtcgaagttttttatgcatcgcatacgtttgaaattgattttgcactaaactttaataagcatgaaataaaagaaattcttcctgctatttatacgagacaacacgatatcgatgaggctaccaagaaattagattcaggtaataaaatagtagttggaaaagaagcaattagattagctaataaagtaggaaagggatggtttgcacttctattgtccgaaagcattgatgtgtttacttttataccagagtatatattaaaagctattgcattttcttcgcccaatcttacgagagatcatttaatagcaatggcaagttatagagttaaaaatcaagaattacacttaagtgatgatggggaaatatctttggaaaatatgtcgttagaggatttagttgaaataattaaagaggctaaagatgatgacgatttaataaagctgataaatttattaggagttgaattaagagagtatgcacattga

SEQ ID NO: 74901 - DNA, 1800 bp, Bacillus megaterium
atgcacattgatttaaatccatttcaaaaagctgcaatcgatgaagaagaaaatgcacttgtaatagcctgtccaggtagtggtaaaacaagagttttaacactaaaaattgctaaagagcttgaaaagttaaaaaagagaacagatagaatcatagcattaacatttactaaccgtgcagctgatgaaattgaaaaaagagtacatgacctgggtatagatgtttctaaattgtggacaggcactattcattctttttgcttacaatggattattaagccatacggaagttatttgccagagctccaaaaaggattttccatattagatgaatttaaggcacaggatttaaaaaatagttttaaaggggattttgatattcctggatatgaggattttattactaggagggacagggcaggaaattatgtaaatgagaaaagtaactttaatgaagctgccgaaacctaccataaacatatactggaatgtaaattaatagattttgatttaattttatatttttcatatttattggttgaaaaatatcctaaaatcgctgacaaactttctagaatttttaaatatttttttattgatgaatttcaggatactcaagatcttcagtacaaacttattggaaatatagtaaaggcagcagagggtgaatgtaagattttccttgtcggagatccggatcaagcaatatttaaatcattaggtggggttgtaaaatctccttcggaaataagccaagaaattggaggttatagtgttaaaaagttagggctaaatggtaattataggtcaacacaacgtattatagatttatacagtaattttcaaagtacaggtttatcaatagaatctttgacagattaccatgatgaaggtggaattattgcgtttgatagagtaataaataaagataaattggtagagaaaattacaggcattatacaagaacaaatttcgaatggagtttctcctaatgagatttgcgtattagcaccgcaatggaatttccttacctctatggctagaaaattgaaatcacatttaccggatgtaacgttcgatgctccaggtctaactgttttgccacgtgaccgagacaatttttggtttaaacttacaagaattattttaattaccaaagagcctgataattatttgattagaatgaaatgggcaaagcaactcttagaagaattagttatgttgaatggtactgttgtttatgctgatattgagagctgcaggaagttcttaaaaacaataaattctataaatatacaaaaagaagatgcagttgaatttttagaagcatcctttaagtatatatttaaaaagattggctttgattatgcatccagtgatttattgatggggcaatgggatagtttttttcatggactaagtcgtcgttatgagtattcagactttagtgatattcctaaagatattaactatatgaaaaagatgtttaatacaaaagaaggtgtggttataaatacctgtcaaggtgttaagggagaagagtttcatacagtaattgcttttggtcttttaagagggtatatcccacattggagtcaaataattaatcaatcaataagtaatgagatagcagaatcaaataaattattatatgtaatatgttctagagctaagaaaaatttatttttattttctgaaaatggtagattcactaaaaataaacaagaatatcaagtcaacaatcagttaaatacgattgcttttgagtttaacagtctaacatcatatagaacggagtga

SEQ ID NO: 74902 - DNA, 2034 bp, Bacillus subtilis Miyagi-4; identical to SEQ ID NO: 72372

SEQ ID NO: 74903 - DNA, 1740 bp, Bacillus subtilis Miyagi-4
ttgttagcacagaaagcttgttatttgttagaaacaaacatcagcacatatcctgccagaatacttgctataagttttaagaaagatgcagcaaaaaatttaaaagaacgagttgaaaaacgatctggtaaagaatttgcaaataggtttgtctccttaacatatgactcatttgcaaaacaactaatggatagatttcatttagctatacctgacttttatagaccaactctagaatatgaaatagttaattttaatagaagagatgtaactaagcttagagaagaagcagaagaacctatcggaaaaataggttggaattactactttgattatgacctttttgcaaagacatacgcaaatgacaaactaccattaataacggaaaaaatagattcaatagaatcttggtataagtatcaactttggaaaagctatattaatgataaagaaagttcaatgttgacattccccatgatctcaagaattgtggaatacttatttagatcaaaccctaagattctaagagcaatcagagctacatatagtcatgtttttttggatgaatttcaagatacaaccttaattcaatatgacttagttagaacaattttcatggattcaaatgtttcagtgactgctgtaggtgatcttaaacaaaagattatgggttgggcgggtgcaatggagggtgtatttaatcaatttaaggaagactttaaggctaaagattttgagttggttttaaaccataggtctgcccctaatttagtccgaattcaaacatcaataataaatgatatgatggggggttcaacagtaatatcaccctctgacaaatggaagaatgaagaggtgggaatatgcgaagtatggaacttcaccaatgcttctgaagaagcaaaaacattggcattagaaattaaaacgtggattgatcaagaaaaacttcaacgaagagatataggtattttagttagacaacgggcagatatgtattgtgacatgcttataaatgaattaagtaatttaggaatacactcaaggatagaggatcaatggcaagacttactagcggaaaatttcatgaaatatgtaatcgacgtattttctttagccacaactgatcgtgaccctaatgcgtggtctagtttaatatcgaatgttttaaatttacgtggtgaaaatgaaacaaaatcttaccaaatagaaacagaaattaatagcttcattgttgaatttaaaaagactcttaaagatgagacattgaaagtgaccgaaaaagtagtagagcaatggttattcaaaattttaactctggtaggattagaattaattaaaggtagctatccagaatatagaaaaggagattatttagaaagaaaagtaaaacaaactgcagagtttcttttttattcatttgagaaacataaagtgtggaataaagcagtagacgattttctgggtattttttcaatcccaattatgtcaattcataaaagtaaaggtcttgagtttgaaactgtgattttattgggactagaagacggggccttttggaattttgagaactccccagatgacgaaacatttactttttttgttgcattgtctagagcaaaaactcgaatgatatttactttctgtaaaaaccgcttctatggacaagataaatctaagataaatgttatctatcaaatgctggagaatgcagacgttaaacaattcgaatggacgtaa

SEQ ID NO: 74904 - DNA, 1872 bp, Pectobacterium carotovorum subsp. carotovorum
atgtacttatcaaagctaaaaattaaaaatttcagacaattcgaagatttttctttagagctaaataaaggacttaatttacttgttggtgaaaacaatgcagggaagagttctgtcatcgatgctattcggattgttcttgatactacgtctgtggaatgggtgagtataaagagtactgactttctcagtggcaaaaatgagttatatattcaattgaaatttgaagatctgtcagtccgtgagctaggcttatttttagagcatttaactaatgaagaagtaacaactgaattaaacaagtgctgtttatatataaatctctcagcgattataacaactaatccattcaaaaaaactcaatttattaagacggaaattcgctctggttcgaataatgatggtccagccatagaacgagatatcagagaatatcttgcttcaacatatttgaaacctctacgcgatgctgaggttgaactatcagctgggcgaacctcgagactttcgcaaattttaggaagtaatgtcagtttagccggagatgaaggagcgacccagcgaatcattgagttactaattcacgccacacaggctattcaaaatgactattcgatccaaatgactcaagagaaaatctcatcacttctaaactcattaacatttaaatccaatatatttacaccctttttaagtttattgggaagcaaagaatacactgacatgagcgcccctgagaaagcatttgcactcaaatccatattggaaaaattatcacttgaactcaacacctcaggaattaagcatggattaggatataacagcctattatttatggctacagagctaatgctaattcgtcaggaggaagatcaatattcacttttactagttgaggaaccagaagctcatcttcatcctcagctacagttgaaatttattaaatatcttcggactgaaaataataaacttcaatgtattctatccacccatagccctgtgctttcatcaaaagccccattggaaagtttaattttaatgcaagatggaaaagcctttccgctaagaaaaggatgcactgccctaagtggtgatgactatatatttcttgaaaaatttttagactcaactaaggcaaatatgttttttgcaagaggtgtattgattgttgagggaattgcagagatggtgttaatccctaaaatagctgaattaatagggcgaccactggaagattatgccgtatcattggttaatgttaatggtttatccagaaagaggtacgctaaagtttatcgttctaactccgcttcattgtctccctcttatctcccaattaaagtggcgtgtgttactgatttagatctatggccaaatgaagctgaagcaacgacttcaaatagttatggatttaaacaaaaaatacagcctaacgaaactaccggccgagggggaaaccttcaacattggcttaatgagttgacttcagaacaaataagccagaaaaaatttactaaagccgaattcgatggagatcttgttaaaacatttatatcaaatgattggacatttgagttctgtcttgccaaatatggactaagtgaagaactatatgaagccctccatggtaaccttgtaggctatgaaaaccttagcagtgatgtacaaataaaatctgttcagttatatggtgaaattgaaagcaaaggcgatggaaaaagcgaagtaagttatcgtctagcaaatattttatcgaaatatagcgagcggccttcagaattaaaatctaaactacctccttatattatagaggcaattgaatacgtgacagaagcattccctaatgaagaggcgatgccaattgaacattga

SEQ ID NO: 74905 - DNA, 1869 bp, Pectobacterium carotovorum subsp. carotovorum
atgaagaggcgatgccaattgaacattgaaattagtgaaagagacatcaacgatgtagagcgagagttaaatctgtcatttgatgatgcccgacgggagataatacaatcatataatgatgtccaggcttgtcccggtagcggtaaaacaacaatggtagcagccaagttgttaattattgcaaaaaagtggaagagtttacatcaaggcgtatgcgtcctaacacatactaatgtagctaaaaaagaaattatagaacgtctccatacgagtattcatggtaggaagttattagcgtcaccacactttattggtactattcaagagtttgttaataaattcatagcaataccttatcttcgatctcaaggatttaaaataacacacatcgatgatgaaatatgttgtgcgagaggatggcatcttcttaatcgaggaacaaaaaattatcttgaacgaaatagaataacatctattcaagatatgcaatataagtttatagatgctggccttaaacttaacatccctggtttccttagagaatcacaatcgaacagttatcaagatttaataaatgccaaaaatacactgataaaagaaggttacttcttttatcacgaaatgtatgaaatatcaaaagactatatccattgcaaccctgatattataaaagcaattcaatctcatttccccatcatttttatcgacgaaatgcaagatactcaaaagtttcaggatgaatttttaaacacaatctttctgaatgataaagttaagatgcaacgatttggcgatcctgaccaagctatttacggaactaatgaggaagagaaccaaacctataaccactcagtgttagataaagtggagaatagtcatcgttttaataactccatcgcatcaattgctagaaacctaagttataatcgcataaacttaacgtcagaaatcgcccatcctagccaatcactaaatacaatcttccttgttgatgataactcacgcactaatgtatttgagcacttcgctaacttatgttcacatgcagttccgattgactgtgaatacccgataaaatccgttggtgctgttggtaaaaaaaaggaaaactctttaacaatttgcagttattatgatagttttgataagactggttcaacagtagcgtttaaaaataccaagctaattcaatatatatatgctgctcgccaacttaatcgtaatagcgaatcctaccgtttaatccttgaaggtatttctcactttgggaaaatatccaattctaaaatcaccatgcaagatggtgcacaatttgacatatccgttgcgaacataaagaaacatcttaaattatcttcaatatttgttgattttaacttgttggtaatgtccctaatggcaaacgaaatatctagagacacttgggcgaattctgttcctatattattatcttatctagggataaatgtctctaatcaagatcaattttttttatcttttgaaaatgatgtaataaataacaccccatcaagttcgactagaaatagcatctctattgaagtagacggaagaatcatagagaatcaaattgcaacaattcactctgtaaaaggggagacacatgctgcaactttacttctagagacaaaatatcatactgatgatatcaccaccttaattgattatattctttcagaaaacatagcacaaccgacagaaaccaggaaaaagaaattcatgaagcaaatatatgtcgcgttgacgaggcctaaatatttgctatgcattgcaatgaataaatcaggatttccgattgagcacatttccaagcaagagtttgcaggttggaatatttgcgatttaacctga

SEQ ID NO: 74906 - DNA, 1791 bp, Pectobacterium wasabiae; identical to SEQ ID NO: 72834

SEQ ID NO: 74907 - DNA, 1821 bp, Pectobacterium wasabiae; identical to SEQ ID NO: 72835

SEQ ID NO: 74908 - DNA, 1980 bp, Pectobacterium atrosepticum
atgaaaattacacaaatggagatcaaaggctttaagagctttgataatgtagggcaaactataaatattaattcattcacaagcttaattggagggaacggaacaggtaaaacggctgttctcctcgcgttaacaagaatgtttggtgttaaaagctccgatagaattgttcaagttgaggatttttttgttccccctggtgatgaaatcgaagatcagaatgaacgagaaatatcaattcgtgtaagattcgaattcgcagagctaaaagatggtgaggacgattcagttgcagacttctttaagcatttagtttcaagtgaagcggatgagataccatactgtatagcaaaattaaaagcaaaatggacaaagactaaccttgcagaaggggatatagaaagcgatctagtatgggaaattggggagtatgaaaaaaatataacggcatatgaaagatcgaaaattcatgttcattatgtccctgcttaccgagatcctgcccaacaactgaaacaaacagccggaaccatcatgcaccgtttgataaatgcagtcgaatggtctgaacaaatgggaactacggttgaagaggttgcgttatcaatcggaaaacaatttcaagaagaagttggaattaagacaataacttcatcattaggaaaaaactggaaaactctttttagtgggggatatttcgaagagcttaaaattcagccagtgatgaatgggatagaagatgtattaaagcatatagatacagtatttatgcccactccagttactcaaccactaccaactgagaggttgagtgatggaatgaaatcattgttttatctttcattagtaaaatcagcatttgatattgaagatgagataattaattcaaaagaaaaagaattatcaatatcagtagaagcattagatcctccaaacttaacgataatattgatcgaagaaccagagaatcatctttcaccgcaatatttagggcgaatagttaagctgtgtgaagagatatctgagaatgatcgagcacaggttattttaactacacatgcaccagctttactgaatagagttgaacctgaagatattcgttattttcgactgcaagataataaaaatacaattgttaaagagattatattaccaaagcaagttgaagatgatgttgataaagtagatacttttacatatgtaaaggaagctgtaaaagcctatccggaaatttattttgcaaaagttgttattcttggtgaaggagatagtgaacaaattgtcatacctaaagttgcacaggtaaacggaatagagcttgatacttcattgataacatttgctcctttagggggaaggtttgttaatcatttctggaaattattgaacgagctttcaatacctcatgtaactctccttgattacgatttcagaagaggtggtggtggctggggaagaataaaatacatcattaatcaattgattgaagtggggtgtgatgaagatatagtacttcaaacagagggagggaaacttacttcaaaagaacttaaaggaatgcataaatgggacgaaaacgaaaaagatgaaaaatcatggttagatttatttgaaacctataatgtatatttttcatatccatatgatttagactggataatgttaaatgcattcccggcaagctaccattcttttatccctgataatggtggtccaaaaatcctcaaaaaaactgatgctgagtatattgataaaacaaaaaatgctatcgcgtcagtattaaagaaagatgctgaagatatagatatcgactcttttgatgatcatgaacaatattattggtatcgatatttattccttggtagaggtaaacctctttcacataactatgttttgaataaactcgataatgattcattgaaaaataattcaccagttgtattgaaagatttgatcgaaaaagtgagaggtcttctctaa

SEQ ID NO: 74909 - DNA, 1848 bp, Pectobacterium atrosepticum
atgccaataataaaagatgataattgggttctaaaagacatccaagaagttgaagacgaggctatgagggtaatacggaatagtacaaatcataatctcgttcttgctggtcccggtgcaggtaaaaccgaattattggctcagaaagcatgttttttgatagaaactgggaaatgtagaaataaaaaaattatcgcattatcctttaaaaaagatgcggcaaaaaaccttcaagatcgtgttaactcccggcttaattcaaaatataggcataaatttgaatcaaccacgttcgatgcattctgtaaaagtattgttgatcgatttaagagtactcttccgaaagagtatcgcccatcagacgactatgagatatttttcacgaataataaggattttgttgaagaagtaaaaaaggaggcagtaaattttcaggggttaacatcagcagagttagataaattaaaaccttataattttgaggagaattatattgtaactccctataaacgagaaacagaacatacagttgatggtagaataagacgttttgtttggttgcacctattaaaaggtaagtcaagggtttcttttaagatgttgaacttccttgctaattatattattggcaagaataaattcctttcgaatgctattaattcaacatatgactttgcatttattgatgagttccaagatacaacatataggcaatatgaaattttcaagagtatttttctggataaaaaaataaagataacagccgtaggcgatacaaagcaaaggataatgggatgggccggggcattgcacaatgcttttgatattttcaaacaagactttggaattgaaaattgtaatgaattagtgagtaataggcggtcgcttaaaaatctgataaattatcaacgtatgatggaagcttttatgaatcatgcggatattaaacctgacatgaaattgattgacaatgaaggcatagcaaaattaatgcaattcgatgatagtagctttgaaggagcctatatagctttgtgtattcagcaatggataagtgaaggggtaaacgaacgagatatatgcatcttactaagaaatccagccaaacaatattcagaaaacataattgctgcattacagttattgaaaataaaagctcgtattgaaaatgagtatcaggaattattgaatgatgcagtagtgcagttgactttacagctcctaaggtttgtttgtaacaggaggtcgatagagtgttgggattctacaatggaacttctgtgtaacataaggggagtaagtaaaaaaggtgatattactcgtttagaaagagaattgagtcgatttataaaatccaacggggtaataaaagataaggttattgactatatatatactttattaagcatatttggtgtcgatgagattaaatcttactttccacaatatatgaatggtaatgctttagaatatagtataaaagctcttgctagccatctcgaagcattgggtattaaaaatagcatatcggaagctatagatatgttaattggagatgatattataccacttatgactattcataaaagtaaaggtttggagtttaaaaaggtcatcatagtgggacttgaacctggtgcttattttggtgatgatgaagaacaaatagagaatcaaaaaactgttttcgtaggcttttcacgagcaattgaagaagtattaatgactcgttgtaatagacgaaataacaattatgggaggtctttaccgcaggatatttctgaaataccactaataacaaacatgttaacttatagtggtattgaagcggaaaactatcaagcttaa

SEQ ID NO: 74910 - DNA, 1974 bp, Geobacillus icigianus
atgtacatatcaagcatgcggattcagaactttagatgttttgatgattttttcatcgaatttaatgagggtttaaatgttttgataggaagtaataatgctggaaaaacgacaattattaaggcattagaatatatttttaggcgtacgggtgtaaaatctcctacaattgatgatttcaataaaaatgtggatttggctgttccgccagagataacaattactgtgacattacgctcttcaaaaacagacacaacagatgataaagcgattgttgcaagttggcttacaaaattggataccccatgggaagcccagctcacgtataaattttttctacctgagcaagaccataaaccgtaccatgatgattatgcaaaaacctcttccactaaagaacgttgggcattgctagaaaaaaacttgaagagatatgtctcaaagatatacggtggaaatattataaataaaattcgtgcagaatcagagtatttagacaaaatacattgtgaatcgttagatgcacttcgagatgtggaaagcaatatgtttactggaagaaacacgcttttaaagcaattattaatgcattttaaagataaggtggtagcggcagaacctgcggacaatggactgactaaggctcaaatatttgaccagtatgcagacttgttagtgaagaatctaattgaaagagtaaaccaaaaggaagtgctaaagtttgcagaagacacaggtgcgtctgttggaggtacacctgctttggatgggaatttagatgaaaatgatgtgctatccgttcttcgattaataatcaaggatcggactggaatagagatacctatcataaacaatggcatgggttataacaaccttatatacatatctctgatcttatcaaaatttaaaatgattacttccgaagaatacggggaaaacgccaaaacttttccgatacttcttattgaggaacctgaagcacacttacatccagctcttcaatataattttctaaaatttctcaaagaagaagtgaaaaatcaaacctttagcagacaaatttttataactacccattcaacgcatataacctctgcagttggtttaaaaccaattatttgtctggaaaaagatgaaagcggaaaaatctttgctaagtatcctgataaagtatttttagaaagcaacgaggatcaggaatcaaaaaagtatgtggagcgatatcttgatgctacaaaatcggctatgttatttgcaaagtccgtaattttggttgagggaatggctgaattgttacttcttcctgtactggcggaattgattggttgcgatttggataagcatcatgtctcccttgtccgtgttgattcattaacttttaagcacttcattaaattatatggagctggagttacttcggaaagacaaaaatatgctttacaaaaaagagtagcctgtattattgattctgatccagctaaattagagaagagaaacgatagtagttctggaaagaaaagatggaaagagtgttggccgtttgagataaatcaagatcctgaaaactacgagtatcgtgaaatatcaggggctgtaaagaaattattagaacaaaaaaataactgtttgaatgtagagatattctacaaaaaggaacatggaaaaacatttgaatacgatttggcttgggacaattataacagtaagctactttttactgatgaagtagaaattgttgaagttgacgaacttaaggcaagtaattgggaaaatgaggataaagagagggctaagcatgcttcgagcttccttttgtacgcaaaagggagaaaaggtgaacttgcttttgaattggctagcagaatacaagagaacaaagatgaaagattgatagtacctgaccatattcgaaaggcccttgagtgggtgtgttacaaggataatcaaggggtagggcaggatggacaatattag

SEQ ID NO: 74911 - DNA, 442 bp, Geobacillus icigianus
atggacaatattagactgatttcttctgatcaacgaataccattatcagatcttagtcgtcattttaaagtgatagctgggcctggggcaggaaaaacgcattggcttgtagagcatatcaaaaatgttcttcaaaatgcggagaatcttacatatacttcaaaaattgcttgtataacatacacaactgttggtgcagaagaagtccaaagtcgtttgggaatgaatcaggaaagggttgaggtatcgacgattcacagttttctgtatgcgaacgttgtaaagccgtatgtgtatttattaaatgataatcatggaaagagattggttaatgttgaggagttagatggccattatgaaaatatagcaacaaacgggaaaatatatcaatggaaggtaaaaacaagagctcattatcttcaggataataaaaagctaaaag

SEQ ID NO: 74912 - DNA, 2202 bp, Clostridium botulinum
atgaaaatagcatttgttgatattcaaaattttcgtaaattaaaaaaatgtcacattgattttagtaaggaaactacgttgtttgttggagcaaataatagtggcaaaacatcggctatggatgcacttggtaaatttctagcaaagaggagctttgtgtttaatgacattacgttatcaaatcacgaagcaataaataatattggagttgagtgggaaaaagaagaagcactacttccagatacaatagttttatgggaggatattgttccaatattagatatttggttaagtgttgctaataatgaattacaatatgtgtcgcatatcatacctactcttgattggaaaggggggattttaggtattagatttatacttaaacctaaagatataagtaaattgtttgaagaatatagagaggtatattttgctgcaagaacaactgaatcaaaaaatactacaaaggtactatcattatggccaaagaatttatgtgactttattgaaaaaagattcgcatcaatatttgtacttaaagcctatattttagatccaagcaaggttaataataagattccacagaatacagattttcaaatggaatgttttgaacaaaatccattgaacggtttgatacgtattgatatggtgggagcacaaagaggatttgctgatccaggttctgaagaaaatggtgaaaaatcaatacatagtggtggtttatctgcacaacttagagactattatgataagcaccttgatccggaaaaaacccccactcctgaagattttgaggtattgcaggcaatcgatagtgcaaaaacaattttcaatcaaaatctaaaatcgaaatttaacacagctatagaggaattagaagcccttggatatcctggagtgaatgatccacaaattactatagagacaaaagttaatgcgagtgagacacttaatcatgattcagcagttcaatattcattaggaagtgaccataataatgatttaaagttacctgaaaaatacaatggattgggatatcaaaatttagtttcaatggtttttcttttaatgcgctttagagatgattggatgcaggtgggcaaagctaaaaaaacaaaagaatttcagggtaaaaagatgccaccactacatttagtattgcttgaagaaccagaagcacacttgcatgttcaagtacagcaggtttttataaaaaaagcatacggtgtcttaaggaataattcatttcttaaaaaacatcaagatttttcgacacaacttgtgataagttctcactcaagtaatattactcatgaaatgaatttttctgatttgagatatttcaaaagattacaggctacggaagattgcaaagtaccaacatcagaggttgttaatcttaccgatgtatttgggaaagatgatgaaaccaataggtttgttacaagatatttaaaatctactcactgtgatttattttttgcagatgcattaatattagttgaaggttctgctgaaagcatgttgattcctcattttataaaaaagaaataccatgaacttaatcaaagatacattagtattttagagattaatggaagacactctcaccgattaaaaccgttaattgaaaaattatgtttgttaacacttgcgattacagacatagatcctgctgatgaggaagggtatcataaagcacaatgtccagaaagaaataaaggatttatttcgagcaattacgcagtaacatcttggttattaaatgaaaaatcgttggatgtcttacttgatttgcctacaaataaaaaagtggtgaatttcaattgcccttatgattactcaatagccatagcgtatcaaacaccacagaaaatattatttgattcaaaggaagttgaagcattatcaagtacatttgaagattctttgatatatgccaatttggaattatttaaaaatcataatggagatggaatttttcaaatcgctaatagcgtaattaataattctaaaacttttgaggaacttcatttagcattatattcaaaattaagggaaggtagcgctggtaaggcaggatttgcacttgacttaatatattctattgaacctgaagaattaattgtacctccatatattgatgaaggattaaattggttacaggaacaactaaaacaggaagtcagtaattgctag

SEQ ID NO: 74913 - DNA, 1854 bp, Clostridium botulinum
atggataaaaaagaatgtataggtgatgatcatattgatgaccatgttgatgaagaaatcaagaaatgctttgagaaaaaaaataaaaaaagtttttttacctttgcaggtgctggttccggaaaaacaaaaagtttagtaaatatattaacttatatagaggagatgtatggttatgagcttttaacatattcaagacaagttgctgttataacttatacaaacgcggcatgcgaagaaatattgaatcgtatagattttaaatcagtatttgctgtttccactattcacagctttttatgggaactcataaaaaatcagcaacgagatataaaaaaatgggtaaaaaagaatactgaaacagaaattttagacttagaaagtcagcaattaagaggacgagctagtgctacttctgataatagggctaaaaaaataaaatctaaaaaggagcgcctattaaaaattgatatggtgaaaaatttttcatataatcctaatggaaataattttagatatgactatcttagtcatgctgaagtaattaaaatgggatcagaatttattgctaaaagtgatactatgcaaaatatactaattaataagtatcctattctcctaattgatgaaagtcaagatacaaaaaaagaattaatagatgcattactttctctttatgaaaggcataaatcagaaatagtaattggcatgtttggagatacaatgcaaaaagtgtatacagatggaaaggacgatttagctttatgtattccagatgattgggtaaagccagttaaagtaatgaatcatagaagttccaaaagaataattaaattggctaatgaaataaggaaaagtttcgatgataaaatgcaaagctctcgttcagatgctattgaaggaaatgcttacttatttattgctgacagtaaaagtgataaatctaagatagaaagtttagttgcagattccatgtatgaattaacaaatgatgataaatggttagaaccaacagaatgtaagactttaatactcgagcaccatatggcaggaagtagattggggttttacgaactattcaagacattgtattctgtgaattcactaaaaacaggtattcttgatggaacacttcctgagattcaactgtttatcaataaggttttgccactaatctcagcttataaaagaggcgaaaaatttcaagttgctaaaataattaagcaatattctccacttgttaataaaaaagcttttggtgaatcaactaaggagcctttattgtgtctaaataacgcttatcaatcagtaaataaattatgtgaattatgggatgacggaaagattcctacatgtttagaagttatagcgaatatagagagtagtggtttgtttgaaataccgaatcgattacaaggtatagctgatataaaaagtaatgaaaacatagatgagattacaaactctctaataacctccttttctagctcttttagccaaatagaagcatatgcagcttacgttaatgatgaaacagcatttgcaacacaccaaggagtaaaaggacttgaatttccccgtgtggtagtagttatggatgatgaagaagctcaaggctttctatttagctatgaaaaattatttggtgctaaggaaaaaacgaatacagatatgaaaaatgaaagagagggaaaggatactagtattgcaagaacaaaaagattattctatgttgcatgtacacgtgcaaaacaaagcttagcaattatagcatatacacatgattgtaatgcagttaaacagactgcaattgagaatagttggttcttagaaaaagaaattactattttgtaa

SEQ ID NO: 74914 - DNA, 2007 bp, Bacillus thermoamylovorans
atgactaaaattaaatccccatatatatcaagagtgaaaattaaaaatttcagaaacttcaaagatatagatgtaaatttaagtcataagcaagttattataggtgagaataatgtggggaaaacaaattttttaaaggctatccaaattattttagacccgaaattttcagatgaagatcgttttttgaatgaatcagatttttatgatggtttagtggaaccaatgaaaaatggtgaaataattgaaattatcattgagatacggggatatgaacacaataaaaccgttttatcaatgctatctgatgcaacaatatcagaaaatccgcctaccttacgtctaacctataaattctttccatcacaagatacaaatgagtatacatacactatttttcaaggggataggccagaagtacagtttacacattttcatagaaaatttttaaatattaaggttatcaatgcaatccgcgatgttgaaagtgaaatgaggaattcacgtaaatcacctattaaaaatttgttaagggattatgaatttgataaggatgaactcgaagacattggtgccaaattaaaagaacaaagtaatgagatattatcaattgacgaattaatcgaccttgaaaagaaaattaataatagatttataaatacaatgggtaatcaatctttttcaaaaatttctttagaaacgatagatgtagatcctaatagaattttaaatacattaaaattaatgattggtgaagaaaagcaaaggccaacaagtgatacaagtctaggaatcaataacatcttatatatttcattaattcttatatcattagaggataaaaccattcctactttattaaaaaaagaaaattatattgaactatcagaggaaagcgatagtgaaatactagaggaatgctatgtgaaaagttcaaaaggtaattattttttgaaagataacttagatgatggattaatgttgaagctatattcttttatggataattattccctttctaaagagggttttacaatactcgcaattgaagaaccagaagcccatttacatccatcttttcaaagaattatttataaggacgtaatgaaaaataatacatcagtattaatgacaacccattctccatacataacatctgttgccccattgaactctattgttcatttacggacaactcaagaaggaacgataattaatacaactgcagacttaaatttatcagataaagaaaaacaagatcttgaacgttatattgatgttaagcggggagaaatttactttggtaagggtgtaattctagtagaaggcatagcagaagaatacttgattccagcttttgcagaaatacttggaaaaccgttagatttaaaaggtattatttgttgcaacattaattctactaatttcgatccatatgttaaattcttagatatgctaggcatcccatatgtatgtattactgatggagattattatgcttgggtaaaagaaaaagaagaaccaaaaagaaaatatcatattgtggttgacgattcacacatttcaaatgggtatttaggattagaaagaataggagatttgcttgtaaaattgcaaaaaatcaataattctagtttacctaaagatttggatgaacaggaagaactttttgcaaagaacggattttttattggatattacacaatggaagtagatataatggatgcttgttccgaatctaatcagggaaaagatataatttgtaatattttcaatgaactaacaactggtggagaacgtcaaaaggaaaattttaaaagggaattaaactctggagattattggtcttgtctaagaaaaattgaaaactgtgaaaacgaagtaggaaaagggagatttgctcaaagactatcattgatgtgtataaaagatcatattcctaaatatattgaaaatgcaattgattatatatatagcaagatagaagaggtaggaaagtatgaatag

SEQ ID NO: 74915 - DNA, 1824 bp, Bacillus thermoamylovorans
atgaatagtacatatctagaaaagctagaacagattaagaaagataaagatcaatttgcagcttttaattccaattgtagtacagttgttaaggctgggccgggtagcggtaaaacgacggttttaactttaaaaatcatgaaactattaaatgataaaattaaatatccaagaggtcttgcttgcttaacttataatagggaagcggttaaggagtttacgaatagattatatgaattaggatatgtaaaaagaaacaatgtctttttaggaacagttcatgctttttgtattgcggaggtaatcagcccgtttgctcacctttatgattatgatattcctttgccattaaaaattgtatcagaaaaagaaaaaaataaactttttaaagatacggttatacaacttaattatgatcctaatcaaattaagataattgatatggacaaagaaagaaccttaggtatcgaagggattagttgtgtttcagttgaaccttatgatattggcttaaaagttgctaaagaatatgaaaatcgacttcacgcaatgggaatggttgactttattgatattgtaaaatatgccactttactcatccaaaaagaggaatatgtaagaaaatgcttagaagccaaatttccttggatattaattgatgaatatcaagatttaggtaagcctttacatgagatggttctttcattatttcataaaacaaatataaaaatatttgcagtgggcgacccagatcaatcgatttatggatttaatggtgcgattcctgactatttaaatgagctatactcaagtccaaatattgaagctatagaattaaaaacaaattatagaagtcatcaggatattattaatgcatcaataattggattaaaccagcaaaatcgcaactatgtttcaggtaaaaggtttgataaagatgcagagtttcattttataacttgtgaggaagaaatggatgaccagtataaggaagtggcatacagtattattcccagttgtcaacaaaaaggtattccattagaggaaatctgtgttctagttcatagtgaaaaacaaatccagtcaatgaggaaaattttggatgaagctaatataccatattatatttctaaattagaatttaaaagaagtgatatagtaatttggcttgagcaatgtgctttatgggttatatcaaattctaatgtatcattttctagtttgtttgattattggaataatctattacaaaaacataatcaaacaataaccgcggaaagaaatatattggaaagaaaaagattatattcaatattaaaagaaagtattaagcactttaaatctttgtataaatggttagaatttttaatcaaaaatttaaaacttcattcgattttatatgattctgatatatatcctgatgaagtagataatttaaatgcgttaattaaggttgcaaaagatggaagttttcgagattttgatattacaagatttgccaacttaggtaagccaataaaccaaataacattatcaactaggcatagttcaaaaggtctggaatttgaagtagtaatattattaggtatggaacaaggtaactttccttattataaaaatgaaaatgacccagaaaagttggctgaggagagaagggtattctttgtaagtatttcacgagcaaagcgggtatgttatttgcttcgttcaaaaaaatacactcgaaaaactaggtttggatataaaacatttaactacaaaccgtcaatgttttgggaagaattatatgaaagtaagaagaatttgggtactactgttaattaa

SEQ ID NO: 74916 - DNA, 2154 bp, Bacillus thermoamylovorans
atgtatttaaaaacactaagcttatataattttaggaaatttgcagagcgggaagattctagtcctggtttaacagtacattttaataaaaatctaaacttaatagttggtgagaatgattcaggcaaaacagctattattgatgcaataagatatttattgggaagtttaagtgatgattatgagaagattactatggaagacttttactgtataaataaagatgaattcgcaaaatcatttattatagaagggatttttaccgatttaaatgaaaaggaagcaggtatttttttagagtggctttcatttgatgcagataatgaatatcagttaagagttatattaaaagcggaaagaaaaacaaatgaaaacggcaaagagtatatagataaaaaaatattggctggcgaagtaaattgtgaactaagattaaatagccaagcacgagatttattaaaaacaacttatctaaaaccactaagagatgctaattcagaattgaagcctggatttagatcaaggttagtaaatattttgaaagctcatccaatatttcaaagtggtgaatcaaatgaattagtgcaagttatgaaagaagcgaatacaaaaatagaaaaatttttccaaaaagaatatactaagggtcactcattgataaaagatatagaaaatgttttgagtgatttttatgacaatactgatttaaaaaagtctaaagcaaagtttaacgtttcaaagaacgatctaacttcgattttgagaaggttaagcttaaatacagaagagataaatttagggttaggaaatcaaaatttgctttttatagcaaccgaaatgttattattaaataattttttgaatgaatccgaatctataggtcctaatataactcttatagaggaaatagaagcgcatttacatacacaagctcagataagattaattaagtttttagaatctgaacttgagaaaaataactattcaagtcaatttattttaacaacacatagctcgaatttagtttcatctattaatccttgtaatataattatgattcataatgatttttgttatccaatgaataaggactatacattattaaacgagaatgactataaatttttagaacgatttttagatgctactaaatgtaatttgttttttgcaaagggaatcatccttgtcgaaggagaatcagaaatgtttttaattcctgcattagcagaattaattgggttacctttgcataagagtggtgtttcagtaataaatgttcatggaacttcatttgaacgttatctaaaattattttccaggtctgagcattggattgaagaattaaattacccaaaattgaatattcctatttctataattactgacattgatataaaaccgtatatttattatgaaaaagaaggttttaagtcaatatatagcattcaaaataatacacatttacaaggtatattaaagataataaataaaaaagaggaagatttaaatactgagtttattggaaaggaatattcaacattaaagaaacttgctaaggattttaaatttgaagttaataatgagaatgaaaacgagttagttcatgctcttaaactagacataagtgaaaaatatattgaagaatctaaggataaaaagctacaagatattgaagagaaatatagaagttataactgtaattttaaaatatttacagcaccagaatggactttagaatacagtttatcaaaaagttgccttagagaaatgttatataaagttattcatacatttagatataaaaatgcttttgaaggtaaacgcttaaaacaatttgaagaattcaaacagatcataaaagaagacaatgatttttcagatgaaattgcatacgagatatttaaacctattgataaaaaattagtatccaaagctgaagtcgctcaagaacttagtgtatacttaaaagatttatttgaacgaaaaaaagataataaagaagaattagaaaaaatacaaaataaaataatgcaggatgattacttgaaatatcttattgaagcaatacaacatgtttcaacagtaaatgttgtggaaaaatctgaagaagaatttaaagaagaatttgaagaaaaagtaggggtattccaatga

SEQ ID NO: 74917 - DNA, 1806 bp, Bacillus thermoamylovorans
atgatttctacagaagttctttttttaaaagaaatagaaacaaaattattacctaaaggagctacattttcagaacagcaaaagtcagtaatatttcacaataatactgcaaatatagtagcgggtcctggatctggaaaaactacagttttaatagctaaatgtgctatgttattaaaagaaaatatcggtaattccaagggaatatgtttaattacacatacgaatgtagctgtagatgagataaagagtggattaagtaaaatcggatttaacaatatcgaatatcccaattttttaggtacaatacaagaattttttaattatttctttggaaggaaagcttttcatattatttttggagataaaaacattagaataatggatgatgaagaatatagagaaagatttgatcatttttttgatagattaaaaccaaattggtataccaataataatccaaatgtaaaaagtaaaaaccctcaattaattattaatcaagacttaacttatgatgttattagtgatgccaatagtacgtatagagaagcttttaatgatagtataaaacatttattaaaatttgggattgttacaaataaacaatgcttagagttgtcagcttggtatattaaaaaacatttatcaaagatcagggaagcgctttctaacagatttgaatatgtattattagacgaggctcaagacacaaataaatttcaatatgaactattaaatagtttatttttagataatataaaatttcaacgttttggagatccttatcaagcactatatagtatttttgatacaaaagaagatgcttggattccatctgaagaagctagttatataaataaaattgaaattgctgaaacatctaggtttaacgaaaatattgctaacttagttagaaatgtttgtatagaaaaatatgatagttttaggtctgttagttctgtaaattcatttcaaccctattttattacatatgatgatggactggagttaaagttaaaatacaaagaattaatatccacgttggaagaacaatcttcagaatacaaaagttctaataaaaaggacgctatactttcagcaaaacatgatgatttaatgtctttatttgaagagtatatagtatctaattcgaaagtaaaaaaatcagagagtggagttaaacaaatttattctttaattttacgcataatttctaaagaaatagatttaaatttgcaacagacggaagaaaaattaaattctttgttagagaataaaaagataatagctaagcttattaaggatttgattacaaaagataatattgaaagtacaatttcaagtattattcttgagatagaaaaaattaaaaatgatattattgaaccttctaaaaaagaaaaaattaaagagcaattaaatagtttcaagaatgaaatggaatcttcaaggaaaaatgctatagtagaacaggaaaaagaagagttttatattggaacagtacattcagttaaaggtgaaacccatcggtcaacactactagtattaaatacagtattttctgattggcatggaacatatagctatgaaatattagagttattaaataattatttaataggtcattatatagatttagaaaacatctcgaatcttcaattaaaaagagaaactaaaaatgctttaaagttggcatatgtagcatttagtagacctactcatttagttgcgatagggattcacaaggataagctaacagaaaaattgaaagaagaacttattgaatttggttggaaagaatggtaa

SEQ ID NO: 74918 - DNA, 1770 bp, Staphylococcus argenteus
atggaaattgaatggataaaaataaatggattcagaaattttgataatgacaaaataaatttatctaaaaacacattgattataggagcgaatgatgttggtaaaactaatttattgtatgcattaagattaatatttgatcgtagtttaagtgatagagagcttgatttatctaataatgattataatgtatacacaaaatcagaaacaatagaaattactgtaaagttaactaatgtttatgaagattgtttaatatcaacatttaaagaagatattaaggatggtagtttatttattcagtataaaaattcaaaacaaggagaatattctattcttaccggttcatcggaaaaattactagtacctaaaaattcaagattttatctaaaacgtttgaatatggagtatgtacatacaaaccgtaatttaactgcgtttattaagaaagaaaaaaatcagatattagaatatgcaaaatcacaattaaatgacgaaaaaaattatcaagataaaaatgtaatagaaggaattgaaaataaattaaatgatataaatatagaagtagacaagttaaattatatacaagagtcattgataaaagtaaatgaagagttagagtctcttgctatacataatgaaggccaaaaactaacttttaaaaatgtaaattcaaatatagatagaatgttaaataatattgagttgacatacaatactgacgaaggtgcattaacaattggtggagatggtagaaataatcaaatctttttagccacttggatttctaaacaaaagaatataaaatcattagaaagagtaactttttatgctatagaggagccagaagcacatttacatccacatcaacagcgtaagttgtcaaattatttgttagaaaattttagtgaacaaatttttatcactacacattcacctcacatagcaaccgattttaaacctaataagattgttaagttatatagacaaaataaaaaaaccaaaatagcaaaaggtggttgtagcgaagatttggcattgaattttgatgattttggctatagattgaatgtaattacatcagatttattttttgtaaatgcagtatttttagtagaaggaccgtcagaaaaattattttataatgcattatctaaatcattaaatattgatttagatagattaaatgtatcgattataagcgttgatggagttggttttaaaccatatttaaaaatctgtttagcattagatattccctttgtattaagaacagacaacgatatttttactaaaacaaagaaagttaatgacaaaaatgttgaattttcttatcaagcaggaatttctcgcgttataggaatctacgaagacatattaacaagtgaaaataaggatgaattgttaacatattgggataaatataaacatgaaactgagtgggaaaaatctaaaggaacaccccaagttgctcatgaacatgtaaaatatatcattgaaactgtcgaacttgataacatatactttgctgaaaaagatctcgaaaatgatattgttaacagtgctttgtttaactctcttaaagaattttatcaagcagaagataagaatgatattgtcaaaaaaatgcaaactgcaaaagcgaacaatatgtttaattatttaaaaaataatatcgataaattaagttatttggaaagtgatcctcttgctaaaccactataccaaataaaagatttagctgaaaaggtcgcttcattttatgagtag

SEQ ID NO: 74919 - DNA, 1617 bp, Staphylococcus argenteus
atgagtagaaatcttaacctaacaaaagaacaaaatgaagttataaacgaagaaggcaatttagtggttacagctaatccaggaagtggcaagaccctaactattgtagaaaagattttgaacatatcacaaactttatacagctatcaaggtgtaattgcaatttcatttacaagacaatctagtaaagaattagaggtgcgctataataaaaagaaaacaaatgataataatcatttttttgggaccattgataaattttatatatctgaaattattattccgttttcaaaacaaatttgtgggattagaaagtcaattgaagtaaaaaactcattggaaaaccacccccaatacgaaagtttattaaagctaaaagaaaatagtaataatcaagagattaatgttttacttgaaaagtccttgaaagaaggtttaatatttttagagatttgcggagaaacagcattatatatactgaaaaaagtgccgcaatgtgcatactatcttaaatcaagatatactcatatatttattgatgagtatcaagattgtggtgaaatccaacataaaatatttttagaattaataaatcatggtattaaaggtatagcagttggagatttaaaccaagcaatatttgcatttagttataggtttccaaaatatcttcactcattaatcgggaatcaggattttaggcatgtactactaactcggaatttcagatgtcataaatcaatttcagattattctttacaattgattgaaaagagaaaagtgacgaatactgatgtgaaaagagtatttaaagttaatgttataggaaatgataaaaccgttatagatgctatagagaaaaattttgtaaatttgaagaaaaaatacaaattaaataataatgactttgcaatactttgccattctaggtcatcagccaaaagagcttcaaaatttttgaacataaaaaacaaactatttgattatattgattttgaaaaagaaacaggcattttagcaaacttttataaggaccttttaaattcctactttttatataaaataaataaaactacagtattagactttgtaatcaaatatcttaatgaagaagtgaattattttaattttcgaaaaggtctagaaactgttaatgaaatctttaatttagaagtaacaaattttgtaagtaacattgagaaattttatgatttagcacaactagtttatcctgacgattttgatgaagttatttttaataagttggtagaattattaaaaaacagaaaagatttaaacagttttaaacctgcaacagaagatgaaataaatattatgacagtacataagtctaaaggactcgaatttaaatgcgtttttctattagacttatataaatatgtatttccacgtgaaaatatagatgaggaaagtttaaatcaatacttacatttacattatgtaggaattacaagagcaatagaagcatgttacataatagtagcaactgaaagatacagacctagtaaagaagattattgtaatgcaattgaatcgccttttttatacagaaataatgtacaagatttaagggaagatattatatggaaaatttga

SEQ ID NO: 74920 - DNA, 2097 bp, Flavobacterium psychrophilum FPG101; identical to SEQ ID NO: 71912

SEQ ID NO: 74921 - DNA, 1902 bp, Flavobacterium psychrophilum FPG101; identical to SEQ ID NO: 71913

SEQ ID NO: 74922 - DNA, 1791 bp, Pectobacterium wasabiae; identical to SEQ ID NO: 72834

SEQ ID NO: 74923 - DNA, 1821 bp, Pectobacterium wasabiae; identical to SEQ ID NO: 72835

SEQ ID NO: 74924 - DNA, 1785 bp, Proteus vulgaris
atgtatttatcaaagctcggaatccgcaattttagaaactttgaggcagctgacatttccctagcaggtagtgttgtattattaggggaaaatcgtgtcggtaaaagtaatctactttttgcaattcgactggttattgatcccactctgcctgattcagccaggttacttaaactatctgatttctgggatggctgtgatcttgaatctagccctcaaattgaggtgcaccttgaattctccgattttgacagtgacccttccctctcagctctgttgaccgattttcgtattgcagaagatccctccgtagcaaggttaagctacattttccgtaaaaaggaagaagttgatggggctccacgttcaggtgaagactgtgagtttattgtttttggcggaggtcaggaatcgagagccattccaggtcgcgtcaggcgccggatttccattgatatgttggatgcgctacgtgatgcagaagcacagcttgcttcctggagaaattccccgctgcgtcccttgttagaagatgcattttcttcactaagtcgagccgatttagatcgcgtagcaattgagcttcagtcagcaacagaaaccatggaaaaattcccttcaattagggaacttgaaaaatctctgcgtggtggcattcttgatctggctgggactactcacgatttagatgcccgcctccgttttgcaccgactgacccgctcagattgatgcgttctatctctatgttcattgatgatggaaagagaggcatcattgaagcaagcttaggttctgcgaacgttgctctgatatcactcaagttagcagagtttgcatggcgacgtgaaaagaatgaacgtaacttctccctactttgtattgaagaacccgaagcacatctgcacccccaactgcaacgcgctgtttttgacaaactcttcaataatgcagacaaagatcagtcattgattgtaacgagccattctcccacactagcgaccattgctcctcttcgttccgtagttcgcatttatagggatcctgacgggaaatcgagagttttttccctagccaaactgccaataaccagcgaagaactcgacgacattgagcgatatctaacggcaacaagatcagaactgctttttgctaacggagtgatatttgttgaaggcgatgctgaggaggttttacttccaggtttcgcacaggccatcgggatcaatctcgaccagcttgggattacggtatgtaacgtagctggagttaattttaaaccatacgtgaaactggcagccagccttggactacctttttccgtcataactgactgggatccactggatggtacaaaacaaccgatgggtaaaactcgttcaattgatatttggcaggcatatagtgatgtatcaaaaaaactgaaaaaactaacccccgaaaatattatttggttcaataataattcttatgaaacctgtaaggctacatttgaaaaaattggcatttttttaaacaatcagacatttgaagtcgctgtagctaatacgacaggtctcaaagaagcactacttgatattctcgatgaacaggaatttggtatgttacgttcatcaaggattgcgtcatggcgtaacggtatagttccagacccgacacaacttcttgcgatgatatctgacataggcaaagggcggttagcttccaaattgaagaaaaaagcgcctgaacttgcacctcccgaatatattgcttcagctattagatatgtggtgtcaaatgtctaa

SEQ ID NO: 74925 - DNA, 1782 bp, Proteus vulgaris
atgtctaaccagcgctcgctttcagaggctttgaatgagctattgccaaacagagagcagtacgatgcggccacatacaccagccactgtgtagttattgcaggacctggtagcgggaagaccaaaacacttacaacagctatggctcgcaccctaattgatgagattactgatccccgaggagtagcctgtattacttacaacaatgaatgcgcatccgaactcgaaggacgtctggcctgctttaatgtcactgttgatgatcggaactttattggcaccgtacatagctttgcattaaatcaggttttaatcccctactcacgatgtatacccggtttactatcaaatgattttcgtgtggcgaccagagatgaaagtcgtgcggctgttgaagtagcttaccaggctagatttggagctgtcggcgatcctcatgcacgatggaaatttgcagaagaaaaacgacgccgagatgtgaaccgacttctaccagcttggcggaataacaatccggagctggcagattttattgaaggttatgaggcagaacttcgtcgcttggggctcattgactttgatgatatgccactcatcgcctttcgtattattaacgagcatgaatgggtacgtgccgctatccggtcacgctatcctgttttgtttgtagatgaatatcaggatctagggtatgctcttcatgaactagttctactgctgtgctttaacggtggaatacgattatttgcggtcggtgatgcagatcagtccatttacggatttaatggtgcaaatccaagactactggacagtctagtttcacgggcagatgtgagactattccgtcttcgtttcaactatcgctctggcgcaaaaattataagggcatcattaggggcgctgggagaggaccgcgattatgttggtcctgatggcaccccagagggagagttaggattccatggaataaaaggcaattatgacgcacaagcgcattttatcgcgcatgatctaatttcctcgttgcttgagagaggatttcagcctgaacgtatcggggttctttaccgggctgcatggcttggtgataaagttgctgatgagttcaaagccagaaatattgccataatacgcgctgatagtaacgccctcataaaacgtaactctcgtcttgcctgtttcatagaaggctgcagtcagtgggtgacgggggggtggaaagaagcctctcctccatttaatctgttactaagtcaggcgctctttcttgtttatggtcgccgcgtaaaccgtgctgaagaacagttactgaccatacaactcatcacatttttgcgaaacggaatagataaagctgaaagtgcccacgagtggctgaaacgtttaaatgatgagatcattaccatttggatgaatatctcacagaacactctacaggaatgggatgtcatcgctgagctactaaaacgaaccgatcccgccaagggactagatgtgactctagatgtattctctgggaaagtaaaaggaactggctgtatcacccttagcactcttcatagtgcaaaaggccgagaatttgatgtagccataatgtttggggtaaataaatatgatttcccgagtagtagagatctagcttcaaataatgcccttcgcgaggctcggcgcctcttttatgttggggtcacccgtcctcgaaaagaattacacatggtttatgaaacgggtaaacattcaccttggattgccgaactatattatcgcagccagaagatatag

SEQ ID NO: 74926 - DNA, 1869 bp, Proteus vulgaris
atgtatcttgcagagctcacgataaagaattttcgcaaattgcgtgaagccacgctgaaatttcaacccggtttaaatgttttggtaggcccaaacaacgtaggaaaaagtgcagtaattgatgcacttcggacgcttcttgcaggccatgatgagacctatcctcggctcgatggttctgataggcaccgtccgcatgagggtgacccaactggtgatatcagtttccattttgttttccgagatcttagctttgaagatgaagcggactttatagctgccctcaagccaaatgggggcaagaacatggaagcacatatccatgtcctgtataccgatatggataaaactggacgattcaaagtccggcgctggtgtggtgatcaccctgaagtctcgcttacttcagatatgatggaaaaccttcggggggtttatctccagcctctccgcgatgcctcgcagggccttcgtcctaaccgtaatagccagctgtctcgattacttcatttgctcactgatgatacaggtcgtgacacgataaatacggctttaaagcaacttgacgaaacacttaaacaagacaaatccattcagagtacccacaaagcgatatcaactagacatgattctatgatggggactcagttagcgcaggaacttgccgtcgggctcagcgtgactgattttcagcgtctctcttctcgactgactctgacggctgaagctatggagattgaaaaaaatggattgggcttcaataatctgatcttcatggcggtagtgctcagtgaattggctaaaaatactgattctgctttcaggagtttgattattgaggaacctgaagcgcatttacatccccaactgcagcgagtattactgcagtaccttgcagggattccaacgggtgaaggcgaaaagcctgtacaactatttgtcaccagccattccccaaattttgccagtaattcaaagctggactctcttgtgtgtttgatcgaaaacgaggctggcgttgagaccttttttcctcgtgatatcaaatttgaaaagggaaaacgtgaaaaattagagcggtatctggatgtaactagggctgaactattttttgcacgccgagtgatttttgttgagggcgcagcagaactcatgttgattgatgcgcttgctaagaagatgaactttgatctcagggaatatggggttagtctgatcagcgttgagggacttaattttgattcctttcttccactttttggagagcaggggttgcggatccccgtcgctgtagtaaccgatgcagatccatttgaagaaattgaagctgtggcaggaggtgaacaggctaaagaggaaattgacgacttactttctgaagctgcttatcaggaagaaatagacgctcctgacgatgaagagcctgctggcaatactgagaaaaagaaaaaaaccaaaagaaaagaggtgtacccagcgttgggagatcaggtgcgattatcggcaaatactatcaaaatgcagaatttggaagatgatttcgtgaaggtttttcatggattgaagacccttgaatatgatctggcactcattgaggcgaaccgcgacttaatgcttattgcattagccgatccgcatcccaaaatatctaaagctctgcgtaatatagttgatgcacagtcagataataccgcaaaaaccaaagcgttgttctgcggaatgtttgagcgaaaaggtaacggcaatattcagaaaggtcgattcgcccaagcattagctgagcaaatttcgaaagaaaataattttgaagtccctgagtacctcaaaaaagctattcatcatgtctgtcagggagtggtcaagccttga

SEQ ID NO: 74927 - DNA, 1728 bp, Proteus vulgaris
ttgaaattatcgaaggaacagatagaaattataaaagcaccgctagggccaattgctgtcactgcgtgcgcaggaagcgggaagacggccacagccattcggcgcctgatcgccattcggcagaaaatgcaaaacagtcgtggccgtgttgtgttgttgtctttctccaatgttgctgtcaatacattcaatgcaggatatgcggaactcgctgctagcctaccggatgatgccaatcgtcgaagggtggaagtcgatacacttgacggtttttttaccaaacatattttacgtccccatgcttacagatctatgaacgcacctcaggctgcatacttggtgtcaggttctgagccttttcttaccaggtttaaatattggaatggaggtcacccccctttgccattaaaagacataaaaataatcatactggatgggaactttgtcttttattccaatacaagaaattgccttgaacttcttgataaagttaaggttttaaagattattcatgatcttgggcgcttaggtgcatacactcatgagattggcaggtactgggtatataggaccttatattctcaacctgcagtattgagagcgttggcagcccgctacccgcaaatacttgtcgatgagtctcaggatttgggaacactacataaggaaatcttgaagctactaattactgctggggttcaggttacacttataggggatgttaatcaggggatttatggcttcgctggtgctgacggtgagttcctgaagagctacgaggatcgcgcagaggtgaccgggtacaagcttactcgcaattatcgttccctgccttcaatcataaatattgccaatattctctgtgggcgtcatgatgaagcagaccggctagaggagtatggcggagcatatttcattggatataaggattcagaactttccaaattaactgaagcattcaaagctcatattgatgagttaggcatgcaacatcacaatgcggtaatcctctgcaggagtacagacagagccgccgtaattgcgggtaaaacccctccgccgggacaaggtatagtcaagatgttagcagaggcatcattgttaagggatcagcatagtgactatcatggatgctttaaattggtttgccaagctatcattaacttactgaaagatgtacctcatggtctcagttccagacttcagggattatcacatgatgacgagatgaaaggacttaagcggctactatggcgtttcagtcgcagcgctgatgttggacttccttcgtctgccttaatcgcgaaaacagattggcactccaagctattaacgaacgtcagagcgcttctcgaaaagattgaaaaacactacggatataaagttactggcaaggtaagcactaagctcacaaaaaaagcattaccagaccagccattagtaagtgtggcttcggctcaaggacatggacttagagttgagacggttcaccaggttaagggggagtctatcgacgcggttatgtatgtggctaagaaagccaatattaaagccctcctttcaggtacaaatgatgaagaaggacgtatcgggtatgttgcaatcactagggcaaaaaacttgttttggcttgctgttccacaatcctgtcttaaagaattaagaaaagatctcactaaagctggttttcaggagtggatcaaacctgccgtcgttaatccaacctga

SEQ ID NO: 74928 - DNA, 906 bp, Nonlabens ulvanivorans
atgtatataaacaacttaaaactatggaatttcagaaaatttggtagctctgataattttgatataaataaacctaatttaaatctcgatttttcgaaagggttaaatgttcttataggtcaaaatgattctggtaaaacagcgataatagattctataaaacttgttcttaaaactcatagctatgattggataaaagtaaaacacgaagattttcatttggcatccaacagatttagaattgaaataagaattgaagatttaactaatcaagaagcaaaaaactttactgagtggattggatggacaggtgaaggagaaaatgccaaaccttatttgcgcttgatttatgacgtgaataggaatttagaagataattatattattccgtcagatatacgagctggagttgatgaaactggttatcaattaacagctgaagcaagagaatatttaaaagctacttatttaaaacctttaagagatgcaaagtcagaactgataccgagaaaaaactcaagattagctcaaattttgcaaggtcacgaagcattcaaaggtcaagaaaacacgcatcttttagttaatctttttaaagagtttaatatctcgatagaaaattattttgaaggaaaagataataatgaccaagatttaacaggaactaatttaaaaggaaaggaattaaaagatgaaattgacaaatacataaagtcattttactctgattcaaaagagtcgaatttcagtgttaataatggctcattgaaaagtattcttgaaaaattagaactcacaataaaagacgagataaatttagggttaggaatcttaaccgattgtcaatggcatcagagttattacacttgcataagaaaaattggaatggtattagacttggtttaa

SEQ ID NO: 74929 - DNA, 1065 bp, Nonlabens ulvanivorans
atgcttgcaatgattaatataaccaatagcgacatagaatatgctgaaaagatattattacctgaaaaccatcactttgatgatgaaaggctagaatttattagagatttcacttcattagatttacaggcagttcctggcagtggaaaaacaactgctttacttgccaaacttattattttagaaaagtatttacctctaaaagataatcgaggtattctcgtaatttcccataccaacacagctgttgatgaaattaaagaacgtattggaaattattgccctaaactattttcttaccctaattttataggtacaattcaaagttttgtagatattcatctagctattccgtgttttacaaacttatataagtcaaaaccttatagaattgataatgaaatttacaatgaaagaattaaaaaaaaattatcaactatctggcactttagatatggtttaacagcacaagatgcaagaaaaattagttacctatcaaacttgaatgaaggattattttataattttaggagtggctttgataatgatggaaatattattttattaaataaaataaacggagaaaaattagaaattaaaaaacctagaggaagaactagaatagaaaattatacagattacactcaagtcgaaaaaacattaatatataattggttacttgaattaaaaaaagacctattacaaaatgatggtgtacttcatttcgatgatgcatactttttaggcaacttatatttaaaacaatttagtctttcaaaaaaattattacaatttagatttgaatacatttttgttgatgaaatgcaggatatggatattcatcaatacaatcttctagaattactattttataataataacgtttcacattctattattcaaaggattggagatattaatcaagctatttttaatggcttttctgattctgaaaacgtatgggagtttagagagaaccttaaatatttacagggaagtcataggttaaatccaaaaattgcaagtattgtagaaaaattagctctaacccccaaacttaattga

SEQ ID NO: 74930 - DNA, 2016 bp, Mollicutes bacterium HR1
atgaaactacaaaaaatgaaagtgtgcaactttaggtgttttggtgaagagattactgttcaaatgagtgatttgacctgtttggtaggagacaatagttctggtaaaacagcattgcttgatgcaataaaaaaaatacttggtaacaatcctaaagatagagggttagtgcgaagtgattttcatttggggaagagcgaaaaacctgaagatattcaatcaaaaaaaatgtcgatagaattagtgtttgaatttccagaagttactaggagttcggaagatatgggtgcaattccaatatttagacgacattttgttgtatcagacccaaaaagttatccatatattagaattcgtttagaagcagaatgggaaagaagttctaaccctgaaggttcaattgagtcaagagtagtgtacgttgtatgtcctgaaggtgagaaatatacggaggacaagttaataaatgcaaaaagaaaagaacttgatgaaatccgattaatttatattccagctaatcgtaatgttgaaaaagagattaaattgaattctgactctatttttatgaggttgtttaaccttgtaaaatggaatgatgataagatagatgaagttgagaaagcctctacatctttgaacagtatagtaactagcgaggaccaaataaaagtaattaatgactcaataatgcataattggggtaattttaattcggattatagatttaacaagtcgcaaatattattttcaaatagtgagattacagagatacttaagaaagtgagtattgggtttacaccaagtgtaactgaaagagattttcttgtagaagagatgggggatgggtctaaatcattactctatttttcattgatatctgcacttcttgatgctgaaagtgaactttctaaattgaagtttaatgatgaaataaaaataccttcgcataccatatttatagctgaagaacccgaaaacaatatagctccacatttactaggacagttaattcagtctataatggatgtctctactaaacataagtgccaggcaattatttcttcacattctgttagtattattagtaggatcaatccaatagatattagattattatttaataaaaaatctacttattctagtgatgcttactctttggagttgagctcagatgatgttgagaattttaagtacattaagaatacaataatgaaaacacctagtatttacttttccaaattagtcatattggtagaaggtgaatctgagaagctatttataccaagacttctcaaagactctgatgttaatatagatgaattttatatatcggtagtttccattgattcaagattcgtaactaactattggaagttcctgagtcagtacaaaattccttacttaacactgctggatttagactctgaacgtgtgcatggaggatataagactatttcatatttaattaaagaattatcaaaattcaggaaggattttgaggattttgaatttgaggatggaacttgtttaattaaagataatattatcgataaaatgaaagattggggtgaaaataaggatgaagattatctatcatggatagaatatcttgaaaagtataatgtgttcttgagttacccacttgatttagattttatgttacttagggcttatgaaaattcatacaagaatttattggaaaacaatgaaggaccaagaattaaaaaaataggtaagatatctgaaattgagaagatggaagaaaaaccagatgagtacgtaaatagagttgagcaagacttggaagcggtacttaaaggagatggaggagatggttctagtttttcaaatagtgaaaaaaaaattatgatatggtacaaatatttctttttaggcaaaggtaaaccaattagtcattatcgtgcattaagtgtgatagataagaaaactttgatagatcatctacctgaaatgctaaataggttagtagactcaatcaaagaatcgctggtataa

SEQ ID NO: 74931 - DNA, 1815 bp, Mollicutes bacterium HR1
atgaaacgaaaagaagactggtccgctgttgaaggcataatattagatagcgtggcatacgatattataaaatctgaaaagagtttactagttactgccggacctggtgccgggaagaccgaaattttagcacaaaagtctagttttatttttgaaactacgagaaaagaaacgaggattttggcgatttcatttaaaagagatgctgcagttaatttaaaagatagagtacttttacgctgtgggttgaagtacgaagactcatttgattcatatacctacgatgcttttgcaaaacaaattctcgaccaatactatagaatactaccggatgataaccgcccagatattaactatatcatcgaagatggagttggagacattattaaacagttttcaatcgattcatataaccgttcagattggataacactaaaaaatattagaaagaaacttgactctacaagaatcagtatgctaaatcaaccgggcctaaaactttgggatgagttgttaacttcaaaaccttcacgattgacattttctatgataacaatcttagtattaagaatgattagtagctcccctattataagaaacattatttcctcatcatatgactatgttttcctagatgaatttcaagatacaacaacccttcagtatgagttagttaggaatatctttaaagactcagatataacattgattgctgtaggcgatgaaaaacaaagaattatgctctgggcaggagcagataatcaagcatttactaaattcacctcagattttcaggctgaaagaaaagaacttatgttcaatttccgatcagctcctaagttgatcgaatttcaattagaggtttacaatatattgaatgttaataagataagtatagggcataatcctctatataaagaggatgaaggttatatttcactatatgagtttgatgataataacttcgagtctatttgtatatctaatgaaattattgagaaaattaaatcaggtactaatccaaaggatatctgcatattaacaaagcaactaccaatagaatatactggaaacataataaaattattaggtgaggaatgtatttatgctcgtattgaaaatgagtatcaagatttgcttaaagagcctatagtaaagttgataatttctctcttagatttagttgagggcaatactaatccaaattcatggctcataatatcaaattactttgacaaaatacatatttcaggtttcaaaattgaaaatatgattgagttagataaaaacataagaaatataagttctagtaaaatgaattttaactcaaaagaagacttagtagagttaattgacactttagttgcattacttgatgttaataaaattaaaatggtatttactgagtattcacaagggaattatctaatggatatcattaaaaagtttagtgaactctactgtagagaatatataaggctaaacacatcaaaaattcatcttataaatgaagcttttttaggagaacattctattcctataatgactattcataagagtaaaggattggaatttacacatgtattttttctaggtcttgaggattcagctttttggaattacagtaataatcctatggaagacaaaagcactttttttgttgcattatctagggcaaaaaaagaaatttcttttacatactgttcgaaaagattaaacttcaaaccacctttgaagagattcaactgtatcaatcaatcacatcgaaacatcagtgaaatatatgatttggttttacaacataaaatgaattag

SEQ ID NO: 74932 - DNA, 1749 bp, Burkholderia cenocepacia
gtgtatttggcgcagttgacgatttcgaactttcgaaagctccagaaagcggagttgcgattccaagcgggcttaaatgtcctggtgggcgctaacaatgtgggcaagactgctgtcatcgatgccttgcgggcgttacttgccgggcatgacgagccgtatcctcggctcgatatcaacgatgtgcatcgacctcatggcggaacaccggcaggggacatcacgttccagtacatatttcgcggccttgatgaagacgacgaggccgacttccttccggctttgaggacggatgccgttggcaacgccgaagcacacatcaccatccgctacgcggacgctgacaagataggtcgcctgcgcgccaaacgctggtgcggcgatcatgaagacgtgggattgacggcggacatgatggagaacctccgcggggtgtacttgcccccactccgcgatgcgtcacaaagcctgaagcccggtcgtaccagccaactttcgcggctctttcagctgctgtccgatgatatcggacggaatgagatcaatgaagcattgaagaagctcgacgaagagctgaaaaaacatcagccgatcaccaatacccataccgcaatcaagagtcggcatgacactatgctcggcccccagctggcacaactgttggaactggggttaagtgggagcgactttcagcgactggcgtctcgtctttcactgatggtggacgccttcgagatcgaacagaacggactcggcttcaataacctgattttcatggcggtggttctcagcgagttggccaagaatccggagtcgagctatcgcggattgatcgttgaggaaccggaagcgcatctgcatcctcagcttcaggctgtccttctgggctatctggagaccatcaaggccacggatggggagaagccggtccagctatttgtgaccagccactcccccaacttcgccagcattgcagatatcaacagtctggcctgcctcgtggacacgggcggcgcagtcgagacgttctttccgcgcgacatcagctttgggaagggcaagcgggagaaactggagcgttacctcgacgtgacgcgcgctgagatatttttcgcccgccgggtcatcttcgtcgaaggtgctgccgaattgatgctggtcagcgtgttagccgaaaaggccggctataagctacgcgaacatggcgtgagcctcatcagcgtcgaaggactgaacttcgactcattcctccccttgtttggcgagaaagccttgaagatcccgatttccgtgattacggacgcagatcccgtggacacgccatccgacggaagcgaaccgaaggcgctgtatccggctgccggcgactccgtcaaagtttccgacaacaccgccaagatgaaggaaagcgaagacgccctcgtcaggatttttcacggcgtcaagacgcttgagtatgacctagcactgcacgaagacaatcggtctgcgatgctcaaggcactcaaggaactgcatccgaaaatcggcgaagcggttgaaacctcggtcaatgcagccaccgcagacgccgagaaggcacggcttctgttcagcggcatgttcgaacgaacgcagaacaacgtccagaaaggacgatttgggcaagctctcgcccagattctggccgacggtgcgccgtgcaccgtgccggagtacctacgccaggccattgagcacgcctgccagaaggcactggcacgctcatga

SEQ ID NO: 74933 - DNA, 1788 bp, Burkholderia cenocepacia
atgacggaactttctcctgaacagtcggcgatcatcgaggcgccgctcgatcccatggccgtcatcgcatgcgcaggaagcggaaaaacgctgacggcggttcgacggctcgcagaaatacgccgacgactcagtgaccatcgaggatgggtcgcgctgctttccttctccaacgtggccgtagatacctttcgacagagctatcagcccctcgtccgggaaatgtcagtcggcgcaggcggccaccgcgttgacatcgacacactggacggattcatcacgcgtcacgtgcttcatccccacgcgcatcgaacgatgcaagcgacccaggccgcttttctcgtgacgggaggcgaatcgttcctgagcgggtttactttcaggccgggtagctatcccgtcagcatcacaagtatgcaggtcggagtgcgtgacgccggcatctatttctattatgcgaaccatgatcaggttgtggagttgaatcaacacgacgcatccaagctcgtccatcggctgggaaagaccggcgcctatacgcataaccttggccgctactggtgcttccagacgctcaaggaacagccccttgtcctgcgggccctggctcgtcggtatccgcacattctcatcgacgaagcgcaggacatcggttcccctcaccaggctatcctcgaacaactgatcggcgccggcgtgcgggtctcgttgatcggagatcctaaccagggcatctacgaatttgccggcgcaaacggacagtttctggctcggtatagtaatcgtactgcgatcacagatctgggcctgactcgaaactaccgatctgtcccgccaatcgtcgacctatccaacaagctgtcggctcgcgatgatgtggccgaccgcgaggcgcccgagaccgcccacggcgcatacttcattccgtacaagacgactgaccgcgacaaagttgtaaccgccttccaggccgcagtactcgcagcggaactgaaggtcgagcgatccgccgtgctatgccgtggccgcgaccttgctgacagattagcaggcagcaattcgcccgccggccagggaacggtgaagggttttgctcaagctgccgttgcgcgcgacaaaaagcaggactacatggccgccttcaaggcagtagcttcgtgtatcgtcggccttctcgctgagccaccgaaagggttggtggccgcgatcactcaacccacccgctacccgggaggccggagcctgcgacgtctcgtttggcgttttactcgcaatcccgatacgggcctgccttccgcgactctgctggctgacaccgaatggcatccgcaattgctcactagggtaaaggctttgctcgctaccctagaaaacgagcatggtttgaaaactaccgacaacatcggcatgaagctggcgaagaaaggcctgctcaatgccccacttgtagctaccgcggaccttgccgcacccaacgctcctcgaatccgtattgatacggttcaccaggcgaagggcgagagtctggacgccgtactctacatggcgaccaaagagcatgttgccgcgttgttagccggcgtcgactcggaggtcggacgcattgggtatgtcgctgtcactcgagccagaaacctcctctggctgggcgttccagccaatgcgctgactgaattgcgtccgaagctgatcgcgttgggttttcacgagataggcatgccagtggctcccgtcgcccctaatctccctacggagactcccctggtagcaatgggagaacaggaatga

SEQ ID NO: 74934 - DNA, 1785 bp, Burkholderia cepacia; identical to SEQ ID NO: 71894

SEQ ID NO: 74935 - DNA, 1815 bp, Burkholderia cepacia; identical to SEQ ID NO: 73827

SEQ ID NO: 74936 - DNA, 1842 bp, Burkholderia xenovorans LB400; identical to SEQ ID NO: 71720

SEQ ID NO: 74937 - DNA, 1605 bp, Burkholderia xenovorans LB400
atgagtacctcgacacctctctatctcaaagctgcggaagatttgcgcgagaatgaagatcaatggtgcgcctaccaggcgacggggaactgtgtcattttggcaggccctggcagtggtaagacgaagacgatcaccattaagatcgcccgacttcttgctgaggacgtccgcagaccgcgccgcgtcgcgtgcatcacctacagcaatgcttgcgtcggtgaactgcgatcacggcttacgagactcggcgtgggcgacagcgatcgtctcgtgctttccactgttcactctttttgcctgacggagttggtgttcccttatgccaagatggcggggctccaaatgccggatccactggttgtggcttcaccagcacaggcaagagcgcttttcagcgatgcctatcgtgcgcagttgggcgggaacgcaccggcgtggttccgcatggcctgcgacaggctacggcgcacgattctggaccgaggaagtgacgaatggcgagcggggtcggcccgggaaacgatggtagtcgaggcctacgaaaatttgcttctacaaaacggcctgatcgacttcgacggattggtcctcgccggcctgcagcttgttgagaagaacgagtgggtccggcatgctattcgggccaagtatcccgtggtcgtgatcgacgaatatcaggatctcggcgtgcccctgcaccgcatcgtgttggcgctccttcaagcgggagttcggatcatcgctgtgggtgatcctgaccagtccatttacgggttcaccggtgcaaagccagacctgttgacagcgttggctggtctccagcagatggagtccgttacgctcaagttgaattaccggtgcgccgatagaatcatcgctgcctccagggcgctcttgcccgagccagcggagttccgttcccatgatggccggtccggcgaaatccatattcaccgtttggagtgcagcattcgcgagcaggcggactatgcgctcggtacgctggtgccagcgttgctcgaggcgaatccgtcgtgggcgccgggagatatagcggtgttataccgcacgcttaatgagggcgcgccgattgcggaggcggcagatgctcttggtctgcaatacttccgtcttgacaacggctcacccatcaagcgcacacgcgtgaccgagtggctcacggatgcggcacgatggtgttccgggggatggcagaccggggaaatctcgctctcccaactcctcaaagcatggcgacggatgtaccgctcggtcacgcacgagtccgagttgctggctacacggaagcgcttgatttcggcactgttctcgcttcgggatagtgcgctccctttacgccgatggctcttggcattgcgtcgcgacgtgctggatgaattacttgaacaagagcctggacttgccgatgagaaagacaaccttgaagaactgacagcggccgcgggggcaggcggccccctgcgggcattcacggtggagatcttcgggaatcagggtaagatgccgcgcgtcaaacaagatgagagcagcgcgtcaatctggatgagagtactggcgttgcggcagcggtggagggcgtag

SEQ ID NO: 74938 - DNA, 2349 bp, Burkholderia xenovorans LB400; identical to SEQ ID NO: 71722

SEQ ID NO: 74939 - DNA, 1791 bp, Burkholderia xenovorans LB400
atggtcgccggcgcagggtcggggaagacgacctcgctggtcaaggctatcgcgcatctggccgagacacgcggtcccgctctgcgtcgggcggggcagcaaattgcctgcatcacatataccgaagtcgctgtcggtgaaattgtggccgacgttggcgtctcgccgctattccacatttcgacgatccacagtttcttgtggtcgatcatccggccgtttcatatcgatatcgcgacctgggtcgctacccgtatcgaggagaagatcgcggagcgacgcgaacattacgacaggccccggacgcaggagagaacgaaggcgcgtcttgcacaggagattgctgatctggaggccgagttggatgcaatcggtggagtcgggaagttcgtctacggcaatggcagcagttacgccgagggcattctcggccacgacgatatccttaagcttgctccagcgtgtgtcgcttcgcatccactgctgagacttcttgttgctaaacgctttccctacatcttcgtcgatgaaagccaggacaccaatccggaggtggtggaggcgctacgacaaatcgcgggggaccatcctgatctttgcgttggtttcttcggtgaccccatgcagaagatctatatgagcggagcaggcgctgtgccgttgaacgacggctgggcggaggtcacaaaacccgagaacttccgctgcccgacatcagtacttggggtcatcaatgcgatccgcgccggtggcgaccgcctagagcaggtgcgtggtcggacagtgaccgttgatggcatccagcaacccgtcgctggctcctctaatctgttcgtcctcccggcggacggtgaacggagcgcgcacctcgccgctgttcggcggtggttggcggtcgaaaccggggatgatctctggctaagcgatatgcgggagggcgatgtgcgcctgcttgtgctggtgcaccgcatggccgccacccggctcggctttcccaatctgtatgccgcgctcaatgaccgagccccaatgagcttgagtgagggtttgaccgatggaacagcctggcccctccgcccggttgcccagcacatactcccgcttgtcgtcgcggcgcgagcgggggatcagttcaccgtgatgtcggtcttgcgcagcgaaagcccgaaactcgagcccgagcggcttcgaggacaggcgacggcacctgttcttagagcgctgcaacaagcgctcgacgggcttgtggcgttattggcggaaggatcgcaggcgaccgtgcgagacgtcttgacacttgtgcgcgatagcgaactgttgcgcctcgacgatcgctttggcgtgcatctggttgccgagccggtagacgacggcagcagcggattcgagaacgttcaggcgtacctggcgtgcggtgtcgacgaactctgggcttaccggcgctacttcaccgaggaatcaccgttcgcgacccatcatggtgtgaaaggtgcgcagtttgagcgtgttctggtcgtgattgacgatgatgaagctggcttccggcaatattcctatggaaagtattttgggtacgtcccgctctcggaaagcgacgaagccaggattgcttcagatgaagaatccgtacttgatcgaacacgtcgcctcttttacgtgtgctgctcacgagcggtgaaggatttggcagtcgtggttttcgcccctgatgtcacggcggcccgcaccgcgatcgtcgggaagaatctatttcccgaggccgtaatacggggagtggagcatctggattga

SEQ ID NO: 74940 - DNA, 1686 bp, Burkholderia pseudomallei; identical to SEQ ID NO: 72318

SEQ ID NO: 74941 - DNA, 1896 bp, Burkholderia pseudomallei; identical to SEQ ID NO: 71759

SEQ ID NO: 74942 - DNA, 1686 bp, Burkholderia pseudomallei; identical to SEQ ID NO: 72318

SEQ ID NO: 74943 - DNA, 1896 bp, Burkholderia pseudomallei; identical to SEQ ID NO: 71759

SEQ ID NO: 74944 - DNA, 2370 bp, Burkholderia pseudomallei
atggacattcccgaggtttctgctcattcctccgctacggacccggcgtcgagttccgccccaagtgcaccggcagtgccacccgccgaaacagtcgcgcttccgggcgattccccgatccgacttgcttgcgtcgaagtctgcaacttccgacgcttggcaaagacccgccttgagttcgatgatgccaccactatcttggtgggcgctaacaacagcggcaagacctctcttctcacggttcttcgcaacttcctcagcgactcgccaggctttcgcgctttcgacattagcctctcgcagtgggcgaaattgcggcaactgagcgaactctgggaggcgctggacgaggaccccacgaccgaatcaaaggatgcggaaaaatgggagcagcagtatcggcagcttctaggttgcatgccgttcattgatctttggttcgacgctaaggaaggcgcgtacaactatgttgctcccttcattacatcgctgaaatggcgtggcggtgcagttggcgtgcgggtacgactcgaacctgtggcagactcagatgagttgcggaagctggcttggcgctaccgagaagcgcgttctcccgtccggacgcttccgaaggatggccacgcgtggcctatggatctgcttgattactggttgaggtactccgcggacctgcgccgcattgctgtttaccgcctcgaccctgcgaaggggcccttggcaacggagcagtgcaatgaactacaagaactgccacctgattcgcagccggtcgaactgcaactcctgcgcaagctcgtacgtgtggattttgtgccggctcaacgggggcttggtgcggaagacgacgagacgagatccgagtcggcgggcacgcgtcccgggctgttctcaagccagcttctgaaatttgcccggcaacacctgaacgtcgctccatccggccatggcaatcgcgaggatctggttgcagctattgcaagggctcaagcggaacttgacgattcgatttacaaggcgctccaaccggcgatggaggacgtggaggttctagggtatccgggactgcatgatccgcaacagcttcacttccgtacccgcattcagactgccgaccttctcgcacacagcaccgcggtccagtatcgcctggacgagacggcggtcgacgagtcgttgccggagcattctattgggcttggctatcagaatttgcagtcgctgagcttcatgctcgtgtcattccgagccgcgcgcctcaatcccccgcagggctctccagcggcggttcaccttgtaatggtagaggaacctgaagcccatttgcacgttcaggttcaacgcaacttttcgtcgaatgctcacgaactcatccgcccaaaagagctcgtgcatagcaatcttcgcagccaattgctaatcagtacgcactcaagccatctagcccacggggacagtttcacgcgtctgcgatatgtaaaacggatagcaagtaccggtgcgggcgttaggcccagtagcgaggtcgtcaatctcggcgacgcctttggcgatgacattcaaaccaggacgttcgccgagcgctactttcaggtccaacacacagacctcctcttcgcggacgcagacatttttgtggagggaactgcggagcgcatgctggtgccgcttttcatcgagcgcgactttcccaagcttgccaaaaagtacgtgtcgttccttgatatcgggggcagtcacgcgcaccgcctcaggccgctggtagagcggctggggattccaacggctgttatcaccgacttggaccctgtggtaccgaccacgagcaaaggcgggcgggttgtgcgagcggcggtacatatcgcaggccaagcagacctcgagtgtgggaatgacacacttacgtcgtggcacccgaagctagcggatttccacgcttatgcgaagccaacgtccgcacacttggagtgggtctccgactcgggcgtaaaagtccgcttcgcatggcagcttcccgtcgcggccgcaagcgatcaatggccaagctcgttcgaggatgcactcgtcctgacgaacatcgattggtttaaagcgttggacgaagagaaggattcggtgtccggcaagaagaaggatcaccgaggcactctcgggaaggtgataggtctcgtactcgaccactctgaccataccgagcttcttaaggaactccacgcgatgctgcatgggaacttcagcaagggcgatttcgcggcaacactgtttgaacggttgaacgctgggcaagccttggcatgtcctacatacatcgccgacgcactcgcctggctgagtggtcaacttgaagccacagccggagagaccgagtga

SEQ ID NO: 74945 - DNA, 1731 bp, Burkholderia pseudomallei; identical to SEQ ID NO: 73953

SEQ ID NO: 74946 - DNA, 1896 bp, Burkholderia pseudomallei
gtggttccgtgcccccaggcagccgaagcggtcccagaacaacggcaagccaatggtgagtacctgccacaacctcgcacactctgcgactatttagctgacagcattggcgaccatttaaggcgtagttttgagctacgctattacgttctcgatagcgctcagttcggccccgacttccgccccgctgctggctacacacctttgcgtatgacgcacgacaaaggtcgcggcagccgagagatactgtccagtttgatcaaggtcgatttcctgcatgcacagcggcatctgtcggactctggtggcggagctcgatccgaagatttgtcgcggtgcttgagtcgcttctatgaaagaaacctcgagaaacacgaggaagactatgacgcccaacgcgcactctatcagtcggaggcactgctcaacgaccatctcgaacgtgttttcggcccgacactcgagcggctctcgcatctcggctatccaggcctcaacaatcccaagctgttgatcaagaccgcactgaatcctgcaactattttgagcagccatgatggtgctcgggtgcattacgccgttggaccagaagtaggcatagacacgcagacgacactgccggatcgctacaacggcctggggttcaagaaccttatctatatggtggtagagcttctagacgcgcatgccagatggctagatatagaagagaaccgtccgcctttgcatctgatcttcatcgaagaacccgaagcacatctgcacgctcagttgcagcaggtattcattcggaaggttctggacattctcgatattcccgatgaagatgcaccgcactgcaccactcagattgttgtttcgacacattccccgcacgtgctcttcgagcgcggcttccaaccgattcgctatttccgccgcgttcgcgaggccggagttcagcgatcggaagttctcagtatggcttcgttctatgaaacagctaacgacccgaacgatcctactgaccgtacccgggatttcctcgagcgctatctaagactcacgcattgcgatctatttttcgccgatgctgccattctggtagaaggtaacgttgaacgcttgctgatgccgcagatgattgcgaaggttgcgcccggccttctgtccacctacgtgagcattctagaagtcggaggagcattcggccatcgattcaaaggtcttatcgagttcctggggctcactaccctgatcgtcaccgacatcgatagtgttatggcgcctgcggcagccgatccagtagcccccgacgatgaggatgatcccgatgccgatcccgaccttgaagaagcagccgaagatcgagccgcagttcgaggcggacgcaaagcatgcatggccaatgagcccggagcattgacgtcaaatcaaacgctaatccaatggcttcccgggcgcagcaccatcgccgatttgctcaacgcgactgtcgaacagcgcattcaagtccgcactgttgctagcgatgcgttgatccgcgtctcatatcagacatcggttaacgcaagttggcgtgggacgacagctgccatggtcggtcgaacattggaggaagccttcgcgctcgagaatctggcctggtgtcaggatgcggcacgcgccgaaatccgcctgcgcgttcgaggctgcaacaaattgtcccttgaacagatcgcacaaagtctgcatcgcaaaatcaagagcgcgaatttccgcaagaccgactttgcattggcgcttctctcacaggacccatccgcgtggacggtgccagcctacatctctgaaggtcttctctggctcgagcatgaggtggttccccatcctcccgaaatcgcggctcctccgatcaacgcaggagcagtagcatga

SEQ ID NO: 74947 - DNA, 1896 bp, Burkholderia pseudomallei; identical to SEQ ID NO: 71759

SEQ ID NO: 74948 - DNA, 2370 bp, Burkholderia pseudomallei
atggacattcccgaggtttctgctcattcctccgctacggacccggcgtcgagttccgccccaagtgcaccggcagtgccacccgccgaaacagtcgcgcttccgggcgattccccgatccgacttgcttgcgtcgaagtctgcaacttccgacgcttggcaaagacccgccttgagctcgatgatgccaccactatcttggtgggcgctaacaacagcggcaagacctctcttctcacggttcttcgcaacttcctcagcgactcgccaggctttcgcgctttcgacattagcctctcgcagtgggcgaaattgcggcaactgagcgaactctgggaggcgctggacgaggaccccacgaccgaatcaaaggatgcggaaaaatgggagcagcagtatcggcagcttctaggttgcatgccgttcattgatctttggttcgacgctaaggaaggcgcgtacaactatgttgctcccttcattacatcgctgaaatggcgtggcggtgcagttggcgtgcgggtacgactcgaacctgtggcagactcagatgagttgcggaagctggcttggcgctaccgagaagcgcgttctcccgtccggacgcttccgaaggatggccacgcgtggcctatggatctgcttgattactggttgaggtactccgcggacctgcgccgcattgctgtttaccgcctcgaccctgcgaaggggcccttggcaacggagcagtgcaatgaactacaagaactgccacctgattcgcagccggtcgaactgcaactcctgcgcaagctcgtacgtgtggattttgtgccggctcaacgggggcttggtgcggaagacgacgagacgagatccgagtcggcgggcacgcgtcccgggctgttctcaagccagcttctgaaatttgcccggcaacacctgaacgtcgctccatccggccatggcaatcgcgaggatctggttgcagctattgcaagggctcaagcggaacttgacgattcgatttacaaggcgctccaaccggcgatggaggacgtggaggttctagggtatccgggactgcatgatccgcaacagcttcacttccgtacccgcattcagactgccgaccttctcgcacacagcaccgcggtccagtatcgcctggacgagacggcggtcgacgagtcgttgccggagcattctattgggcttggctatcagaatttgcagtcgctgagcttcatgctcgtgtcattccgagccgcgcgcctcaatcccccgcagggctctccagcggcggttcaccttgtaatggtagaggaacctgaagcccatttgcacgttcaggttcaacgcaacttttcgtcgaatgctcacgaactcatccgcccaaaagagctcgtgcatagcaatcttcgcagccaattgctaatcagtacgcactcaagccatctagcccacggggacagtttcacgcgtctgcgatatgtaaaacggatagcaagtaccggtgcgggcgttaggcccagtagcgaggtcgtcaatctcggcgacgcctttggcgatgacattcaaaccaggacgttcgccgagcgctactttcaggtccaacacacagacctcctcttcgcggacgcagccatttttgtggagggaactgcggagcgcatgctggtgccgcttttcatcgagcgcgactttcccaagcttgccaaaaagtacgtgtcgttccttgatatcgggggcagtcacgcgcaccgcctcaggccgctggtagagcggctggggattccaacggctgttatcaccgacttggaccctgtggtaccgaccacgagcaaaggcgggcgggttgtgcgagcggcggtacatatcgcaggccaagcagacctcgagtgtgggaatgacacacttacgtcgtggcacccgaagctagcggatttccacgcttatgcgaagccaacgtccgcacacttggagtgggtctccgactcgggcgtaaaagtccgcttcgcatggcagcttcccggcgcggccgcaagcgatcaatggccaagctcgttcgaggatgcactcgtcctgacgaacatcgattggtttaaagcgttggacgaagagaaggattcggtgtccggcaagaagaaggatcaccgaggcactctcgggaaggtgataggtctcgtactcgaccactctgaccataccgagcttcttaaggaactccacgcgatgctgcatgggaacttcagcaagggcgatttcgcggcaacactgtttgaacggttgaacgctgggcaagccttggcatgtcctacatacatcgccgacgcactcgcctggctgagtggtcaacttgaagccacagccggagagaccgagtga

SEQ ID NO: 74949 - DNA, 1731 bp, Burkholderia pseudomallei
gtgcgcgtcatcacgtataccaacaacgccaccgctgtcgtcaacggccgacttggcgagaattacctgactgcggtgtcgaccattcacgccttctgctgggaactcatcaagggtttcgacgaagatatccgagacgccctgctcgctcgcaacgccgaaagccttgcgtctgcgaaggccaaggcattgagtaaggccaagggggaatctgatagggaccgggagaagtacgcagagatcgaagcgaaggctgaagaaatccggaaaattgatgcatttatctatcatccggaccgcaacacctacgggcaaggcgcgctctcacacactgacgttctacatgtgacagcttggctcattcgtgagcgaccaacgttgcagcgcatccttgaggaccgacaccctctcatcctcatcgatgaatcgcaggacacgatgaaaagtgtgcttgacgcgttgttcgagctctcgatgagccgtcccggacacattacgctcggactcctgggcgaccatcggcagcggatttatcccgacgggcacgacgatctgccctcgcacgtaccggaggactgggcacgccccgcgctgcagatgaaccatcgcagtcagcaacgcatcgtcgagctcattaataaaatctgggacgcggatattgaaggccgtactcagtccaaaactggcgtgcctcagcattcccggacggagaaaaacggcggaaccgtgcgccttttcgttggcgataccaagacgagcacggccgagaagatcaggagggagtcggattgcgccctcgccatggctgcggagactggctgcgctgcctggcaagatggcacgcgtggctacaagacgctagcgcttgagcacaagctggccgccaagcgcggcgactttttcgatgcgtatagcgcgatggacctgctggacaaggacgccgcgatgcctaagagcaacggtgagcggactggtcccgcgatggttcggccactgcttggcccaatgctcgaacttgccgagtgtctgcaagcagacggttcgctgaacgagttcgctgctgttgacgtgctgcgccggcacggaacccttgcaaagctgccggagaccagcgctgaacgtcaagctgccttggataagctccatgcggcagtcgtgaagttcgcgggcgtcatctccacgccggaagcgacggtccgagatgtattggggccggtcctggaaggagggatattcgatgcggacccccgtctagtccaggcatacggcgatacctcgcctccaccaccagaacccaaacccagaagcaaggaagcaaaggaagatcggcgcaggcgcggatggtgcgctctcttcggcgcgccttggcaacagattgctcggtatcgcgcctatcttagcggagacgcggaactcgcgactcatcaagtcgtcaagggctccgagttcaagcacgtgatggtcgtgatggacgatgaggaagctggtggctcgctgttctcttacgataagcttttcggtgccgaggagttgagttcgaatgaccgcgagaatgtcgacgaaggaaacgagaccatcatcgaccggaccctgcgccttctgtacgttacctgtagccgagcagaggaaagcctcgcactggttctgtgggcaaagaacccgactgcggcgcttgatgcaatcaaacggtcagaatggtttgctgctaacgaggtgtccgctttggaatag

SEQ ID NO: 74950 - DNA, 1785 bp, Burkholderia cepacia; identical to SEQ ID NO: 71894

SEQ ID NO: 74951 - DNA, 1815 bp, Burkholderia cepacia; identical to SEQ ID NO: 73827

SEQ ID NO: 74952 - DNA, 1998 bp, Sphingobacterium sp. ACCC 05744
atggcacagcataaaaacccatacatatcaagagttcaaataaaaaacttccgaaatttcttggatgttgatgtagcattagatcacaagcaggtaatcataggcgaaaataatgttggaaaaaccaactttttaagagctatccaactcattttagacaaagactattctgattcagatagacaattaactactgaagattttcacgatagtattgataaaccaatggaaaatggagaagagattgagattaatttggagatcaagggttacgagcataacagcaaacttaaagcacaatttgttgatgctgtgatatcagatgctcctccaacattacgacttacttacaagtttatacctaacaaagatgagtttgagaaaataatcaactataagtatattatttttaaaggtaataatgaagagtataaattcaggaatgaggatcgaagttatattaatatttatgttataagagcattgagagatgttgaaagagaattaaaatcaaataggaattcccctttatataaactcgttaaacaatatgaaatatcttctgaccatttagaagaaatatcagatgcccttaaagaagccgctgaaggaattttagaattagatgaaattgtacatataaaagatactctttccaatcgctttgcctccttatctggcctccaaaccgaccatcaaataacattaagaacgtttgatattgataccgaaaggctactatacaccttgcaggtatatatggggttaaaggaaagacctgtttctgaactaagtttaggattagccaatattctttacatctctttgatgcttattttattgaaagataaaacgatattaccaataataaaacctgagcagtttgactcactggtggctgaggatgaaaaaggaatattgtcccaattatatgaagcaagtgagaagggaaattatattttaaaaaaagaaatagaagacgaggacattgaagctttgtacaattttatggatgaacataattacaggcaccaggcatttacaattttagcagttgaagagccagaagcacatttacatccaacattacaacgattgatataccgagaggttcttcacaatagcaatacctcagtgatattcacgtcacattccacctatatcacatccgtaacaccactgaactatgttgttcatattcgaaaggtagataatagcagcaaagttttttcaacagtcaatttatctcttcaggataaagagaaaagggatattgaacgttatattgatgctaagcgtggtgaaatttattttggtaaaggaattatactggctgaaggtattacagaagaatattttattcctgctgccgcagatctgatagaaaagcccctagataattatggaatcgtggtttgtaatgttgactcaacgaattttaagccgtatatccaattacttaatactcttaacattccctgggtactatttaccgatggagattattatgagattgaagaatatttcgataaagaaggaaagcctaagactaaacgaatttatcatataatagacgaaactacagggagagcttggggatataaaggcaatgaaaatattttaaacattctctctacactcggaattatagcagaagatgagaagttagacgaagaagaaataagagataatggctgttttataggacaatacactctcgaagttgatatgatgaataatgctgatgaagacggaattgaaatactcaaaaacatctataacgagttgaagtcgggaggagatgaaatgcaagagaattttgaagatgctcttgatacagaatattactggtctgctcttagaaaaattgaaggtaatatcagtaaagggcgttttgcacagcgattagctgatgaattaattcttcaattagttccagattatatcagtgagggtatcgaagcaatagtccaaaaagtcaaagattcttatgaatag

SEQ ID NO: 74953 - DNA, 1863 bp, Sphingobacterium sp. ACCC 05744
atgaatagtttgttttttcaagatttagaactgataaaaaaggacgataagcagtatgaagcttatcggtcgatggagaattccgtaattattgccggtcctggaagtggtaaaacacgtgtattaactctaaaagcggtaacgcttgccaaaagccatattcataaaccttgtggattggcttgtatcagttttagcagagagtctgtgagagaactaaaaaagagattaaaaagttatggctatattccaagtagcaaggatttcataggaacagttcatagtttcagtttattgcatgtaatccaaccttttgcacatttatatccccaatacaatgtaatatatcctattaaaatccttcctgatgatataaaagagagactttataattctgtacttcaagaattgaatattgagaatgatcgagatttgtctttggtcgatattaataaacacagatcactttctttaaaaggacgcagtgagattaatatggagtcgtccgatttaatcgcaaaggctgctgaaatctatgaagcaaaaatcagagaaactgaattcattgattttaccaatattatcaatctctctgctaaaataataaatgaacaagaatatgtccgcgaaacattaagaagccagttcccttggttattagtagatgaatatcaggatttaggaaaagccttgcatgaaatggttcttgagcttgtattttatgccggaataaaactttatgcggttggtgatacgaatcagtctatttacggatttaatggaggatatccagattttttactggaacttaccagaaatgacaacataaaaactattgagcttgtttctaattatagaagttctcaacacattattgatgcctcaattgaggcactaaaccccgtccctccctatcctaaatacgttgcaggtaagagaaaagatgatattgcagacttcacttttattacgtgtgaggaagagatggaggcgcaatacgaagtagtggcaaaaaaagtgatatccaatttattagttaaggggactcctttaaacgaaattgggattattgcaagttctaatgcgcagattcataacatggctaattacatgcagcaacaaaagattccttttttcattgtaaactggagttttgagaatagtgctgtcgttgtatggctgcaagactgtgcatcatggtgtagcaacaaaaacacacaatcttttgaagaattatttaagttctggaaaaatctggtaaataaccatcaggatcttcgtgaaaattgggagaatatccgattgaaatcactcttttatagagtattgacaggaagcatatccaaaactaacgtctatgattggctaacttatactattaataacttagacctgaaagatacactaattgattcagagatttatcctaatgaggtaggaaatttagaggcgttgctaaatgaagccaaactccgtaatttaaaagatgtaaatataacacgatttgcaaatttgggattcccagaggatcaggttactattactacaagacatagttcaaaaggcttagagtttgaagttgttatcctcttaggaatggaggaagaacattttccaagtttctatcatttaggaaatgagactgctttggctgaggatcagcgcctatgttatgtatgtgttagtcgggcaaagacgacttgtatacttctgagatcccgaatttttactatccagacaagaagaggtccttggaaaaaagaatatgaagcatcgcgttactggaaaagtttgtataatcgatttggcaatgagcaaaatacttttactaaggatgcttatccattaattcaagagaattaa

SEQ ID NO: 74954 - DNA, 1872 bp, Cedecea neteri
atgtttttatcaaatctaaaaatggacaatttcagacaattcgaagatttttccttagagttaaataaagggcttaatttacttgttggtgaaaataatgcaggaaagagttccgtcattgatgccatccggattgttcttgacactacgtctgtagaatgggtgagtataaaaagtactgatttcctcagcggtaagaatgaactatatatccaattaaaatttgaagatctgtcagcccgtgaactagggttatttctagaatatttaaccaacgaagaaataacaacgggtgttaataagagctgtttatatataaacctctcagcaagcataacaattaatccattcaaaaaaactcaattcatcaagacggaagttcgatctggtttgagtaacgatggccccatcatagaaagagatatcagagaatatcttgctacaacatatttaaaaccgctacgcgatgctgaggttgaactatcggcagggcgaacctcaaggctctcacagattttaggaagtaatgtcagtttagctggagatgaaggggcgactcagcggattattgagttactaattcacgccacacaggcaattcaaaatgactcttcgattcaaatgactcaagagaaaatttcaactcttttgaactctttaacattcaaatccaatattttcacaccttttttaagtttattggggagtaaagaatatactgaaatgagtgccccggagaaagcgtttgctctcaaatccattttagagaaattatcactcgaactcaacacttcaggaattaagcatggattaggttataacagtctattgtttatggctacagaactaatgttaattcgtcaggaagaagatcagtattcacttttacttgttgaggaaccagaggctcatcttcatccccaactacagttgaaattcattaattacctcaggactgaaaatagtaaattgcaatgtattttatccactcacagtccagtgctttcatcaaaagccccattggaaagcttaattttaatgcaagatggaaaggcctttcctttaagaaaggaatgcaccgctctaagtggtgatgactatatatttcttgagaaattcttagactcaactaaggcaaatatgttttttgcaagaggtatattgattgttgagggtattgcggagatggtgttaatacctaaaatagctgaattactaggacgaccactagaagattatgctgtgtcattggttaatgtcaatggtttatccagaaagaggtacgctaaagtttatcgttctaacaccgcttcaatgtccccctctcatctcccaattaaagttgggtgtattactgatttagacctatggccagatgaagcggaggcaacaatctcaaacagttatgggtttaaacaaaaaatacagcctaatgaaaccaccggccgagggggaaaccttcaacattggctgaatgagttgacatcagaacaaataaaccagaaaaaaaatagtaaatccgagtttgatggagaacttgttaaaacatttatatcaaatgactggacatttgaattttgccttgctaaatatgggctaagtgaagaattatatgaggcccttcatggtaaccttataggctatgaaaatcttagtactgatgcacaaataagggctgtgcaattatatggagaaatagaaaataaaggtgatggaaaaagcgaagtaagttatcttcttgcaaagatcttatcgaaatatagtgaacgaccttcagagttaagatctaaactacctccttatattatagaagccatcgaatacgtaacagaagaattctctaatgacgaggagacatcgaatgaacattga

SEQ ID NO: 74955 - DNA, 1863 bp, Cedecea neteri
atgaacattgaaattagtgaaagagacatcaacgatgtagagcaagagttaaacttgtcatttgatgatgcaagacgcgaaataatacaatcatataatgatgtccaagcttgtcctggtagcggcaaaacaacaatggtagcggctaagttgttaattatcgcaaaaaaatggatgagtttacatcaaggtatatgcgtcctaacgcatactaatgtagctaaaaaagaaattatagagcgtctccaaacgagtatacatggtgggaaattgttaacttcaccacatttcatcggcactattcaagaattcgttaataaatttcttgcaataccttatcttcgttctcaaggatttaaaataactcacatcgatgatgaaatatgttgtgcaagaggctggggttttcttaatagaggaacgaaaaattaccttgaaagaaataggataaaatccattcaagagatgcaatataaatttatagatggatgccttgaccttaacatccctagtttccgtagagaatcacagtcgaacagttatcaagatttgataaatgctaaaaatacacttatgacagaaggttatttcttttatcacgaaatgtatgaaatatcaaaagactatatacaccacaaccctgatattataaaagcaattcaatctcgttttcctatcgtttttatcgacgaaatgcaagacacccaaaaatttcaagatgaatttttaaatacaatctttcgaaatgataatgatcaagttaagatgcaacggtttggcgatcctgaccaagctatttatgggactaatgaggaagagaaccaaacctataatcaagcagagttagaaaaagtaaaaaatagtcatcgctttaatagctctatagcatcaattgctagaaatctaagttataatcgcataaatttaacatcggaaatttctcatcccaatcaatcactacatacaatatttcttgtcgatgatagttctcgcactaatgtatttgagcatttcgctaatttatgctcgcaagtagttccgattaactgtgaatacccaataaaatctgttggtgcagttggtaaaaaaagtgaaaactctttaacgatttgcagttattatgagaattttgaaaaaactgattctacagtaggattcaaaaacactaagttaattcaatatatatatgttgcccgccaacaaaatcgtaacagtgaatcttaccgtacaatccttgatggaattattcatttcgggagagtatctaattttcagatcacaatgcaagatggttcacaatctgatatatcagtcgcaaacataaaaaaacaccttaaattatcttcacttttagttgattttaacttgttagcgatgtctttaatgacaaatgaaatatccgaagaaacttggggaaattccgtcaccttattattgtcttacttaggtattaatatatctaaccgaaatcacatttttttatctttcgagcgtaatctaataaacgaaccccatgatagtccaactagaaatattatctcttttgaaattgaaggaagaattatagagaatcaaattgcaacaattcattctgtaaaaggggagacgcatgctgcaactttacttctagaaacaaaatatcatactaatgatataacaaccttaattgactacattcttttagagaatataacacaaccgacagaagccagaaaaaagaaattcatgaagcaaatatatgttgcactcacaagacctaaatacttattgtgtattgcaatgaataaatcaggatttccggccgagcatatttcaaagcatgaacttgcgggttggaatatttgcgatttaactcaacattga

SEQ ID NO: 74956 - DNA, 1455 bp, Lactobacillus salivarius
atggatgatgtaaagcagtttaggaatttatttaacttttgctttattaaagcaagtagacctttagatgatgatttatcagaccattctcattcgatcagtaaacagatgattaaaatggctaaattagatggagaatggaatgaattgatagatgaattacctgatgaaattttaaagcctattcaagacaaagatatcagtaagaaggttcaggaaacgtcgctaaattcattaaaagagacaattatggctattgaagaaaccaatggtgggagatcaggtgaattgatgttggatatgcttattacagaagaagatattagtgatttacttcaaaggatcacaatggctacatattgcgtcgatggttatttcctaggtgaagaatcacaaggattaggctatagcaatatgatatatatacatcttcagttaaatgaatatgaaaatagtacagacagctgtaaggtaaatgttttctttgttgaagaaccagaatcacatatgcatcctcaaatgcagcaagtatttatcaaatatctcattgaacattataaaaatggtattcaaggattaattacaacacactcaaatgaaatggtgcgagttgctgggataaaacatttacgtgttattagaaaaacagatagttttttaagtgagctccatgatctttcgaaattaatcaatgaattacaagaatcaagtaattcagaggataagctattagccaatttctatgattggttttttgagattggttattctgaacttatatttgcagataaagctattttttatgaaggagatacagaacgattatatatcagaaagcttttaacattaaaaaaatatgaaaagctaaagcaacaatatattgcttatattcaggttggaggagcatatgcaaaaaattatcaaaaaatgatagagttgttaggtatcaaatcattaatcattactgatatagattattctaaagatgcaaaagtaatagatgagatagaaagttccgaaataactaatgcgacaataaagacgttctataggattgataaccctgagagaaatccaacggttaaagatctatatgaatggaaagataagaataagaatattataagtaatgggttaatttatacttgctttcaaactaacaatgatggttattctaggactcttgaagaagcgatgctttcgaagtatttctcgattgatgttactacaagtcttacaaaaagagaatggatagaaaaaagagaaaattcaaaactaaaatttgttattccgactaaagaaataaaagaggaaaactctatcaagttgcgagatattttaaaatcgacatctagttcaaaaacaaactttatgtattctgtagtacttaatgaaaaggtagaaaaaactgaacctaattatattcaaggaggtttggaatggttgatgaagtag

SEQ ID NO: 74957 - DNA, 1947 bp, Lactobacillus salivarius
atggttgatgaagtagagaatatttatcttgtgaatgcgcctgctggaagtggtaaaactacatggatccgtaaacaggttgaaaaacatttgcttgaaaatgatgacgataatattttatgtataacatatacaaatcgagctgcagaagaattgggaagggatataaagtctaatagagttttttttggaacaattcatagttttataagtaactatatgggaagcttttttggacataaagagataattgatctatattgggaactatacgaggagaaaatagcacaaagaattgctaatgttgaaaacaagaaaaatgtttcaattagtaatgaaagatatatagaaaaatacggagtactggacatggaaacagtacactcaaatttgaaaaagataagttatggtgaaactcaattcacatcgttgtattatggattattaagccatgatgacttactatcgttcaccaagaaggtagttgaaagatatcctgttattcttaaaaaaattcgtgacaaatatcaacttgtttttatagatgagtaccaggatacaaatgcggatattcttaaattgttttattcatcgatggtgtcaggtaagggaaagttgtatttattaggtgacaaaatgcaacaaatatataagaactacgatgggagctttgaagatactttcaatatattgaataagtctacgagactagacgttaactatagaacgactccgtatattgtcaatattttgaatgctatatacaatgataaatcattacaacaatacccttatgataaaaatttagatagtcaaatgttgtttaagcctaaagttatttttacaaatgatagagataagacagttaatgtatttacaaagaaaaataaagataccttggttctgtatttaacaaataaagaacgtttttatagtattggtgtaaagaaactttataagtcatttaataaaatacctaagtatcaatttacagggaagtatagtgttgttgatgtgcttacaaaggaagaggtttggaataaagatattcttttgagtataatttttttactcattgatatttgtgattattatattaatggtaagataggaaacatttttaagataacgcggaacaatgaaaaaatttttaatagaaaagttttttcaatacgattccatgctgataaaaaagcattgcatgataaattagataatttaattgctatttaccaagaagaaggaattactataggttcattccttaagagttgttgtgataatagacttatagaagaagagtactatggagaaattattgaggataatgactatgcttccgcattggaggttacgctatctgaaatattaattttaaggaattttttagaaaatccatatatttcgacgcaacatggtgttaagggagaaagtcatgatactgttctgtttgtggcggaaaataattctagaatacctatagtgaatatgagcaaattctttgatctatggagtaaagtgaatgtagttctaagagattttgataatttttattatgcttatttaaaaatgattaagagtattgaaaagaaatgtggcatgaaaatatcaaagataagcttgaatgattataggaaaaatgaaacatttatttcagaaaaaatatcaaaatttaacgagatgtattatgataatgactattatattgtacttttaaaagataaatttgatgagtattttgttgaaaagaataacaaaagtgcacaagagtgtttgaaagagaatgcagtttatggtgctttggttgcgtatcgactcttttatgttggatgttctagagcacgtaaaaatcttgcaattgtaattaacaatgctgatatagttgcttttgaagaacgattaaagaacaaatttaaagatattggttttgaaattgaggaaatttaa

SEQ ID NO: 74958 - DNA, 1998 bp, Paenibacillus graminis
atgtacatatctaacttagatgttacaggttataaaaattcaaagagtaagtcggttattaaattacaaaaagggctcaatattctagttggagaaaacggctcaggaaagaccacaatcataaatgctctacggctcatcttacgagaaaatgagttctcatatttgaatattgatgaggatgatttttatgtttcattagacaaagacttctcagctcctgaaattagaattgacctaaaaatcgaatccctcaattcggacgaacaagttacttttctatcatggtgtgatgctgattttaacgcacaactacattttgaagttagcgccaatccgaacagaaaaggatactataaaaaagaaatatggggtggcgcttcaaaatcaagcatttttgaagaggagacatttgattgtattgactgcatataccttcctccgcttcgagatgctgaggaaaagctagttaatggaaaaagatcaaggttggcacaattattaaaaaaacaatatggtgataataaagatgaacttgtaaggagtgtcaaaggctttaatgagcaaataacaagtaatgccgataagaaatataatgagattgaagaggctaagaagaatattaataccaaattagaagaaacattaggtcaaagacttggacaaagtattaacttgcagtttgctgaaacaacctttaataaaattgtagagagcataaaaatggttttctttccgggaatcaaggaaaacaatcctgaaaaatttagggatatcgcaatcaacagtttgggatacaataatttgttatacatagccactgtttttgcggagcttgagctgctaaaagacaataatatgatgacagtattacttatagaggagccggaagcgcatcttcatccacagcttcaagttaaatttattaaatatttggaagagcttactcgaaaacttgaaaatttacaggttgtaattacaacacattctccggtcctagcttcttccgttgatactgacaatttaattcatgttgcttataaagatgatagaatcatagcaactgtattaaagtacatcaatctaggagaaagtaaaagttatattaatagatggctagacgtgacgaaatcgactttactattttccaagggagtcatccttgtagagggaataagtgaagcgatgcttcttcctacgttcgcgaagatagtattagcagagcataataaaaatgctctaaatggtggtatcaataatatgttacctaattccttggaagaggctggagtatcagtggtgaatattaatggtattaactttaaacattttatgagacttttttcaaatttcaaagaagctacaagccaagcgcatataccaatatattgtgctggaatcactgataatgatccgccaaagatcaaggtaattgtatatgataaaaatggagttatgaagagtgataaaaatggtgatccggtaactacggcagaggatgtttatccccttccaagtgaagcacctattggagcaaatatcgctttgcaattaatagatgaaattaatatgagtaagtggggccgattatatcgttctcctttaaaaacatttgagtatgacctggcaattgaagaaaacactcgccaattggctgaagttctccacgatttatggtcaaaagatggatctgttaaggcaaactgtaaaactattattacaaggaataatcagtattttgataatgaagagttattaagaaatgatgctgaatttatttttacacatattgatgctgatgaagttggcaaaggtgtctttgcacagaagttagctgattatttagaagagcaaataagaagtcatatgggcaatataaatgcttccaagtcgaaccttactgaagtttattccgaaattagcagcctaattacagttccagagtatataaaaaaggcaattaattgggcaatcgggggtattaaaatagatggataa

SEQ ID NO: 74959 - DNA, 1962 bp, Paenibacillus graminis
atggataagctagaaatggagcatgaaattataaatactttgtgcaaaaataataagaaaacagaaagttattcattaataattcaagataaagtaagagaaaagacagagcaacaactagaatatgttctttctcctattaataaaaatgtattcttagaagcttgtgcaggaagcggaaagacagaagttgttggaatgaaaaccgcgtatgaaattagtaaatggaattttaagaacaaaggaattgctgtactcacgttcaccaatgaagctacagataccataaaggagcgggttgaaagattttcaggtttaagctcaatgttccctcattacattggtacattatcagctttcatacatggttttatttcacaaaattttggctacaaattctttaagcataagaaccgagatggggacaaatcatacaggttggtagataaaaatttagaagtgtttgataatcattggttaaaaaaatataaaataccctatataaataataatgcaggtcatcatgaattatttgcgaatcaaatttattttgataataaaattaatgatgttattttatatcaatcagagactaaaaaaactccacttaaggagttttataactcatctgattttcaaaaatttgttaatgattatagagagaagtcggggaataagacagcattaggatttgagtacataaaagagcagatagctaaagtgaaaaatagcttttttgaagatggttttgctaattttgaagatataaataatatagcacttagaatcttgaagagggattcgaaactaactgaactccttgcttctcgcttcccaattatattagttgacgaatgtcaggatttatcatgggttgagatgaacattctcaatgagtttaaaaaggctggtacagttcttcatttcataggagatcttaaccaatctatatatgagtttaaaaatgccaaccctgaaataacaaaagcatttctatctgattttgataaatatcgtttgacagacaattttagaagctgccatccaatagttgagctttcaaatagattgttaggcataactttacctatccgtggtcttgggattgataaggtaggagaaaaaagtattagttatctggagtacaacgatttatcagtagtaacagaacaataccagaaatttttaattggagtaaatatatcttatgaaaaatcggctattttggtgagacaacaaaatttaaaacaagaactagagacaaatcaaacggaaagcaagcatctattattagatgctttacaactttggctgcagaatactccaacatcacagatgttagcattggaacttgcgggtaaacagatgcaaaagtggtttggaggatctaagaccaaaaagaattatttttgtccaaatgcaatcgaatctgcatttcagtggagaatttttttgaaaaatttcttagaaggatgtttagcaaacgatcgtttaattaatgttggagatattgaatattccatttggtataagaactttaatgcttgctttttgacaatgatagaaaaggcttatcagtcactagctgattttgatatagagaagagggactttaataccttaccaaaattaagaaccccatctggttcagcaaagaataaaattgttattttcaattcaaaagacaattcaaatatggtaccgataaataccattcattcggctaaaggtaaagactttgagagcgtaatggtcgtctcaagccgtcgaaactcaggaaacagcggcggcggtcattggaaacattggctcgaaaaagagctggaatcaggaagaataggttatgttgctaatacaagagctaaatattcattggtttgggcagttccaactttaaagaaacaagaaaaaattgaagttgaatcttatggttttaaaagaattactttaaaggacatatag

SEQ ID NO: 74960 - DNA, 2112 bp, Prevotella histicola JCM 15637 = DNF00424
atgcatatttcttctttatctattagaaattttagaaatttcagaagtgccaaactgaaattcacgaaaggtataaatactatcatcggagaaaatggctcaggtaaaacaaatttgttttatgctttaagaattctacttgataatacgcttccgcgacatataagcttttatgaaacagattttaatagatctttaggaacttggaaaggacattggttaattatttctatagtttttgaagatttagatgcaagtgaggaagctcaagcactggcaattcatgcattcggacaaatgaaacaagaatctaaaggaagctactctatatattttcggcccaaaaaggaatttagaaaagaattttatgactattcgttaagtgaagataaaaatattgaaggcttaaaagatatacagaatcgattgaccatagaggattatgaaactgtttatttatgtagaggggaagcagactttagtgatgacgaaaactataggcgatatgtaggtgattttgataaaatagaatttcctaatcctgatgatatggagaaattagcttttggaacacctctcccatcagtaataagtattcataatgaggtctcatgtacttttattaaagcattacgtgatgtagaaagcgacttaaggtcttatgctaacaatcctttattaaatcttctaagagggagggaaaaaactgtaaaaatagcaaagcaaaacgaaataatagaaagcattgataaccttaatgaacagattagctcactggatgaagtaaaggaaataaggcggggagtagataagagcataaaggatgctgtgggaactacttatgcacctaatatcgatataagatcagaattacctaatgaaatggagaggttattccagtcattaaaactatgggttggtgatcctgatgatttaggatataaagggaagatttgggaattaagtttaggaggagcaaatttgatttatttgtctttaaaattactggaatatgaaaaagtaaagtcggaaaaaattgctaattttcttttcatcgaagagcctgaggcacatattcacacacatattcaaaaaactcttttcaataacttaaaagaaaataaaacacaggtaataatatcaacccattctacacatatctcatcagttagcaaaataagtagtgtgaatattttagcacgcgaaagccaaaggtcgttagtcttttatcctgcacataaattaaagaaagatcagacaattagagtggaaagatatttagatgccgtaagaagcaaccttctgtttgcaaaaggagttgttttagttgagggtgatgcagagcaggttttaattccagaaatgttcaaaaaggtatttggactttcgctggatgagataggagttagcttaataaatattggtagcacaggttttgagaatattgcacagattttccacgctgatagaatacaaaagcattgctccattctgacggataatgaccaatcaataatacctcttcctgatgagcccgatacagatgatgattatcaaaagcactgtagaaagtcacaagaaagtggacttgaaaggaaaaaacgacttactgatttttgtaacggaaacagttttttaaagctattttttgcaaagcatacttttgaagtagatttattaatgaatgataatagttatgagtatgtacagtgtctaaagaatatctaccaacaggataaatatattaaacaatccgaaagtaaattagaaaataaatcggttgaaattgcgggaaaagaagttttaaggattgcagataaggttggtaaaggttggttagcattattagtggctgaggaattagtttataatacatatatccctgattatattctggatgcaatagcatttgcagcttactctcttaatgaatcttctaaagttaaagcaattttatatcgtttaatggtattaagtgaaaatgataataataactatcaagaagaagcaagcaagtttctaaaagaaggaaaaagtgaggagactattataaacgaattttgtgatactttccaagatgatcaattaactaaattcttaaagctattatga

SEQ ID NO: 74961 - DNA, 1776 bp, Prevotella histicola JCM 15637 = DNF00424
atgacatttaacgaattaaatgatgagcaaaaacaagctgttaaacaagaaggaaatgttttgttgacggcttgtccaggaagtggcaaaactcgtgtgataattcataaactagcttatgttgctagtcactttgatgagacttgtaagaaaaaagtagctgctgtgacttttacagtaagagctgctgaagaaatatttagacgagttaatgctctagggattaattgtgatcatgtttggtctggaacattacatgccttttgcttagagtggatattgaagccttactcttgttatgtgcctgcactcaaaaatggattttcaattgctgacgaaaccttctgttctgaattagttagtaatttaaaagctaagtataaaataaaacagacagaacctataaatttccaatttcaaagagatggaagctgtgttgagacgaataatgtaaaacttaaactgttggatgattatcatacttttttaaaagagaaaaaacttatagattttgaacaaatactttgttattcttatgaaatattaacaggaaatcctaagatctcaaaagtgctttctaatttattcaaattggtttgtgttgatgagtatcaagatacgcaagaattgttatatgcaataatttctacaatcattaaatctggaaaaggtaatacatctctatttctcgttggtgacatagatcaagctatttatacttcccttggtggagtggctaaaagtttagatgaaattcaggcagaacttgataatcttccagtaacacctctaacacttgcaggtaattatagatcgagtcaaaggattattgacttttatagtaattttcaaacgcagcctattgtaataaatgccgtagggtctaatgccgaaaaaaggggcttaataacgcttaatcagactgttgataaatctaatattgtagatgaaatagccagattaattcaaaatagcttggataagggaattccagaggatgaaatttgcgtgttagtcccacaatggcggttgataacctctgtttcaaaaaagttaagagtagcgttacctaacgtaaattttgatgcttcaggattatccccaatgtcaaaaaatagagataatatttggtataaactttcacggctattcctcacagaacgaaatccaaaaatatattcagcaaggtatagatgggcaactgaattaatagatggttttagagatattacaaatacagaattctcagaaagatattcaagtgaacgaaatttgttgagactaataaattcaataaattctaataaggaggagggtattgattatttaaaagattgttttatgcaatttcttaagacagtagaaatagattataccaagcatccactgctggtagaattatgggatttttattttactagtattaggaagcgtatagaagattctaattttaaaattcctagtgatattcaatcgtttaaacgtttttatagagaaagagcaggagtcgtcattaatacttgtgttggtgtaaagggagaagaatttgaaacagtaatcgcatatggacttttaaaaggtcttatcccacactggaatgacatacttgctcaaaaggggatagaagcttcaaagaaattgctatacgtcatttgctctagggctaaaacgaacttgcatcttattagtgagacagggagaaaaacgaaggcagaaaatgcatataaaatgacagatgagttaaaaaatataagttttcaatatgatgtgatataa

SEQ ID NO: 74962 - DNA, 1782 bp, Prevotella buccalis DNF00985; identical to SEQ ID NO: 73752

SEQ ID NO: 74963 - DNA, 1782 bp, Prevotella buccalis DNF00985; identical to SEQ ID NO: 73753

SEQ ID NO: 74964 - DNA, 2139 bp, Pseudomonas cremoricolorata
atgaaaatagtaaggattgaagtcggcaattttcgtttgttgaagaatttttctcttgatcttgagagtaatctttctctggtgctgggtaaaaacaatagcggaaaaacttcgctgctttccgcattagaaaaatttataaactcatctgataagaataaaatagtttttgacgattttaacgttgatctaaaagcagctctaagtgacttggttagcggagtcaagcccataggtttggagagtgactatttacccttaggtataactttaaagttgtgcattgagtatgatgatttagatgatttgtcagcggtaagtcagttgataatgagtttggatcctgatgacaatcatattgtgctcggatttgagtatttgattagctactcccagttgacggcaatgcggaatgacttcagtgctataaaagacaaatatgacaacgaccctagtttgttccttaaagaaaaccagcacatttattttgaccagattcggaaaaaaagcttttcctatagtgatccggaagtgttcacggatttaaataaggaaaatattagcctggctaatgtcatctcattcaggtctatcggtgcgaagcggagtgttacgaatagagacaatgataagacactttccactcagactgcaattatctataaaaagacatctgagaaccaagagcagcaggaagctgttgaaggtttcaagaagcagttacggtcaaccgacacagagctgagtgaaatctatcagaacatgttttctggattgttgagtaaggtggcaaagtttgggggttcaagattgtcggagacgcatataaaaattgcatctaccttgcagcatcgagagttgctggatgggaatacaacagtaatgtatacccatggttcgcatgatctgccagagcactttaatggtctcgggtatatgaacttaattagtatgatttttgagatagagatgctgatgagctctttcaggcggcctagcaaggaaagtcctgctactattaatttgctctttattgaggagccggaagcgcatacgcatcctcaaatgcaatatacttttattaagaatattaagtcgttgttagaagaaagtagggtgagagaggatggtatagaaattcatcttcaaacgattataagtacgcattcttctcatatagtggcggagtgtgattttgatgatattaagtatttgagaaagtcgcctttttctaacagcgtagacgcaaaaaatctcaagtctctcaagtctgagtattcgtctgatggtgcggatgataatgctcaaggtgaactttgctatagatttctcaagcaatatcttacattgaatcgtgctgagctgttttttgctgacaaagcaatactggttgagggtgacactgaaaagattcttttgccagcaatgatgcgaaaacttgataaagagttcccagatactggtgtcatgccgctactttctcagaatgtctcgattgtggaggtaggagcgcatgcgcagatttttgagaagtttattcatttcattggcattaaagctctagtcctgaccgacatagatagcggcattaaagagctactttttgaaagggatggggttactccgcaacggtataaaaatggtaatcaaaaaatagagaccagaaaatgtcgtcctgatgaccctgcggcagaccacacagcgaatggatcgttgatattttatcacggcaaggttagagaggacttgggctactttacttcacttggtgctgaaagtaaggctttatctaaagtcggaggtgagtggaaagttgatgtcgctgggtctgttttcttggcatatcaaactgaagataacggctatcatggaagaagcttcgaggatgcttttttttcaattaacaaagcactccttggaacggaccacgagaagtttccctctctaacgcctaagtggtttaataaatacgtaaataacgagtgctgtgcattcgaatttgcagagaaggcagttggcaaaaagccttcgttagcgattgagattttgcttaatagtataccggatgataaatctgaattttccaattggaaaacacctcactatatccaggaggggttggaatggttgcgcaaatga

SEQ ID NO: 74965 - DNA, 1926 bp, Pseudomonas cremoricolorata
atggttgcgcaaatgaaaaatttagagggcgttagtgaagagactagaaagattttagatgctatcaatgagggcaagagttttttactgagtggtggtgctggaagtggaaaaacatattctttggtagaggttataacgagcttggttaccctcaagcctttagcgcgcgtagcgtgtataacctacaccaacgcggcggtccgggagattgagagtagagccagtcatccaaatctacacgtttctacgatacatgactttctttggggagtaattaagcacttccaaattgagctaaaagaagttctgttatcgctgattaatgacagtgatatatcaaatttcaaaattttggatgctaacggcgaaccgacaagcttggctgaaattgatggggatgttaggtataaggagtacgtaaaatttagggaggggattatttctcatagtgaggttatcgttcttgctaatgagatgtttaaacgatatgacaaattatgtagaattctgaaagattgctatccatatattcttgtggatgaatatcaggacactcaggctgaggttgtggacatacttctcacacagctgactagagtcggatgcccaaatgttgttgggtttttcggcgatgcaatgcaagcaatttatgaggaaggtataggggatttagatttatacaaaggggagggtgttgggcaggtaagggaaataaagaaagaagaaaacaggaggaacccaaaaaatataatcgatttggcaaacaaacttagaaatgatgggatttttcaagttccttctaaagacttgaatgctcccaatatggccgaggacggaagtgtaaagaacggatgcatacagtttatatactcttcgaatgatgatgttaatgttgtaaagagatttcttggctgggacttttccgaaccttcaagcgcgaaagagctgaatcttacccataacctaatcgctgcaaaggcaggcttcagtgagttaatgagaatttatgatggtgacaagattttagagtatgtccgtagagtaaaaaactatattaagaggagtgagcctgatttcatctgtgatgggaaaacatttggagaagttttagtcggtttgaagagtgggaaggtaggtaaaaccttaaaaaacattgagcccactgatggcatggcggattatatcgcggagcatcgagccgtatatgatgaagcgctgggctaccaatatactgagcttgcttctctatatgtgaataaggaccagctaatagatgatcagaaatcagatagaggggagttggggcgtggcggtggtaacagagatgatcttataaagcatttatttaaaatacaaaacaatgttcagttgtacttggaggggagattcaacgagtttgttcggataactgagcatgccattacgtcgaaaaaagataaagttaggttgaaagaggagattgtaaggttatctagggtcgacggcaaaacggtccagcaagtcatcgatgaagctaatgctgggggaatcgttagaattgatgatcgtcttaagttatttgttgaatcaaaacgctatatttataatcaagttgccgcgcttccatttgcacaatttcaaaagctatttgaatatcttgaggggtttacacccttttctactcagcataaaaccaaaggtagagagttttccgatgttctagttgttctcaataatggtcggtggaattcctataattttgactatctgttcactgatcgtgcggataaagagagtgtggtaagccgtacgcgaaaaattctgtatgtttgttgcacccgtgcgaagtcaaatttagcattgttttatcattcgccatctgaagccgttattcagaaggcgaaggtttggtttggagatgaaaatgttacaagtctagattga

SEQ ID NO: 74966 - DNA, 2031 bp, Lactococcus lactis
atgaaattacagaaacttaaaatatgtaattttcgttcttttaaaaacgaagagatttttgaatttgacgaattaaatgggctaataggtgcaaacagtacaggaaaatcttcagcacttttagcactatgcaaattgttttcagaaaattcaagtgaaagaacaatatccaagaaagatttctttcaagtagaacctgaaaaaaacagatatttgtatattgaagctgtacttcaaaccaatatcggaccaacagaaacaccactattttttgagcattatgtggttgataatcaaggagaaagcccttatttaagaattcggctagaggctacatgggaagacgatggaactatcgaaggtgcgattgattcaaggatatattttatcacttgtcctgaagatgaagaaatccatgaagctaataaaatgagtgccaatagaaatgtactaaataaaatacgagtgatttatgtgccagcgctaagaaatcctaatctacagctaaaaaatgtttctggtagtatgatgaatagaattatgagaggaattaactggtctgatgatacaaaagcaagtataaaaaatctgataaatgatttgaatgacgttacagctagtgaaaaaggaattgtgatacttcaagaggctatcaagaataagtgggggaaatatcagtcagataagagatattctaaagcaagtctagtatttaattcagataatgttgaatcggcattaactaaagctgaagtaatcttttcgtctcaagagggagaaggatactctagtattgatgacatgggagatgggcaccgttcgctcttttatatatctataattgaaagttttttagacattgaagaaaaaataaatactgaagaatcggaaggatacaagaaatcaattgatttgtctccaccgttattaacaatacttgctgttgaggagcctgaaaatcacattgccccacacttgctcggtaaacttcttttgaaattaagaaatgtctccaagaaagaaaatgcacaggtagtacttacttcacattcatctgcaatcataaaaagaattagcccaaatgaaataagatatctcagattagatattgaatcacaatccacaaaagtaaaaagtatttcattacctgaagaggaaatctatgccgatgagtacaaatttgtgaaagaagctgttacagcttatccagaattgtatttctcaaaattagtgattttaggagaaggtgatagcgaagaattgattttatctaaattctttgaaataaacggtggtaatgttgacatttcggaaatttctgttgtgccgttaggaggaagatttgtaaatcacttttggcgattgcttgctgatttagaaatcccatatatcactcttcttgatttggatagagagcgatctggtggtggttggggaagaataaagtatgcactaactcaactaattgccagaggttataatagagatgaaattcttcaattagctgatggtaatgtaatgtctaaagaaacattcttaagaatgcataattgggatgttgcgaatataaagtgcatggaatcatggattactcgacttgaaaattatagcatatttttttcatcacctttagatattgattttttgatgcttgagatttttgaagattcctataaatatattttaagtgaaaatgaaggacctagattaaaaatagatggagagagcaaacctattaaggaacttggggatgaactgttcgaaagcaaagaatataactcaagaattaaagattcggtacatgctacgttaaaaaaagaaggtggtaagggcgatacctatacagacattcaacaaaagttaatgatctggtataattatttctttttgggccgtggtaaaccaacaactcatatttcgatgtttgctaatattgacgaggaaaagttaaaaaagtcgactccagaagttatcaagaaaatcataactaaggctaatcatatactgactggagatgttcaagatgaataa

SEQ ID NO: 74967 - DNA, 1842 bp, Lactococcus lactis
atgaataagatcataaatgagacaaattggaatcccaagggagatataatacttgaggcagctgctgaaaaagctgttaaaataaacaagaacgttttggttgttgctggaccaggagcaggaaaaacagagcttttagcgcaaaaaacagattttttatttcaaacgaatcttagtgggcctcccaggcgtattcttgccataagtttcaaaaaagacgcggctgaaaatttaaaagatcggattgtgaaaagatacggcaatgagtatgctagcagatttacttcactgacttttgattcattcgcaaaacgaattttagatcagtttaaatcagcactacccaaaaatttgattccttccaaagactatttagtagaagatcgtgataggattgaacaggttttaagcaagtatgtatatggatttgaatcttggtataaaaaacaaaaatcacaagaaatagagaaacaactttatggagagcagaatcagaaaatctggagagatttactaattggtgatgagagcggtaacgcctgcctgacttttaaaatgataagtattttagcaagaaagataatacaagaaaatcctttgataagacaagcactccaggctacgtactctcatgtttttttagatgaatttcaagatactaccacgatgcagtatgagttagtaaaaagttgttttcttgatggggattccattatgacagccgttggagacaataagcagcgaataatggaatgggcaggagctagaaaaacaattttttctgattttcaacaagattttgtggctgaaaagatttcacttatcacgaatcatagatcagcaccaagattggttgagttacagaaaatgatgtatgagtctcttggagagtatgaattagaggcctcctcatcaaccaaatggaactcaaatgatggtgaagttacactatttttgtctgaaaatgaaattgatgagggacaaaaaattgctaatgatatagtacaaaaagtcttgttggggatagctcctaatgaaatatgtatactagtaaaacaactgccagaaaattatacagggcaactcattcctttattaaaagacaaaggaattcgagcccgtatagagaatgaatatcaggatgtattgaagcaagcaatagtcatattgttactgagcatttttaaagtaagcttgaaaaagcagacaccacaagagtggaattatcttgaagaattttactttgaagtcgttgaattaggagaatttcaaaatgaaaaaaactttgattttgttcaagactgtataaaagatattactaaatattgttcagagaaaatgggtagtattacagaggaaaatgattttaaagtattggtagtaggtctaatcaataaaataaatcgcaacacaatttttaaaatttatccagaatataaacaagggatttatatggattcaatattagatcaatttatagaacttttctggaaggaatatgtgatagaagaggatttcaataccgcaattaggacctttcaaggcgaaaatattatacctattatgaccatccataaaagcaaaggtttagagtatgagtctgtatatttcattgggctagaagattcggccttctggaactttaggaataagcctgatgcagatagaagtgcattttttgtagctatatcaagagctaaaaagtatctatccttctcttactgttctaatagagaaacaatgaagaattattataacccgtctggtgatcaaaaaagagaaaatatcaatgaattttacgacttattgagtcaaccaggaatttctaaaattattcaataa

SEQ ID NO: 74968 - DNA, 1803 bp, Pseudomonas aeruginosa; identical to SEQ ID NO: 71790

SEQ ID NO: 74969 - DNA, 1653 bp, Pseudomonas aeruginosa; identical to SEQ ID NO: 71791

SEQ ID NO: 74970 - DNA, 2082 bp, Pseudomonas rhizosphaerae
atgcgagtcgagaaggttagagtcgagggattccgactgcttcaggatgttgagatcatgctggaagaaaattccacagtgatcgtgggacgcaacaacagcggaaagacatcgtttaccgacatttttgatcgcttcactggagagaccggggcgcggtttcgccttgaagacttctcgcccgcacagcgcgagcgattcttcgctgcaaagatgcttagagaacaagcgacaaagccggaggacgtactcgcggcactcccgacgcttgctcttacgctcatcttccgctacgacagcaccgccccgaatttaggacctctttcgcctttcgtcattgacttggatctagactccaccactgccattgtgcgcctcgaataccgagcgacactggcaaccctccacacactgctcgatacccctcccgcaccagaaggtgtcgaaccaagaacacacttcttccgctcgttgcgcgacacggtgcccaaggcatacagcatccatgtgttcgccatcgaccccaccgacgataccaatcgccgtgattttgagggcatggccgcactaacggctttgctgcagtgtaatttcgttcgggcacaaagaactctcgaccatgcgaagcatggcgatgccgatgtcattgggaaattgctcagcgcgttattcaaaactgcctccgcaccaactgctgcggctgcagatcaggagctggcggcgaagctgaaggcatccgtcgaagacatcgagcgcaatgttcaaggcgacttcgacgagatgctgaaaaagcttttgccagccatggaggtactgggctttccgagcctcaatgataccgagcttcgacccgagacctcattgaacattgaggccctgctgtcggaccacacaaaggtggtctacacaggcacagacggggtacatctcccggaaggctataatggtctcggcactcgaaacctgatctacatgctgttgcagctcgagagttaccacaaggcctaccgagccaagacaacccgtccagcaactcacctaatattcatcgaagagcctgaggctcacttgcatccgcagatgcaagaagttttcatcaaccagctcaatgctgccattggaaaactgtcgacgagctatcctgaagaggctgcgtggaacgttcagttcgtcatcacgacgcattctccgcatgtggcaaataccgcatcgtttgaagcagtacggtatttcctaaatgagtcgccaaccccggcaaacgcccgtcagaccaaggtcaaagacttcaaaaagggcttgagcagcatttctcccgacgaccaagacttcctgcaccagtacatgacgttaaccaagtgtgacctgtactttgcggacaaggccatcatggttgagggaacaacggagaggctactgatgccccgtctgtgcgaattagttgataagtcgctcgaggacaagcacaagctggccagacagtatgtgacctgcgtcgaggtcggcggagcatatgcgcagatcttttatccactcctcgactttctcgagctcaagactttggtcgtcaccgacctggattcaaccaagccggtggaaaagcagaacaagcatgggaaaaagattacgacttgggacaagtgccccgtggctgaaggtgagcggacatcgaatgcagcaatcaaggattggtttcgtcccgacgacgccgcggataaggatggctggcagattactccggcagagcttgttgccaaaactgccgaagagaagcaaagcggttaccgtcgcattgcctatcagattgcagagaagcctggcactaacatttgtgcccgcagctatgaagatgcactcgtcctagcaaaccccgatcgatttaaatggcctaaggaacaggacgaggcatctgaggcatgggagatcgccaaggggctcgcgaaagcggatacggctttgcggtttgccattcgcgaaaaggaatggacggtaccccgctacatccaggaaggcctaggatggctttctgccccgcctcctcccgcgcagaacgtggaagcaccagttaaggaggaggcggtatga

SEQ ID NO: 74971 - DNA, 1734 bp, Pseudomonas rhizosphaerae
atgaaggagcctactgagaatcccgcactcgttgctgcacaagaggcccaaagaaagatcaatgaggcccttgatgctggttatagctttcgccttgaagccggcgccggcgcaggcaagacgtattccctggtcgcggcgcttaagcgattgattacagagcgaggcccagccttggttcaagcagggcaaaaggtagcttgcatcacctacaccgaggttgcccgtaacgaaattgcccaggagattgaggatcaccccgccatattggtcaataccatccacggcttttcctgggcgttcctacatcagtttcaaaaagcgctgcgcgacctcgtgggtgaaatggatgaccggaaagaaaaaatcgaacaaggcggaggaatcggatcaaagtctgtggattacaacttaggatactttagcgtcgataccgacagaatcacgctgagccacgacgacattccggagatgatggccaatctcctgcagaaggaaaagtttcgacgtctcttgagccaacagtttccggtgatcttcatcgacgagtatcaagatacccatccccagtttatggaggcaattaccgagcacttcttgaggcccgccacaggtccgctcattggtctatttggggaccactggcagactatttatcgcagtgaatacgagctcgcagagtacccgatagaagaaattcccaaaggctcaaactttcgatcggtacctgcagttgtcgatgtgctgaacaaactgcgccctgaactgaagcaagccgtccatgaacccgaggcgaagggcgaggcacggttctttcacaccaacgcctacaaaggtcaacggaccaatgacaggcagtccaaagaggatcttccacccgacctagcgcgacgcactcgagaagacttgatgcagcgactgcaagccgagggctgggacctgagcaagacgaaggtactgatgctcacccacaacgtcttggccgctgaacagggttatcccaacatcgccgaggtattcagcggtcgcaccgaacaattcgtaaaaaaggaagacccggcgatcaagttctttgtagaagtagtcgaacccatgtgcgcggcctatggcgcatctcgcttcggcgatatgttcagggtgttcggctccggccctacgatcaccaagcatgaagacaaatcctgttggcgtcgcgacatggataccctccagatgctgcgtgcagatggcacgattggacaggtaattgatcacctaaaagaaacgaaacgcccatcgccaccggatcgtctgctccggcgcgacgaagagctcagagccctaaatggcgaccccatacctgacgatgcctcagcacttcagcggtacaacaagctgcgggaaataccttacggagaggttatcgaggtggtcaaattcattgagaaacagacctcctttgccacacagcatagcgtcaagggcgccgagtttgagaatgttttggtagtgctgggagggggctggaatcactacaactggcctcaactactcgagcttgttaagacaaaggcgctaaatagcaagaatacgaagggcttttatcgtgcccgcaacctcttctatgtctccatatcccgacccatgactcggctcgcagtgcttgccacgcaaaccatgccgggaaccgccctcgaagcgataaacaacctgtttggaagcgacaatgtcgaagagcttgctatcgcaatgtga

SEQ ID NO: 74972 - DNA, 1701 bp, Escherichia coli
ttggaaatatcatctctgaaacttaaaggttttagaaattttaaagatgcatacatcaattttaattcgaacactctgatcatcggagctaatgatgttggcaaaagtaatatgctgcattcgctaagaatgctattagataaaagtatctcagattcagaaattgaaccaaatgaacttgattttcatttagaaaatggaaattcatgtgaagaatttgaaattattattcattttaaaaatatcaatgaagatgcagtactttctattttgaaagggaatgtcagtgactcaggtgaatcgttcattaagtatttcgcacaaaaatcggatctcagctataaactttttattggtgattctttagagtctttacaagaaatcaattctcgctattatcttaaatttgttaatttaaaatatattcagtctcaacgagatttagagagatttattcgaaaagaaaaaagacaactcttaaaaatcgcacagcaatcactgaactctgatgaaagagaagaagatgattatttattaggagagataagttcagatttacagttaattaatgataagatatctcagcttatatatgtagaaagagcaacaaaagaagtcaacgatgaacttaaaaaacttgcacatcattactctgaatattctgttcagttagatactggagccattggaataaatgactttattgataacctacaacttggagctaatacaaatggttctaacgtaatgcttggaggagacggacgaaataatcaaatcttattagcattatggaaagcgaaaagtattaaggaacatgatgtcgataacgaagttatcttctatgttatcgaagaacctgaagcacacctacaccctcatcaacaaagaaaattagctgattatttgatagctgaacttccaggtcaaacaatcatttcatcccactccccacaaatagcggtaaacttcgagccagattcaataataagattgcttgaccggggggggcacactgtagccgcaagtgaaggatgctcgaaaggtatttcagatggctgggaagatatgagctatcggatgagtatattgccagcagaatcattcttttcaaatggtgttttcttaatcgaagggccatccgaaattttattttaccattccttggctaaaagtttaaatattgatctggattatttgaatatttcattaatttcagtggatggaatatcatttaaaatatatgcagcaatacttgatgctttagaaattccatgggtaatgcgaactgataacgatatatcaaagctaaaaggtcaagagaagtggaactatgcaggtataaaccgatgtttagatatagttggtatcgaaaagtttgagcatagcgataaaaaaataacatctctagatactcttaccaacggtgactggcaaacagtatctgaggtaataaataaatcgggagtatatttgtcaaaaattgatttagaaaccgaccttgtcgaggaattgagtgctccaatattagatgcgttagataaaaaagataatcaaagtgcaattgaatacttacaaaagaaaaaagcaataagaatgcgtatatttctaaaaaaaatcaaaaaagaccttcataaacttaatgcgggtgatttggttaaaccgttaaaccatcttgtaaaaatagttaaaggtgaatga

SEQ ID NO: 74973 - DNA, 1626 bp, Escherichia coli
atgagcattttttcaccaaccactcagcaaagattagccattgattaccctaaaagcatggtaataacaacatgccctggtagcggtaaaactacagttataaaagagaaaattagaaatattaccggttgtcttccggagcataaaggagtcattgctattactttcacaaggaaagcaagttcagaactggagcgcagatgtaaagccgatgggcacgatataaaacatagtttttttggtacgattgatagcttttgcttaaaggaaataatcattccatttcttcccagaatatggggtggtaaaccaacagaatgtaaagtacttaaaaagctagattctccttataaatattacttagaggagcatttttttggaataccatcagtcgttaatgtcaatgaagatcccggctataagagactgtacgatgagggaatgctgtggatgagttcatttgctgccttagctttaaaaatacttaatgaatctcctgcagcaacgcgatatatcaaagcaaggtatagccatatatttatagatgaatatcaagattcatctttatctcagcatcaattatttctaaaaataaatgaacttggtttatgctctattgctgttggtgatgtttggcaatcaatttatgagtttcgaggcggaaatgctgaactgttacttgacttagttagagataagcaggtatttgcacattttgaaataaatttaaatcataggtgtcatccatcaataattaattatgcatctaggctactcgatccaaacttcgtgttattaccaagcgaaaatataaatgtttacagaaagagattatctgggaacctaaaagatgtttcgatgacaatatcatcatggatttcaaaatggttaaatgaaggaaaatgggggttggagcatgctaaccaaatagctatttttgcaagaaaagagcaatcattactattattatgctcaggattaacatcaacttttagagtttatattgatacgccattagataaattgggcacagaatgttcagatttatataaagaccttctagcgtataggtataaggctataggcactgcgcaagaattaattgataaagtatttgatggcttgattataaatgacaatcagcagtttttattaagaaaaaaaattaaatccctcagggctaaattaacagatgaggaactaattaataagctccacgaaatcgctgaaatgctaaatattcagttttctatatctaatgataatgcagttttggatattatatcagacgatatttacttaaaacagtttatgccatcagataaaaatgaagttcaagtaatgacacttcacaagtctaaaggacttgaatttaaaatagtattgcatttggatatggatgaatggtcttttccatatagaacagtgaatgaagttgatagaaacacagcactatatcctagccttccgcaagaaacaaaccttcattatgttggtattacaagagctgagaaatgctgcgtattaattaatgcagagttacgccaaaactcgactggagcatttaagaagtctgaggcatcttactttttcaagttgccccaactagagggtctttatcgttag

SEQ ID NO: 74974 - DNA, 2040 bp, Prevotella timonensis S9-PR14
atgtatatcaaggaaatcaagatactaaacttccgaaacttcaaggaagctttgatacctttccatgaaggggtgaatgttataataggtcataataatacaggtaaaagcaacctacttcgtgcaatgggtttagtgcttagttataattatggtcataggttgggagttagtgacttattttatgaaaccgatatagcagtgcttaaacagcagtcaccacggattcaaataactcttgtcttttgtcgaagtgcgggggaagccttgtattctgcagaaatgggactcttctctagtttgatgacagatccggcattaagtgaggaagcagaattgagattcgagtttaaattgatagatgtacaagaggaccactataaggcggatgttgctaacgcaaatacagccaaagaaatatggaagattatagagcaagactacatcagactctataaaagtagtcgatcgggaggtaatcaggctgctggtatcaatatcaatgagacgttggggcagattgacttccagttccttgatgctattcgcgatgtcagtcatgacctatacgccggttataatccgctccttagggatgtgctgaattttttcattgattactcggttaagaatgattctacaaagacagaggacgagataaagggacaattaaaaactctgagagatggttttgtacaacagtctagtccactgatgcaaactttacaaggtagattgcagaatggcaaaaacgtgtttctgaagtacgcacttgatacaggtgcaacattcaacggagctgtacctgattttgatggaacggtgacggaaaatgaaatgtttgcagtgttgagaatgattataaaatatgctgttggtatagaagtaccagcgacgtataatggtttaggctataacaatctaatctatatgtcgcttttgcttgcaaagatgcaggcggacagcagcatcacctacatgaaacgcaatgctaaggtactctcattccttgctgtagaagaatgtgaagcacatctgcatccagctatgcagtataagttcctacagtttctacaggacaacaatgcaaatggacatgtacgtcagatattcatgacctcccattctacccaaattgcctctgctgtgaaactggatgacttgatttgtctaacttcacctgcattagggcagattaatgttggatatccacgtgacatttataaagaagataatgatgatgaatccaagcaatatgtccaaaggtttttagatgctaccaaagctgatatgttttttgccaacaaattgatattcgttgagggcattgcggaggagctgctactccctgtctttgctagatatttggacaagaaccttacagatgagcatgtgctggtggtaaatatgggtggtcgctatttcaaacacttcctaaagttgtttgatacaaacaatccatacaccatcaacaagaagattgtctgtttgacagacattgatccctgtaggaaaaagcatgaatctgacgcgacatatgaagcctgctacccatatgaatacaatatagacgcagacaactacgactataagcatcatgcggatacagaggtgaatcaatatgcggaccaccccaacattaggttttataggcaagatgtaacgtacggaaaaacgttggagtatgacataatgcgtgagaatcccaattgtgaactgttgctgaccaactctgtgtccaatctgaaggagataaaagctatgatggcagaacaggatgtaaaaaaaatgatgggtaaaatgcgaaacagtgaggctaatacccgtattaagacatccataggtgcatcgaagtggacggatgaagagaaacgaaaagccttacttgcatcacgttatttgaactccgtttcaaaaggtagcaatgcgctggaactaaacgtaacacttatggctaatctggagaaaccagaaacagacagaaaagagttccatgtgccccaatatattgttgacgcattaacatggctattatcataa

SEQ ID NO: 74975 - DNA, 1662 bp, Prevotella timonensis S9-PR14
atggctattatcataacatcagagcaaaccatacctgtagacaagccatttaaggtgactgctggacctggtgctggaaagacacattggttgataagccatatcaaaaatgtagtatcaaacagcaacaaacttgatgtggtgaggaaggtggcttgtatcacttataccaatgtgggtatcgacaccatcatttcacgtttgaatatgaggaatgacgtggttgaggtatgtaccatccatagtttcttgtatgccaatatagtaaaaccctatattcatctggtagctgcagaatttgggctggagttgagcaaacttgtggttgtagatgactctaattttaaatcaaaaggagcggctgaaattgtattaaaaagcattggcaaatcttggttagataccgaaacctatctgaatggcttaacaaaagccatatggcgttatgaaaaccatgaatacaaacattacaaacccaaatatccacaaacttatgtcactaaaagtggcaagcgatatgttggtaatgactggtacatggggttcaaaagatggatatggagtggaggctatatatcttttgatgacattttatatttctcttacatcctgctttcaaaatatcccaatatatacatattgataaaggctagatatccatatattttcgtggatgaatttcaagatacaataccttttgtggttgacttcctaaccaagttaggcaatgagggggtaattgtgggagtggttggcgataaaacacaatcaatctatgattttctcggtgctacagtgcagcaatttgacagttttactgttccagaaatgcaggagtatgagatacgagggaataagcgtagcacgaagcagataatagatttactgaatattgtcaggactgatttctcgcaagactggctgaatggatcagaaggaatgatgccggaattgctagttggcgatatgcttaactgctaccaacagagtattgaaaagagtggaactaacgatatacaatcgctggcctttcaaaacgtacttgccaattcgatgcgtaaaaagaacggagtgagagaagtcgaaaaaatattagagattgattttgacagcaatgctagacgtcagatgattataaagacgttgattaaggccgtggaatatactagaatgaatgacttgcgaaatgcttggcatcaactagacatcatcaatcgcgataggacaataaccattgtggctctaagacgtttgctagatggctataaggactataaagacggaagcctgatggatttctacaattttctggtgaatgatttacaactcaagataactaagataacaggcaaggcaatcaaggatttctacgtaaaccatacatacgctgatgctgcccttggggtgaagtatggtgattcaaatgacaagcataagactatccacaaatcaaaaggagaggagtttgataacgtctttgtcattcttgaaaaggaagaagacttggagtttctgttgtctccaaacctagatggcaacaatgttcatcgggtgtattatgtggctgctagtcgtgcaatgaaacgcttgtttatctgtgtacccacattaagtacagaaaaccgtattaagttgaaagataagccaataactattccataa

SEQ ID NO: 74976 - DNA, 2265 bp, Enterobacter sp. UCD-UG_FMILLET
atgaaaataaatttcattgaaattaagaatttcagaaagttgaagtctgtccgcatagatattgcagaaaaaaccactctctttgttggtgctaacaatagcggtaaaacggctgcaatggaggccttaggacatttcctcgttgatgcctcgcggtttagcgtaaatgatttgacactttgcaattgggcaaaaataaaagatatcactgaacaatggttaactgaggaaaatatagaccttgctaaatcacaggaagctttctcagatctttttccttgcatggatatttggatcgaagcgaaagaaaatgagctccaatatgtcaatcatatactaccaacgttagagtggaatggaggtttaattggagtaagactgagatatgaacccaagaaatttgatgttttctttgaggacttcatatcttcccgccaaaattcattagatatacacgaccgaatttctgagcggattgataaagaaaattacacaatagcattgtggcctaaagatatttatgaatatctttcaagaaagttgaactcaatgtttacaatcaagtgttatagcttagatccttcgaaattagaatcatctgataatggtatagccaacccccaaagaatagacagtcagcaaacattacttgatggcatacctctcaaagatctaataagaattgatgagatcaatgcacaacgtggctttggaagcccctctgctgccgacaaagagaatagcaaattaaacacacagttgagagattattattcgaaacatcttaatccaatagaaagccctgaactatcagatatcgaagctctacaagccattcgtgatgctcaggatacatttgatgaaagattaaaaaactgtttctctcaagccataaaagaagttgaaggcctcaactatccaggagtaactgatcctaaactaaaaatctctacaaaaatagaaccaattgatggcttaaatcacgactcagcagttcaatatgagttaactaatgctctaagcaatgtatctttagactatttaagattgccagagagttacaatggactaggttatcaaaacttaatctcaattgcatttagactaatggggttcagagatagttggatgaaagttggcaaagctacaaataaaaaattagcagacgacaatcaagaggattttccagcccccctgcatttggttttgattgaagaacctgaagctcacttgcatgcacaagtgcaacaaatcttcattaggaaagcatatgatatattgaggaatcataataatttaggcgataaagaagagcttcatacacaactcattataagcacacattcgagccatattgcccacgagtgtaaattttcttctttacgatactttagaagaattcctgcttgtaaagaacatgagatccctgtatcaacagtaatcaatctttccaatgtttttggtgtaaatgatgatacggaaaaatttgtaataagatacctaaaggcaacacattgtgatttattctttgcagatgcagtaattcttgttgaaggcccagtcgagaggattttagttcctcacttaattagaagacactaccctttcttaaatcaaagctacattaccttattagagattggtggtagccatgcccatcgactaaagaatctgattgttagtttgaatcttttaactctaattattacggatttagaccctaaggattcacaagatggcaaggttaagccctctaaaaaaggcagcggtttcgttacaagtaatacaacgcttgcaagttgggttccagaagttaccggtgtcgatgaattgtataaactcacggaagataagaaagaaaagaaatataatgatttcttttatgtttactcagcttttcagattcctgttttggctgcattcaaaggtgttaaccaagaatttttaccaaacacgttcgaagactcattagtctacaataatctagattttttcagtaatcttactggtaatggtttagtgaagaaattcaaagcatcaattactaattgcaaaaatgcagaggaatttggagaggaatcatttttacacttatctaaaggtaataaagctgaatttgcattagatatactttaccatgacgaaagcgataaattaaacacacctaattatataagtaatggtctaaagtggctcgaagaaaagataaaaataaaacaattagagcttgtttctgatttagccagtgatggagaaaacaaatga

SEQ ID NO: 74977 - DNA, 1839 bp, Enterobacter sp. UCD-UG_FMILLET
atgactatcaaacaaactgaggaaatattagattctaatatacataattacttaacgggcactcaaaagcatagtttccttctttatgctggagctggctctggtaaaaccaggactttagttaatgttctggaaatgattttgaagagtcactcagaagagttcaggctaagagggaaaagaatagccgtgataacatacaccaatgcggcttgtgatgaaataaaaagaagagttaaattcaacaaattaatagatgtgtctacaattcatagtttcctatgggagctaattaggcatcactccagtgatataaaatcttggttaatggaaaacattgctgcggagatagctgatttaagggacaaacaaagcagaacaactagagtttcacaagcttctttagaaagagaaagaaagatagtttccaaagaaaaacgtctgcaaaacttatcagatgtatataaattcacatacaaccctaccggggataataggactaaagactctctaaatcattcagaagtcattaaactcggttcttattttctagatagaaaatatactatgcagaaaatattggtttatcgccatccaattcttttaattgatgaaagccaagatactaacaaactgctaatgaatgcattactcgaagttgagaaaaataacagagatacattctcggtgggtctgttaggggacatgatgcaaaggatatactctgatggtaaaagtgatttagaggcatgccttgacgaacactggaaaaaacctgaaaaaagcattaactatcgttctccaaaaagagtggttgctttaattaatttaattagaagtcaagtggataatcataaacaaaaggccagagaagatgccgaggaaggatatgtaagaatttttataaaagaatgtcattctgataataaagatagagatgaatcgtttgtaaaaaaaagaatgagagaaattactttagatgatgattgggaaaaccatgattcattagtaaacaccctaatattagaacatcatatggccgcaacacgtatgggctttatagacatgttcactcctctctatcaaattgagcgattaaaaactgggcttttagagggctctctgggtaatataaatttcatttgtggaattgtttcaccattaatatccgcctgtattaaaaatgatacttttactatcactaacattttacgaacaaatgcacccttattaaaaagagaacatcttttaaaaaacacaaataatacctcgccacttacacagatcagaaactctcttgatatgttaaagagttttatttctacaaaccccgagcttatcacaattaatttactacataagataaatgaaataaaattacttgacgtcccagattctatacaagaaatcctagaaagtaacgataactcacaagatgatatcattgaagcttggcagaaagcgtttagctctccattatgtcaatttgataaatattataattatgtcaaggggaagacaaacatcgatactcatcagggagttaaaggtctagaatttcctcgtgttctagttttaattgatgattctgaggctaaaggttttatgtttagttatgacaaacttttcggtgttaaagaaaaaaccaaaactgatttagataatgagaaagaaggtaaagataccagtgaagacagaactagaagactattttacgtcacatgtagtcgagcacaaaaaagcctcgccattcttgcttatacagataatacagaaatgctaagaaaaaacctattacataaaggatggtttgattcgagtgaaatagaaataatttaa

SEQ ID NO: 74978 - DNA, 2025 bp, Vibrio coralliilyticus
atgagaataaaaagtataaaagttgaaaactttcggttacttcaaaacagtatgttagatatgacggatggcctgacgttgatagtgggaaaaaacaatacaggtaaaacatcttttgtagttttactcgaaaaatttctatccaagccaaatccgtcatttagtttcagtgatttgcctgtctctgtaagaagtaagctctatgatatatctgaggaaacagatatagatgagttgagcataaggctatgtatatctgtagagtatgcagatgaagacaatctaaagaatatttccgactttatgctggatttagatccagataaatcaaccatcaacatcatgtttgaagctcgcatagaccgagatactttacttaatcgaataccaacaaaaaaagatggtgctgatgaggaaaaatatcttaccgaaaaaaggagcttcatagagagaaatgtcagtaagtttataaaaacctcaatatatgcctacgatgattcgggatatgagggagatagaccctattaccttcagaaccgagaggagttagaagaaaaagagtttaaagatgtttgtaaccttatcaattttcaagtaatacacgctagaagaaatgttgccagttcagatgaaactggtaaaagtccgctgtctaccgtaacaacacagttttttaagaaattaaacgacacggatgatgaacgtctggaacaagttagaaccgcattaattgatatagataaaggtttagaaacgcagtattcagatgtttttagtggatttttatcaagtgcggcaaaatttctcaatttggatggtttgaaagtaatttcagacattgaagcgagttcactaataggttcttcttctaaggtaatttatgggacaacggaggatcatcttcctgaaaatcttaatggtcttggttatttaaatattctgtacctcttgcttaagatagagatgatgaagcaggagttcgaggcgtcctcatcagacattaatttgttatttatcgaggagcccgaagcgcacactcacccccaaatgcaatcaattttctcaaaaaagattcgagaagtagtaagtgaaatacaggggctacaggccgtaattaccacccattcatcttatatagttgctaattctgactttgaagatattcgataccttttaaagcatgaaaacttaaatgttgaatttaggaactttcatactgagcttgcacgaaaatataaagcagaacaaggagatgagggcgcaaagttataccagtttttagaacagtatcttaaaattcaaaatgcggagctattcttcgcagacaaagcaatttttatcgaaggtactacggagaggattcttctaccttggtttatcaaaaagtatgatgaaaaatgtggtgacgaaagtcagccaatatcttcgcagaatatttcaataatagaggctggggcaaatgctaaagccttcgcgccgtttttagaatttattggtattaaatcactaatcctgacagatctagattcgacaaagcaagatgtaaaaccagatataaatggcaaagataggacttcgtatgtggcatgcccggtttccgattcttctcataccagtaatgaaacgttgaagcatttcttttctgcccccgatctaaaagacgcaggttttcctgaatggttcaacaaactaaaacgcggagaattaactgagactgcgggctgtgtaaaagtcgcttatcagacggaagaacatggttatcaagcaagatcttttgaggatgcattttttaattctaataaagctgaattaaagagggcttgcactaatagtgaagttttagggctgaagaataaggatgagattgaaaaaatagatactgtaaacatctttaaattgacagatagagtgattgataaaaaatccgactttgcagcatccttactctatttgggtcttacggggaaggctgactgggtaacaccagagtatattaatgaggggctgaaatggatcagtcagtaa

SEQ ID NO: 74979 - DNA, 2172 bp, Vibrio coralliilyticus
atggatcagtcagtaagtacacccttagaaaagataaaagaatgtatagagcttgaacaatcctttgttttacaaggtggtgctgggagcggtaagacagaaacgttaaaacgaacagtcaggttttgttctgaaaatcaccctgataagaaaattgtttgtattactcatactaataaagctgttgatgaaatagtcgaacgtgtgggttcagggattgaaatatctacaatccattcgtttattagtaagcttattaaaccatacaaacgtaatcttttaaaactactcccagagctcttttaccttcctttattcgaggagttgggtattgatcattacaatggtgatgataagactagaaagactgaagagcataagagatttaaagcactgcacgaatctttggctaataggcgctctatcgtattacaagaaggtacagcaaaagtcactggaaagcgtgaatatgacaaagatcctagctcatttaatacatcgttaaataatgatattgagcagctaaatgaagcgatagcagaaactatcaagcaacatcatttcaatgaggttgtatataatgacacgccatttgatagctttaaaagtgccacttttgggcatgatggtcttatcaaaatagctgcgctgctatttagtcagtattctatttttgggagaatcgttcgcgacaaatatgactgtatatttatcgatgaatatcaggatactgacgaaaatattattcattcattgatttactctactcctgacaaagggctaaccataggtttgttcggtgacagtgaacaagcaatttacgaaggtgggataggttcggcaaaaaggtttatagatgacgggcagttaacgttaattgaaaaagaagacaattttcgctgctcacgtcaagtaattgatgtcgcgaacaaatttcgttctgatggtttgactcagaaagtggctctaaaggaaaccaatggaataatggaaactgctgaagaacgggagggatcagcaaccttttactattcaatcaagcctcctgcgccagaaaaaccagcctctcccaaaaaaagtgattctgatgaaatcaaaagtgtgtaccaaattgcaaaggctcaatatgaccagcaattggaggagcataaacttgatatttctcggaggctggaagatttagttgtttgcgctcaggctgatattggggagaatgtgttattgaagctccccaataaatcggtggctcgtgatgctagtttcggaaatttgtatgagctgtttgatggcaggttccgtgatacacgggaagagataaaaaaacacctcgatagacttcaattcggtcaacttgctgaattactgcaactttttaatagctcggctgatgacaatcgtgcatacaacaagctgataggattgttgaagaaacaaggtttgttcattaaaactaagcaagataaaagagaactgcatcatatgctccaagagctatcttcgtctaatgaagcggcctatactgtcatgaatcgagctgttattgctggacttatctcgttatccgaaagccatcaatcttatcttaaacgcaaggatagcgagctggaaaggattgataaagataacaacatttatgctttcaagaaattacaagaatctggatgtaatacgaagaagcaaatatgtgactatattaaccagaataatggtactgatttgacagttgaagcgattgaggagcactacgatcaactagcaaaagatgttctgagtgaaaaattctattctggattgtttggtagtgatctgagcttcaacgaggtcttagcattttacaaatatgaaggcgacgacagcaacttcatgacaatgcataaaactaaaggaactggcattgaaaatgttgttgtggttttagatgaattcaattggtccaagtatgattttggaagttgctttaggtcggagacagataatccgactaggcaagccctcacaagaaaactgctatatgtggcgtgttccagagcaaagaaaaatttacgttgtgtacggcttctagatagttctggcgaattggcaaatatagagaactactttgataatctcgtgcctgttaatttacaaaagccacgacaaccatcactctgtgtacatggctcacaccaataa

SEQ ID NO: 74980 - DNA, 2076 bp, Paracoccus halophilus
ttgaagctacacaatgtgaagattgaaaacttccgattgctgcaggacgtcgagattgggttcgaagatagaaccacgctgatcgtgggacgaaacaatagcggcaaaacatcgattgcagagcttttccgccgactcctctcagaaaagactctcaccttccgtctcgaagatttttctctcggctgtcacgagaagttctggaacgcatttgaggcgttcagcgccggagcggaggtttcagacgtactggatacacttcccgtcattcgtataataattgatgtttcgtacgacgttgacatgccggaccttggagctttgggcgactgcatcatcgacctaaatccagattgtacatatgggcgtcttgtcctgacttttggccctcgacccgacgcaactacatttctcttcgccgatctccctgcaccagaagaagatgcagagaatgccagaagtgcgcttttccgtgctctgggagcgcgggtttctgccaactacatatcgattttcgaagcgattgatcctaacgatcccacgaataggaagccgctcgaaacgaaagtgctcactgctataatacaaggcggcttcatcaatgcgcaacgtggattgggtgacgacacgaaacgcgaacgagatgttctcggaaaagtcgtagaaatactttttcagtcggcactaagcgatccgaccgaccctgaaaaacggactaccgccgaacagttgaaaagcgctgtcgaagacattcaaagcgatctgcacagcgacttcaatgtcaagcttacatcgctactgcccaccttcgaactgttcggctaccccggactggctgatccaggactcatcactgagacgagctttgacgttgagaggttgctaagcgatcacaccaaggtccgttatgtcgggaagaacgggataacacttccagaaacctacaatggtctcggcgtgcgtaatctcgtcttcatgctgctgcaactcttgcgcttctttcgtgagtatcaggcaacaccgacggcggctggagtgcatctaatattcatcgaagagccggaagcgcaccttcatccccagatgcaggaggtattcattcggcaacttgatcagatcacgaatgctttcgtcactcaattgaacgataatcacccttggcccgtccagtttgtcgttacgacgcattcgccgcacatggctaacgaggcccgctttgaatccatgcgctatttcctgtcgaaagcggacgaaaatggcgtccggcggaccatcatcaaagaccttcgccggggcatgggaactgcgcccgagcctgatcgggagtttctacatcagtatctgactctcacccgttgcgatctgttctttgccgataaggccgtcctgatcgagggaacgtcggaacgcctcctccttccgacaatgattcgaaaaacggacaatgcggcacctggagcaccgcagctcggcagtcaatacctcaccgtcatggaagtaggcggagcctatgctcaccgcttcttcgatttgctgacgttcctcgaactccgcacattgattcttacggacatagatgcggttcgtcccaatgcaaacaacaagcgcgaggccgtacctgtcgcccaagggcaattcacgagtaacggttgtctaaaggcattgtatggtgccgatatatctccggctgccttgctcatcaaaacaccagacgagaagattacaaatggcaggcgcatcgcgtaccagattccagagcaggatggtggagcgtgcgggcggagcttcgaagatgcgttcataatcgcgaaccctggccttttcgcgcttggagaggaagatgttgcaacggcggcgtatgaactcgctgcggaacaaaaaaagtccgcctttgctctgcaatacgcgatcacaaacaccgagtggattgttccccgttacatctctgaaggtttgagatggttggcacagggtaatccggcccctgtgcctcccccagtggccgtagcggtcgaaatcctcgccgaagctgccggggtcgagatcgcccccatccagggaggcgaacatggctga

SEQ ID NO: 74981 - DNA, 1761 bp, Paracoccus halophilus
atggctgagggacaagaaagccccgcagatgccgctggtcgcattgctctggaacgcatgttcgcttgcctggatgaaggacgcagctttcgtctagaggcgggcgccggagctgggaaaacctattctcttgagagagcacttcgcagattgattgaaaagcaaggctccgcgttgctgcggcagcgccaacagatcggctgcatcacctacaccaacgtcgccaaggacgagatcattgccagaacgaacgcgcaccctgcggtgagacccgaaaccgtgcacggtttttgctggtcagtccttcaggattttcagcctacactgcgtgaactggttcccgggttgccgacatgggaggagcggcttgcggaaaccggcggcgtcggtcatcgtcgtattcattatgaacttggctaccccggcgtgacagacgatcaggtgtcacttcgccatgaagatgtattgtcgctgatgattcaggcgatgagtcgccccaaatttcgtcgggttctgacttcacgatatcccattctgcttatcgacgaatatcaggacacggatgccggtttcgttgatgggttgaaagagtggtttcttgatcgaggtgaaggccccttgatcggtcttttcggagaccactggcagaagatttacggcgagggatgtgggctggtggaacaccaggcactggaggttatagacaagcaagcgaacttccggtccgttgatccgattgtgcaggtcctcaaccgtatgcgtccagacttgccgcagatggttagcgatcccgctgcacagggtgagacccgtgtatttcatacaaacaactggccggggcagcgacgaaccggacagggaggcggccactggaaagatgataccagtcccgaggcagctcgtgcttactttcagcatatgaaggatcggctggcagccgagggctgggatctatcggtagagaaaacaaaaatactgatgctcagccacagtatacttgctcgggagcaaggatacgagaacattcggagcatctatggccagttcaacgatccttggttgaagaaggatgatcctcacatcaagtttcttgcggaccagcttgaacccgcctgcgctgcgttcgaggccaaccggtatggggaaatgttcgaggcgttcgggtcgggcatgccgcgcatccgtcgtcatgaagacaagatcgcctggaccaatggcatgaacgtcctcattgcgttgcggcagactggaacgattggcgagataatcgacttcatcgccgcccagccgcacatgcggctgcctgccgctgtggaacaacgcgaagcgaagctcgctgaggtcggagatgaacccgtagaaggggaaccccgccggattacacagcttagaaagctacggacggttcactatacggaattgatagcgttggatcgtttcatcgacgggcacacgccatttgctacgaagcacggcgtgaagggcgcggagttcgagaatgttatggtgatcgtgggacgtggctggaacaaatacaactttgtacagaccctagaatggatggatgcagcgcctcctgctgacaaacaggatttcttcgagaacaatcggaatttgttctatgttgcatgttcacgccccaaggtgcgcctagctttgctgttcacgcaactcgttagtcccgcagcgatggcaaagctcacagagctgtttggtgagaacaatctcgtagccctgcctcctgatccggtcgtaacatga

SEQ ID NO: 74982 - DNA, 2127 bp, Bacillus megaterium NBRC 15308 = ATCC 14581; identical to SEQ ID NO: 74900

SEQ ID NO: 74983 - DNA, 1800 bp, Bacillus megaterium NBRC 15308 = ATCC 14581; identical to SEQ ID NO: 74901

SEQ ID NO: 74984 - DNA, 1914 bp, Colwellia psychrerythraea
atgcacctaaataagctagtaacaaagggttttcgatgttttgatgatgcttttactgttgagtttaatgctggattgaatgtaattgtaggtgagaatggcgcaggaaaaaccgctattattagtgctattagacagttgtttattgattctgaatctggtcgttatgccgtcagtgagatcgattttcatcgtgcatttaaaaaagaatcagttgcttcagatgagtttactataaaggctcattttgatgaactagacggtgatgagaaagttgcattcctgcattggtgtgatgaaaagggtaaggcgtccttaaacttacaggttgagaataaagaaattagagggcgttataagcgtgctttatggggcggtaaatcaagaacaacagcttttgaacctgaaacgatagatcttatccattgtatttatctacctcctcttagagatgctgagtccaaactaattaatggaagacaatcacgtttatcaaaacttttaaaggcattaagtaaaagagaaattgataaactacgaaaaagtaaaaaacagcaccctttagaaaaaaagataattgagtttaatcaagagttagctgatagtgatgattttggaattaaagaggccaataaattaattgtagatagcttaaaaaaatcaattggagaaagctttgggcaaaatacgcttatacaatttgcagaatctgattacacaagaattgtagaaggtttaaggctgttattttttccagaccttacggaacaagaaaatagtacattcagatctttgcaagaaaacagcctaggctataataaccttttgtatatagcctctatattggctgaattaactattgatgatgttgcaggagagataaaagaaagttattttaaattactcttaattgaagagccagaagcgcatcttcaccctcaactgcaagtaagactacttaagtatatttcagatgtagcaacgagaaaaagcgttcaagttatcgttacgactcattctactgtattggcatcttctgttgatattgactcaataattcatttatcaaatagtcagcccccaatagccactccattaagaaattgtgacttacctgataacagtaaacagttcattaaccgttggttagatgtaactaaatcaaacttactgtttgcaagtggcttaattttagttgaaggcattgcagagcaaatgctaattcctctgttggcaaagtcgatacttaaagaccaaattaaaggacgttgtagtcttgaggatgtaggtgtttcggtcataaaccttaacgggatatattttaaacatttcatgagattgtattgtaacctaactgatcaggataaagaggaggatcaagcaggagtaaatattccaattcggtgtgctgggctaacagatcttgatcctgcgaaaagaaaaacggaaaaagatgcaaaaggtgaagaaataacaaccactattaaacctcatgatggagacatgcatgacgggacaaatcatgcattaaaactggttgatacaatcagtaaatcagatttttctagactttttgtgtgtgagtataaaactcttgaatatgatttagcaatgcaagggaataacatacctgtaatggctcaagttttatacgacctctggccaaaagaaggtaaagtaaaaagaagcctgaagccattgattaagggggattggacatgtaagtcccctaaagaaaaatctgaagcggcacatcttatattaaaaagagttgatgacgatgaaattgggaaaggccaatttgctcaggtgttagctgataaaatcgcatgttcaaaagtgattatagatgttccagaatatatcgctgaagcaattcactgggcttgctctacggtagctaatgatgactaa

SEQ ID NO: 74985 - DNA, 1773 bp, Colwellia psychrerythraea
atgatgactaattttaccttagagcaaaaggactatattaaatcaacgattgatggtcatgtctatctagaagcatgcccaggtagtggaaaaacagaagttgtagctgcaaaagttgctaaggaaatatctaattggaaaaaagatcctagtggtataggtgtattatctttctctaatagtgcgactgatgaattaaaagatcgaataggtaaatttagcacttctaatttaaagttttatcctcattttatagggacatttgatagctttatttataaatatatcgtgagtcctgttgctcacaaaatcacaaaatatgctggtacacatgatgattatgcaataaggattgtagaaagtacgtcaagtatatttattcaaactaaatatcaatatgcgggtagaggtaaactcagggcaaatcattatagttacaattcggacagtgatacttttagttttcatactggcgaaaaaagatatgatcaatcattggacgtaattaaatttaaacattgggaaaaaaaggatttgttagataccaaaaaaaggtttctaaaagctgggttttctacatacaacgatattgaattactagccgtagaaatattaaatgacgtagacttgactggcttttctaaaaatttaacactacgtttccctgtaataattattgatgagtgccaagatttaggtgaaattcagctttcaattttacataaactcgacaaatttggggtaaagcttcattttattggagatcttaatcaatcaatttacgggtttagaaactgtgaaccagataatgttttagaatttaccaaagagctagggtttgaattctatcctctaacaaaaaatcatagaagtgttcagccaattgttaatctatgtaatacattagttgcaggagaaaacgtgatagggcgcactacaagtgaaattaatcattgtgttgttttagagtatttagaatgcccaacagaagttctacctacttttactcggctttcaaagccatataataatagtgtaattattgccagagggcattcaatgcttaataaatttaatacctcggctactaaattaaatgaagttcagaagttggctctagctataaatttatttgatatagatgatttcgaacgattagaaaaatcaataacattgttttctcaatacttacgaacattgataaaagaaagtgtaaagccattgagttttaattgtcctgactcaattgattcacctttaaggtggagaaacttcttattcaatgcattaatttttctagttgaagatgatcttaatgattcgactgtttcttggaaagtatggacagggaaaacaaagctaaggataaaggaaattttgaaacaatcatttgtagatgatgatatagcagtagttttaaactcattatcagactgtaatattcgatcgccaaatggattagggcaagaggggcttgggttatctttaaagattgtaaacacgacaacttgctctttgagaaaagaaactatacaccaagtaaaaggtgagacgcatgatgtaagtatgtttgtttctagtgcaggaaaacaaggtggtgtcggaggaaactggaaagaatggctagatgatccaactactgagtctgcaagattagcatatgtcgcttcttcaagaccaaaagaacttttaatatgggctgttaaaaaactaaaaccgaaagaaacgatccagcttcaggatattggttttttggtcatgccattagattag

SEQ ID NO: 74986 - DNA, 2316 bp, Klebsiella pneumoniae; identical to SEQ ID NO: 73440

SEQ ID NO: 74987 - DNA, 1878 bp, Klebsiella pneumoniae; identical to SEQ ID NO: 73441

SEQ ID NO: 74988 - DNA, 1785 bp, Klebsiella pneumoniae; identical to SEQ ID NO: 73688

SEQ ID NO: 74989 - DNA, 1818 bp, Klebsiella pneumoniae; identical to SEQ ID NO: 73689

SEQ ID NO: 74990 - DNA, 2073 bp, Citrobacter farmeri GTC 1319
atgcgcattcatcaggttcaaataaagaatttccgacttttagctgacgtggagcttgtattagaggaacaaacgacagtcattgttggtcgaaacaacagtgggaaaacatcgctctcagagataatacgcagatttttagcagacggcagtgcgacttttcaactcgaagacttttccagttcttgctatgaccgtttttgtgatgcactgaaagcgctaaacgaaggggaagaggatcatgtcattcgtgatctcgtcccagctattgaacttcgattgaaattccagtacgactccgcgcaacctcaattaggcccattgagccccttcgtgattgatttggatccggcgtgtaccgaagcgctcgtggtagtcaggtatgaattgaaagatggccaactggcacggtttctcgaaggacagcccacagaaccactaactcaggagactcggattgccttcttccgggcgttacgggaacgtattcccaacgatttttgtgtaaaaatatgggctgaagatcccaatgatccagaaaatcatcgcgacttacaatctagcgcactgcgcggtctgatcaagtcgggctttatcaacgctcaacggggactcgatgatgtgacatccagagaatcggatgtactggctaaaacggtagaacatcttttcgcaacagcgtcctcggcctctgcggatacagcagataagcaaattgccgatgcgttgaaaggtgcagttcaagatattcagactcagattgacacaaactttggtagccaactcaaaagcctgattcctgcgctgaaaacgtttggatatcccggactgggagggcaagaattacacaccgaaacattgctcgacgtacgcaagttactatcaaacttcactaaggttcggtattcgggttatagcggtgtcacactaccggagtcgtacaacggtcttggcactcgtaatctaatatttattctgctgcagctggctggtttctataaggcatttcgcgctgaagttactgagccgggtgtacatctgatctttattgaagagcctgaagcccatctgcacccacaaatgcaggaggtctttattcgtcaacttgctaagattgttcaacaactggttgatggcactgaggacaggagcccctggcccgtccagtttgttgtctctacacactcatctcacattgccaacgcagctggtttcgagagcattcgctattttctcggtgctacagtgcagggaactcaggaaggagttcgtacaaccaaaatcaaagacttacgtaaagggcttagacatattccaacggaagatagaaatttccttcatcaatacatgacgctgacccgttgcgatctctttttcgcagataaagctattctcgtcgagggattgagcgagcgattattgcttcctgctatcatcaaaaaactagaatcagccgaaccagaaagaccgaagctgtcgagccagtacgcaacggtgatggaagtcggtggtgcttacgctcatttgttcttcgagttattagcatttcttgaacttcagagcctgatcataactgatctggatgccgttctggctcctcggggtaaagcgtgcgccgttcatctcggcacatattccagtaatgcttgtttgaaagcatggttctctgaagatactcctttcacattagctggtttgattgccaagagtgacgatgataaagctcgtaatggaaatcgtattgcctatcaatgtgcagaagtgacagatggcccctgcggacgcacattcgaagatgcatttatccttgcaaactcggctctattcgggttggtagggagaaatactcaggaacttgaaatagaagcccgtgataaagcggctgagtggaaaaaatcagaatttgcattgaaatacgcgattacagaggcagaatggaacgcccccaaatacatcgtcgatggaattcgctggttagctggcagcaatgagcctatgacacaagatccagtattggcgcaggttgtagaggccgcaactagtattgaagaaggagccagcgctgatgtctga

SEQ ID NO: 74991 - DNA, 1734 bp, Citrobacter farmeri GTC 1319
atgtctgagatccattcgcccgccgaagctgctagccagcgagctttggaatctatgtatgcttgcttcagtgaaggacgaagcttccggctggaagctggcgctggtgcgggtaaaacatattcccttattaaggcacttcgattcttgattgagcgaaataagaatttatttgaaaaacatagccagcaaattgcctgcatcacctttactaacgtggcgaaggatgaaatcgtcgcgcgaacagatcgaagccccatcgttttttgtgataccaatcatgcgttctgttggtcgttaatcagtagctttcaaaaaccgttgagagtactgattgaaacaatgccagagtggagagaaaagctcgaagaggctggtggaagccttggtaatcgtagtgttgagtataatcttggacatcgctccatccgcgaccatcgtataactattcatcatgacgatgtcctttctttaactatctcactcatggaacacgataagttccgcaaagtgattacagaacgcttcccgatcattctggtcgatgagtaccaggacacagacaaagactggattgaggcaattaaaagacattttcttggccgaactggagctcctctatttggttttttcggcgaccattggcaaaaaatctatgatggtggatgtggtaagctggaacatccagatgtgattgagataggtaaggaggccaattttcgttcggataagacaattgtcgatgccctcaatctcatgaggcctgagctaccgcagtgtgttaaagatcccgaggctgaaggtctggtacggattttccatacaaacaattggcaaggggtacgtcaaaaaggtgtgcactggggtggagatctccccttagcagaagggcaagctactctggaacgtgtcaaagaaacgttgcaacaagatggttgggatttctctcccgctcataccaaaattctcatgctgactcatcgacttttagccaatcaacaaggttactcaaatatagtagcaacgtttcgatataacgaatcttttacgaaaaaagaaaacgagcatatagccttctttatcgacaagcttgaacctgcctgcgacgcctttgaggctcgcaaatatggtgcgatgtttgaagtttttggtggcactgcgccacaattacgtagccattcagataaggaaagttggcacaatgcaatgatgctgttacttgctatacgcaaaacaggaactatcggtgaagtggttgaattcttgcgtactcatcggaagcccagacttccagataatgttgaaaaactcgaacaggaattactcaattttgacaggactgctggtgctgaaataccccgaaggctaaaagaactggaaaaattgaaagatattccctattccgaagtaaagtcacttcgccgttatcttgatggtcattccccctttgagactaaacacggtgtgaaaggtgctgaatttgaaaatgtcttggtagttgttggacgagggtggaaccaatataactttggtgaaatgttgggttttgctggggaacaaatgctcccagcaggaaaagaagattcatttgagcgtaaccgaaatttgttttacgttgcctgctccagacctcaaaaacgccttgcaatcttgtttacacaagctttgtcacctgaggcacttgcaacattagggaattggttcggagcggatactattgtgcctgcaccataa

SEQ ID NO: 74992 - DNA, 1464 bp, Nonlabens ulvanivorans
ttgagaatcttagatgacaaaaagaatgataagaacaaaacactcgctttaggtttttccaaatattacaatgaacgcgataaaacagatactaatgtcaaggcagttgaagataaactgaaagaagtttcggttgatcttaaagaaaaatatgatttagtactaaaaaagattctagttgatcttggaaaatttggcgcagagacacccattgttattccaaagataactattgattcagaatttgactctgaagcagtaataagaaataatatcaaatattattacaagcaagaggagattaatctgccagaaagttacaacggattaggatatagtaatctaatttatatggtattagagcttgcgagttttatccagcgtttcagaaacgcaaaagaagataaagtttcagaattccttaccgtacttattgaagagccggaggctcatatgcatccgcaaatgcaacaagtgtttatcagtcagataaaaggtattcttgaagaagctaagaaagacaatatacacgtccaattattaattacatcgcactcttctcatatcctatctgaagcagggattgattctgataaaggatttaaaagaattcgatattttaatagaattgatactggtatcgaggtgcaggactttaatactcttgaaatttcaaatgaaaaacaaactgcaaggtttttaaaacagtatttgaccctacataaatctgatttgtttttttccgacaaagtaataatagttgaaggcacaacagaacgtatgttaatgccgcagcttatcttcaaatccgctcctagcttatctacccagtacgtgtcaattcttgaagtaggcggagcgtacacacataaatttaaagagatattagagtttttaaaattaaaaacattggttgtgacagatattgattctgtagattctgtaaatggagaaagatgtgaagtcaatggaggtataggtggagaattaacatctaatcacactctcaaagattggattcctaataagtctacaatcacggaacttatcgcttgtgaggacaaagataaaattgaaaataatattattagagttgcctatcaaactacggaaaacagtattgtaggtaggagttttgaggaagctttcattaatacgaatctggatcttctaaaatcatcttattctaatgagaaaggtgaagtgaaaaatgtaaaaaacctttttagtttcgcaaagggtaaaactttagaaactttaaattctgaaacgccatttgaactagcacctacaagttcaagtgccaaaactaattttgcttttgatataatgtcctttcctgaagacgatattgataattggaaagtcccagtttatattgacgaaggtttaaaatggttagagaaacctatcgacaaagaggttgttgaagaaaatgttgaagcaactggagaagaagaataa

SEQ ID NO: 74993 - DNA, 1713 bp, Nonlabens ulvanivorans
atggaggctatcgataaaataaaagagaaaattaccctgcagaaaagttttgtattagaagctggtgcaggtgctggtaaaacttatgcgttaattcaaactattaactttctaattgagactaacggtaagcaattgtctctcaaaaatcaaaaaattgtctgcatcacttataccaatgtagctaaaaacgagattatacatcgtctcgaaaacaatccattcgtattagtatctacaattcacgagtttttatgggattgtataaagctatttaacaagcagttaattacagaatttgatgcgattaatactctcaaacacgaagaaaaaccagataaacacacgctcggattagctgaccgcataaaatctgtagaatattcagatagagcttttagtgattttgaaaatggaacagtcggtcacgatgatttaattcttttgtctcaaagaatgtttcaaaattatgacctattgacctcaattattgcttcaaaatatccatatctttttgttgatgaatatcaagatactgcaccagaaattattagtgcattcctagactttctacttccaagaaatgaaaagaatattctattaggattttacggcgattcacatcaaaaaatctataattcaggaataggttcattgaaaagttatgttgatgcaaaacggattgaaaatattgacaaaattgaaaattaccgcagttgtcaagaggttattgacttgcttaacaatgttagaacaaacataaaacaagaaataccaaagggtgcggaaaaggaaaaaggtagtgtagagtttataaatagtgaaaattatcctgacaaaattaagagtcaaaaggtaaaagagtatgaagattcattgatgccacaaaaaagtaaaaactatgattacgttataaaggagttagagtcaaaaggctgggaatttggagcaggaagcgaagataaaattctaattatagcaaatagccgtgttgctcgaagaggtggttttggaaaactttacgggatttataatcgtagatttcctcttggtgctgcagatgctctaattaaacgagaacatcctttaactgccctttttgttggatctatggataaaaaaacatctatagaaaggaagactggaatagaacatttagtaaatcattatcataatggttcttataatgagatatctagttttttaaaacgtaatggctctcaatcaatcaatttaaaaaagcattccgataagaaggttattaatgaaaaaattgaaggattgataactacaagaaatacgaaatcaactaaagatgttttagattatgcactagaaaataagcttatcgttctttctaaaggtatgcatagattacaggaaaaggttaataaaaacacagccagactatctgatgatgaaaaagctaaaatcgaaaaagagaaaatcttttacgattctgtaatggccttaccttataaagagattgtgtcgctttttggatacacacaaaatcaaaacgttttttcaactaaacacggaactaaaggagaggaatatcgtaatgttctggttgttattgatgatactagttggaaatcgcagtataacttgaaggttattttgacgatagtgatacatcagatggtcgtaaagaaagaacaaaaaaccttttttacgtatcctgttcacgagcaaaagaaaatcttgtag

SEQ ID NO: 74994 - DNA, 972 bp, Algibacter lectus
atgagaataaaaaagaaaaaaaaagttcgtcaaatatttgtaacaactcattcaactcatattacttctgccgtttctttagacgaaattatttgcttacataacgaaaaaggtgtaacgaaaattggatatccaacgaaagtgtttcctgaaactaaaaacaaaaaatatgtacaacgctttttagatgcaacaaaatctgatatgttatttgctcagaaaatattattcgttgaaggtatggcagagcaactactaatgtccgttttcgcgaattatcttgacaaatcattagaagataatcacgtagctgtaataaatgttggtggccgttattttgaacattttttatatttatttgacagttcaaaagaaaatacaattccaaaaagagttgtttgtattacagatagagatccagaaagaaaagtgaaacctaatgggagtttcaagaaatgttatccttacgaatacaatcaaaatttagatgattttgattacaaaacaaaccctagtgcagatagttatagtaaagggtctcatcaaaatattactttttttagccctgaagtcaataaaggtaaaactttagagtatgaattattaatgagtaaccctacttcaagattattacttacagattctattaataataaacaagaactggaagacttaatggtaatatttgaaactgacggttcaactgttcaaaatttattagacaaattaagagatagtgatgcaaatacaagaatcaaggaatcaataaccctcaatacttctttagatgatgaagaaaagaaaaaatctataattgcatctaggtatttaaattcggttggaaaaggtgaaaatgctcttgaattatcatatattttatctaaaaacattgataagaaaggtacagatgagtttgtagagtttaatattcctcaatatattaaagacgcaatagaagagctatgccaataa

SEQ ID NO: 74995 - DNA, 597 bp, Algibacter lectus
atgccaataacaactataaactctgattataaaatagctgacattgataacaacttcaaagtttccgctggacctggtgcgggtaaaacttattggttagtaaatcatattaaaaacatattacatacttcaaataaattatcaataacaagaagagtagcttgtattacttatacaaatactgccgttgaaactatttataaacggctagggacttcatcttctcaagtagaagtttctactattcatagttttttatataaacatattgttaaaccatatgtttcatttgttgctgagcaatataacttagacattagtgaaatagacggtcatgataacatagttttatcaaattatagttttttaaaagaatggaaagaaagaacaggtcaacaacgtataaatgatgacaatatagtttctgaagcttttaataaattaagatggaaaattgacaatgatgaattaatagcaagaacaccttacccatttaaaattggcagatatccaataaaaaatgattcttatttagaatataaaaagatgacttgggagaaaggtataattcatcatgatgatgtactttttttttag

SEQ ID NO: 74996 - DNA, 972 bp, Algibacter lectus; identical to SEQ ID NO: 74994

SEQ ID NO: 74997 - DNA, 417 bp, Algibacter lectus
atgatgatgtactttttttttagttatcaaattctaaaacaaaagccttttgttgcaaaaatcttattttcaaaattcccttatttagtcatagatgaatttcaagactgtaaccctatacaaattgaaatttttaaaatacttggtctagaagggggggtaacaacaggtgttgttggtgattcttctcaatccatatataaatttcaaggagcagattatactcagtttggaacttttaacttgcctaatgttcatgaatacaaattaatcgaaaatagaagaagtagtaacgaaataattgaactcttaaattcaattagaacggatatatcacaagtcccatatagaaatgtatcttttgaaaagccaaaaattataattgggggatatgacattggcgttaagaaggtctaa

SEQ ID NO: 74998 - DNA, 1086 bp, Algibacter lectus
ttgataattgaagaacctgaagctcatattcataaccatatacaaaaaactttatttgacaaattagattatacagatactcaaattatttactctactcattcaacacaaatctctgaagtaagtaatgtagaaaacataaatatacttgctaaaaaactaaattttgcagaagtttttcaaccttcaaatggacttgaccctaaaaatgtaaatcaaattcaacgatatttagatgctataagaactaatttgttatttgctaaaggtgtaatattagttgaaggtgatgctgaagaaattttaattcctcaaatggtaaaaaaggcatacggagtaagtcttgatgaactaggaattagcttaataaatattagaagcacaggctttaaaaatgtagctcaactatttcacgataatagaatccgtagaaaatgtagtattctaaccgatttagatgatgccatttgtgatacaactataaatgatggagaaagtgaatcttcaaaaaaatataaaacaaaagttgaaaactctagaattaaaggactagaaaggaaagtgattttagatgaatttgaaaaagataatgattggataaaaacattttatgcaaaatatacatttgaagttgattttgtaatgcgtggtaatgcttgggaagttgagcaaataatagataacgtatatgttgacaagcctactataaaactaactaaagaagagttagatgatgaagatgttgctgtttttggaaaaagagttttaactatggctaatcaagaaggaaaaggttggtttgctattatgttaggtaaacatatttcatataaaactatagtcccagattatattgttgaggctattgcatttgctaaagagtcatattctaaaaacattattgctgatatcattgaatatagagtgaccaaaaatgcaaaagatgttgaaattgattttacattactaaaagaaataatagcgagttacagagttgataaagctacaattgatgaagtcattgtcgaaataaaaaatagaatacctgaagaccaaatattaacatttatagaaaaagtgaaataa
